United States Patent Application Publication US 2019/0348154 A1 - sequence listing, part 77

SEQ ID NO: 291294 - DNA, 924 bp, Morganella morganii
gtggcaaagcaaaagttcaaaatcaccaactggcccacctacaataaagccctcatcaaccgtggctccataactttctggctggatgatgaagctattcaggcctggtatgagtcggcaacgccttcatcacgaggcagacctcagcgctattctgaccttgccatcacgactgtgctggtcattaaacgcgtattcaggctgaccctgcgggctgcacagggttttattgattccatttttacactgatgaatgttccgttgcgctgcccggattacaccagtgtcagcaagcgcgcaaagtcggttaatgtcagtttcaaaacgttcacccggggtgaaatcgcgcatctggtgattgattccaccgggctgaaggtcttcggtgaaggcgagtggaaagtcaaaaagcatggccaggaacgccgccgtatctggcgtaagctgcatctggcagttgacagcaacacacatgaaatcatctgtgcagacctgtcgctgaacaatgtgacggactcagaagccttcccgggtcttatccggcagactcacagaaaaatcagggcagcatcggcagacggcgcttacgacacccggctctgtcacgatgaactgcggcgtaagaaaatcagcgcgcttatccctccccgaaaaggtgcgggttactggcccggtgaatatgcagaccgtaaccgtgcagtggctaatcagcgaatgaccgggagtaatgcgcggtggaaatggacaacagattacaaccgtcgctcgatagcggaaacggcgatgtaccgggtaaaacagctgttcgggggttcactgacgctgcgtgactacgatggtcaggttgcggaggctatggccctggtacgagcgctgaacaaaatgacgaaagcaggtatgcctgaaagcgtgcgtattgcctga

SEQ ID NO: 291295 - DNA, 621 bp, Morganella morganii
gtgaaacagattgatgcccagctggaagccctggccgtccgccgcaccgccacagagatgcagcgcgaacacctggaaatccagcaggcgcagactcaggcacaactggagttcctgcagcgcaaattcagcaataaagcactctacagctggctgcacggccgtctggcatccatctattaccgcttctacgacctgaccgccacccgctgcatgatggccgaagccgcgtttgcatggcagaccggtgaaaccacgcgctatatcaaaccgggcgcatggcagagcagtaatgccggactgatggccggggagtccctgctgctgaatctgacagagatggagcaggcatggctgaaatggaaccaccgtacgctgaaagtcacccgtactgtttcactcgccaaagtgtataaggagtatgacacaccggttaatctggcagagaaaattgctgagctgctgaaaggcagcggttccggtaatacaccggcagcaaccgggctctcaatgaccgcagataaagagttatatgccgcgtttaacctgaaggcactgaagattgcggaaaactaccctgcccgtctgggtaaaacacgccgaatcaaacagatcgcgtga

SEQ ID NO: 291296 - DNA, 258 bp, Morganella morganii
  misc_feature (236)..(245): n is a, c, g, or t
atgtgtgaatatcatgcccgtttgatagatgctgatttttcaacctatactacagagcagttgaagttatggaaaaatatagcagaagctaatcaatatgaattgcaaaaactttcccagcaaaatgggggctctacttactctgaacgcgatttgagtctccttgaaaatattaccaatatttttaattatgatgcattacaagcgcttgttaatgaacagttcagagcaaaggnnnnnnnnnncttgaaagtttaa

SEQ ID NO: 291297 - DNA, 402 bp, Morganella morganii; identical to SEQ ID NO: 287649

SEQ ID NO: 291298 - DNA, 366 bp, Morganella morganii; identical to SEQ ID NO: 278783

SEQ ID NO: 291299 - DNA, 180 bp, Morganella morganii
atggaagaatggactgaccgtgagggaaataaacggtcaacaccggtgattatcgtgaatcagttggatttcggcggcagtcaggcgggaagccataatctaccgcagcagcaacggacacagcaaccactgatgcagaatgatccgccgatggattttgacgacgacattccgttttga

SEQ ID NO: 291300 - DNA, 630 bp, Morganella morganii
atgaaattcaattcgttaccgtggctgtttgtggctttatttttagcagccggaacctattctactttcttttattggaacattgctgaagataataaatggggcacattttttagttttatatcagcattcagtattgttattgctattatttcttttcgaaacgacatccatttacggaaaaaagaagaaaacgaaaaaaaattaattttcgcaaactcggcaatggatgaatactcgagaattattgactcaatagaaaaaaactcaagcgcttatcatgggatgactgtaccaacagaaacaaacacaatcacatttaacaaattcgaaggtggctattatgttaatgataacggcaaaattcgctgcataaaaaaaatagcgacaacactagaaaatctaaagaaagatgcattagtatacgaccacgacatatatcattcaatatcagatattgagcgagatataattaacatcaatgacgaaatagatttatcttgcctgtctggaaacagatgcaacatagaaaaaataaagaatttaataaaggaaatgaagataaagcatgatgaaaaccatagagagttaaataaaaaaatagggaaaaaatatagaaaatatttatag

SEQ ID NO: 291301 - DNA, 348 bp, Morganella morganii
atggtgacaacaatgaacaaatatcgtgacaaatcagactttgagattaataaggctgtggctgaatataaacatggcactgacgctgttgtagagaagttcggtagaatatatatcagtgacagtgatgcgatggtgagcttcgacccctgcagcaatccatatgacgcaatgcctattattattgagaatggaatatgcatgaattatatcgataaagatattggttggtgcgcatatcattttgatgaagaaaaaggcgagctggaaatttacgataaaaattattatcgcgcagctatgatttgctttctaatcatgaaggacgaggagaatgaaaaagtatga

SEQ ID NO: 291302 - DNA, 1068 bp, Morganella morganii
atgtataaagacgaaattgaaaatatatctaatagacctgaggtactttacaatattcctttctataaagatttgcctcaccttcctgtaaaaattgacttggagggtatggctggtgattttttgagttatgatatagcggatttattcggattacagcctattgaggaagaacacttagatacatatggtgagataattactatcaatccatcaaaggaatctcttgaactttataaaaaaagaggtgattcctttcaaatggtgtttttagtaattaatgcctatggctttaaagagattgatggggtaatgcattgcaaaccttataatatatcacttttcccagcaagcaaaagaggtgagttgacttcacttaagtcagacttcattgagaaattggatcttgagatggatgctaacgtgccgaagtgttactatgggtttaacccattcaagggagcatttggattatattgttataatcatgtcaactactctggaattgagtcagatatgattggtttcgtaaaaagcatgtatctcttgtcagataaatataattatcataatgtcatacctccaataatcaaatccattgaaaataatgcgcaaataaaagctgattacaaaagatatagaaaggacaggtacttcaagaaatttaacaaaataaaaccaaggaaaatatggggttgtgattcaccgatcgaactttttttacttcaggcaatggataccctaggtttaacacctgaaattcagacgataattactaaagatggactcacgatccctagcttgcataaattatgggaaaattctcgctcacgtaaacgtttgaatgtcataacagatgcagatttctattttcctgaaaaaaagttggcagttttttgtgattctaaagaacatcattcatccaaggaatctactaataaagacaataacattgataaatccttagcagaaattggtatttttagtataaggatctttggtaaggatattgtgacggatcccatagcatgtgcgacgagagtcagggatcgtttgaacgagttataa

SEQ ID NO: 291303 - DNA, 909 bp, Morganella morganii
atgtataaagataaaataaataaaatagttcaagaaataaaaaatcaacaagctgtattcaataatctggttaaacacttcaatataggtataaaaataaattcatttgaaaaatataacatggagcagtggtgtcatacggcttttaaagattcattagttaaagtcggtatcatagcagaaagtaactttaattcgattgagtcttttagtttggtctctactgcccgttacatttgtgagttaaatataagacttacgctcattgttcaagattctcgatatggcttggtatactacggtcagttaataaatgatcaaattggttattggaaaagcctcaaagaacaactcgaacgagaaatcatatttctgcaacaccttgaactagacgaaagaaagatgttagctcaaagaatagctgaattaaaaacgattagtgatgaaaaaataaagttgggaaaagctaacattttagccaaggatgttttaaaaatttttgatgataaagcgtctcgtaaattttcaattcatgctgagcatgctaaaaaaaatggctttggttttcaagctcatttaattaaaaatcaacaattaaaaaaggtaacatcatgcttaaattcggttcaaaatgagaaaaaactttatgagtcctcagttcaaaatgaaataattaagctcactaaaggttggaattggaaagataaggcgagagaaactaatactcttgacgaatatgagtttatttatacgtttaccagtagaatgctccatgctactcctgcaaatatatccactaacttcaagcaactcagtgaccaagaaatgataatatttttgaaatatattaaggtgaaattcaatgatattagtaaattaagcattaagttcctaagtcaaagtaactaa

SEQ ID NO: 291304 - DNA, 165 bp, Morganella morganii
atgaacgcatacgcagcacaggatgctcaggaagagcggcaacggattgccgaacagcgcaggaagcgcgaacaggaagaaagggatgattactggtttcgtgaaagtgtcggattatcaaacggacgggtaccggcagaatttttaagcggagaattcacatga

SEQ ID NO: 291305 - DNA, 384 bp, Morganella morganii
atgaaaaagttatttttaggtccggcattcactttcttcagtttaagcgctattgctgggatgccaaataaaggcaaaatatgtgacaacgaaatggtttaccacgcactacaagaacaaataaaatatcacaccccatggtataaagctgaaggttgggataagggttacgcagccagtacgatccttccaataactacgctggtagatgactttgatgcgaaggtttcttactgtgaaggtgcggttattttcactaacgaccatttaccgagtcgtcgtcttcattttcaatataaagttaactgggaaacccatccacagtctggtggaattggcatgttctctttatcaccagtcggtaacccacaaaccgtgatctaa

SEQ ID NO: 291306 - DNA, 4683 bp, Morganella morganii
atggcaattaacaaaagtggaaatattgttttacagtgggattataacaatgacttgttccggaatgatgttataacaacaatatttgatgtttatatttctcgtatacgccaacttgccaacgatcctaatgcctggattgaaacccaacctgatttaattcctaaaaaacaattaaaaaatagaatatcagttatcaaaaaagataattcactattaccacatacactgcataagtctattttccataattattcaaattcatcaaaaattgctgtcattgatatcgactctcaggaatggagctacaaaaaattattatctaaagcaacaatactcagtgatcaaataatacaacaaggttataaaccagaagacagaattggtgtatgtatgccaaaaggagtagggcaaatcattagcgttctggctattttattaatggggggaacttatgttccgattgatgtactacaaccagaagaacgtataaaccgcattgctaaaaatgctcagctttcattactcatcgtatctgatagcgatccatcctattcaatctatgctacattttgtaacaggattgtttggcaaaaagttcaaccctccgagaataaaccactacacaatatagatatatctcctcatcaagcagcttatgttatttatacttcaggttctactggagagcctaaaggtgttgttgtatcccatgccagcgcaatgaatacctgccttgatctcaatcggcgatataacatttcagacaaagatcgggtacttgccatatcagcactacattttgatctgtctgtttatgatattttcggtgttttaaatgccggagggactcttgtattagttaaagaagatgagcgccgtaatcctgatgcatggttacgacttattaaccaacataaaataacactttggaacagcgtacctgcactgtttgatatgttactaacctatgcagaaggaatagggtcatccattccacaatcgctgctattaatctatctctctggagattggattgggcttgatctcccgacacgttactataatttctgccctgatggacaaatagtcgccatgggaggtgccacagaagccgctatttggtctaactattttaatgtcacaacattagacccatcctggagctcgataccttatggatatcctttatccaaccaacgttatcgtattgttaatgctagaggagaagattgccctgattgggtatcaggagaactttggattggtggtgcaggcgttgcgttaggctacctaaacgatcccgaaaaaacagcacaacagtttgtaaaacaaaatggtgaaaattggtataaaacaggtgatatgggaagatatctccctggcggtatacttgaatttttaggaagacgtgaccgccaagttaagattggcggataccgtatagaaccaggggaaattgatgccgcattcaataagcttcagggtgtgcaaaatgcgattacactatgccttggtaatggtaataaagaaaaagcattacactcttttgtgatactaaattcgggtaattaccagaatattatcagttcaaatagcgccttttctcccctctactatctgcgctcaaccccaataaatgtacaacaacaatcccaagaaacggcaatcatagctggatttttatatgattatcttactgaacaaaatattgatttcgacaacctcttgtcagaaaaaaaatcagcagatgaccatagcattatcgctagctatcagtcattaatggctaattggctaaatttaatagcacaatatccacaaactacactcaattcccccccaactaatagtacccagcgaacgctaatagaaaatttgcagcgccacaaaaacaatttaacagacatactcaaaggtaaaaaatcagctctaacactatttgatgatccctattggtcaccagaacaagtcactatgcgtattgatggaatgcactactccttagaaaatttactacaacaaataagagaacttcatcattcactaaaaaggccaataaaaatcattcaattaggtgctagaagcggtatttcagcaaattatattctgcaacgattacccaataatatggttaccctactgctaactgatgagtctctttcaatggtaacgcaagctaaccaaaatttatcagattatcaaaatagttatgctgagcctcttacagaagtatttcttcataaaaatcgatatagtgcagatatcatttggatgaacaattatcttcatcgattagacagcccacaaaaagagatacaaaaattcgtttcactctgtgctccgagtggaatgatttttatacaagaagtgttacatgcccctgcacaatcactgataagcatctctttattacaacaaaatggtagtgatcctgctgatgaattattaacagcaaaaaaatgcaaagatatctttagcgcttctactgcgacttataaaagtgaaggagttaacggcgaaatattgacacagttataccaagcaccagaaaaaatttatttaccagataaaaataagctagagcatgatttgcgccaatttttaccagactatatgatcccaaaacatatttattttctaactgagttccccttaaccgcaaatggcaaaatagataaccaatcattaaaattgtattgtcaggaataccaagaagaatacctaaatcaacaacctatcaatggtaaagaacagatcatcataacaatatggcaaaagctccttggcaccaacaagatacaccgtcacagtcatttctttcgtgaagggggagatagcctagttgctattcgattgatctctgatttaaaccatattggctaccaagttgaactggagcatatctttgcttatccgatcctttctgattttgcacaaaatataaagcagagcgaagttttcgaaaaacagccagcaatttcacataacgaggcgtatagatacaatccatttccactcactgatattcagcaagcttacttagttggacggcaaaataattttacacttgggggtgttggtacacatttttttgtccattttatagcggaaaatttagatgtacctaaattagaacgtacaattaatcagttgatttctcgtcatgatatgttacgtggtgtcattattaatggacaacaacaagtacttaaaaaagttccttattattccgttaaaacgcattatatccctacagaaaaaagtgacgcttttctagtattacgagctcaacttgctaacattgtttatgatccagaaaattggcctttatttgctattcaagttatcaagaccaaagaacaaccagatcatatttttattagccttgataacttattccttgatggaatgagtatgcagatatttttcagtgagctaaaaacactgtatatggagccaaatcaccaatttatccctctagatattacttttcgagattatattgattgtgatgcctatccgattaacacacaaaatgattgggaatattggttaacgcgtttaccacaattaccaccagccccacaattgccactaataaaagatccagcacagattgtgcaacctcgcttctcgcgtttacaaacatcattatctacttctgtttggcaagcactacaacaagttgctcaacaaaataatgttacgccagcagcacttttgattgctgcttattgcgccacattatccgcatggagtaaaagccctgagttaacaattaatttgacattatttaatcggcatcctgtacatcctcaaataaatgaagtacttggtgattttacctcattacaattactcgattggtatacctgtgatctttggtcaaacagtatctcaatgatgcaaaaacgtttacataaagatatgcaacatcgtagtgtttcagccattaaagtaatgcgtgaaatggcaattcaacgacagatgtctcatatagagatacctgtcgtttttacctgtgcattgggctataaacatgatgaaggttttctttctcatcattcatggctaaaacctgtttggggaatatcacaaacaccacaaacatggctagatcatcaagtatatgagtcagacggtgaattatatttaaactgggattttgtcgaacaattatttgactacacaaccattttttccatgttccagcaatatgaacatatactcactaaactggctactgaaccacaatcttggcaattgccactaaataaacttataccaagatgcaataatctcgtcatcaccccagttttcaatgccaaaaataatcaaaacacacattataaacaatctactgatacacaaaaaacaggtcagacaatacaaaaactacaacaacttgttaagcaagttattggaataacgttagcacctgaaacaaattttttcgaagcaggtgccagctctttacaattggttcaacttcatgcagcactacaaaaaaatggctatagccatattacaattactgatctgttcgctagtccaaatctaagtacattagcgcaattgctttggcaaaacacttcaccaacatgtgagcaatattccgaccgagacaaacacaaaaacaagagaaagaaacggttacaactacgaactcatagtagataa

SEQ ID NO: 291307 - DNA, 225 bp, Morganella morganii; identical to SEQ ID NO: 283217

SEQ ID NO: 291308 - DNA, 1440 bp, Morganella morganii
atgatgattcgttcggccttagacccggcgcagatcatgaacaaccaaaatggggccgtaatacattacgcgttgggggaggatgacggtaatcctaccccaccaacactacccgatagttataacgggcttggatttaagaatctgatctttatggttgttgaattactcgacatccacaaccaatggttagcaatagaagagaatcgaccaccggttcacctgatttttattgaagagccagaagctcatctccacgcacagttacagcaggcttttatacgcaagataatggaccttcttgccatggagagtcaggagcttatgcactacaccactcaagtggtgttgacttctcattcaactcatattctttacgaacgtggttttcggccgatccgttactttcggcggaagcgttcatcaaatatgtcggcaacagatgtgctcaatctctctgttttttatgataatactgatcctgaaattcgagactttcttgagcgttacttgaagctgacccattgtgatttgttttttgccgacggggctgtacttgtagaaggcaatgttgagcggctactgctcccgcaaatgattgctaccgccgcacctagattaaaatcctcttacctaacagtccttgagattggcggtgcttttggctatcgattccaaaaactaattgaatatcttgggcttactacactcattattactgatctggatagtgtgtactgtacccctccggtacaagatgcaacagaagctcgagcagatgagttagatggtcttgcagaaaatccggctgcaaatgatgatggcgaggaacctgatgatgatgaggaagaacaggccaacacagaaacaccaggaaaggcttgtattgccagtcatcctggagctatgacctctaatcaaacacttcggcagtggctaccgaaatgtgacaccgttgccgctttatgggaagcaactgaggaaatgaaaatacaaagccgcacagctgagtgtgacgctttggttcgtgttgcttaccagtgtcagacaaatgttacatggaaagaggagacactggcacttgctggccgtactttagaggaagcttttgcacttgaaaatctgtcctggtgtcaagatgtgggctgtaagccactcaagctacgtattgccagagctgtaagtatggatctactgcaactggcccagcgcattcacaagcgcgtgcaatcaaaaagctttagtaaaactgattttgctctgaatttacttcttaaaaaaccggatgaatggtctgtcccaacatacattgctgaaggattaaaatggctcgaagctgaaatagccccgccggaactagaagttgcagaaggtcaggaagaggatgttgaggatatgtccgtcgctttagctgaaacagatggtgggagggttgcatga

SEQ ID NO: 291309 - DNA, 615 bp, Morganella morganii
atgtctgaagtctataaggcaataagtgccgtagccaaggaactggctgagacaggcatcaaaaaagggagcaggaattcacaacaggggtttatgttcagggggatcgacgctgtatacaacgcccttgccccggcgctggttaagcatggcctgattatccttcctcgcattatggagcgttctgtcacggagcgacagacacaaaaaggcggcaccttattttatgtcgtggtgaaggctgagtttgatttcattgccacgaaagacggcagcaaacacacagtgaccacctttggcgaagctatggatagcggggacaaggcaaccaacaaagcaatgtctatcgcctataaatacgcagctttccaggcattttgtattcctaccgaagaaactgcgattgatgctgacacagaggttcacgatgttgttccacgtaatccagagcagattttgggtgactataccgaatttcttaatgtcacaagtgacacaaagacgattgaggctgaatacaggaaagtatggcgaatgctgaacggcagcgacaaacaggatgaatgtaagcgcctcaccggcatcaggatcaacgaacttaagcaggcggcataa

SEQ ID NO: 291310 - DNA, 396 bp, Morganella morganii
  misc_feature (248)..(257): n is a, c, g, or t
atggaaccattacaactgtttaaaattttaggtgaccaaaccagactggatatcgtgctattgctaaaagcatccggggagttatgtgtctgtgatatctatacggccttgaatttatcgcaaccaaagacatcccggcatctggcaatgctaagagaatcaggtcttttgctcgattcaaaacatggcaaatgggttcattatcgtttatctcctgcattccttcaccgtcagttagtttgtatccnnnnnnnnnncggagatgtgtataagagacagttactaccgtgggtgaaaagtatcattgatgtcacttacgccacagagaaaaatagagttgcagatttgcttaagagtctggagacaaaagaacctgtgagtcgctgttctgtataa

SEQ ID NO: 291311 - DNA, 222 bp, Morganella morganii; identical to SEQ ID NO: 277919

SEQ ID NO: 291312 - DNA, 246 bp, Morganella morganii
atgggtgatatcggcaaagtacaggatatcgctgtctgtccggtaagggcgctgaccggcggtcagccggtatccgccctgataaggctccgtatccagaaagaccagacgctcactgaaatctcgctgcagcgtgcgtgcagagacattaaactcacgggcgagctgtgccggatacagtgtttcgccacggaacaggcggctgataatcatggccagccggaatgcaagccggtcatggcgtga

SEQ ID NO: 291313 - DNA, 183 bp, Morganella morganii
atgacagaaatacagcacatcgcctttatcgccagtcgtgcccttgcagcatgcgcgtggtatgggtctgaatactttccgcgccgccttgccctgtatgcaaaaacacgtgagctgatagctggtgacagggcgcaggcaatatgccagcaggtgattgataaggagaatcagaaaccatga

SEQ ID NO: 291314 - DNA, 237 bp, Morganella morganii
atgacaaaaccactaacacaaaatcagaatcgggtttttgaattcatcaaatcatttatcgctgataaccaatacccgccgacacgggctgaaatagctgaacatatgggatatgcgtcaccaaatgcggccgaggagcacattaaggcattggtgcggaaaggtgttttacatgtggcgagagggattagccgtggcatccgggtgtgtgaatcaaaaagggagcaggacgcatga

SEQ ID NO: 291315 - DNA, 438 bp, Morganella morganii
atgcaaaaattccttctcaggaatgcgcagatactcagaaaccttaaggcagcactcgacactctcccgcttaacgaagaattccccctcgaagtaaaaatatccgacccgaagcgaaccattccacaaaacgacatgttccacgcgctgtgcggaaacgtggcagagcatggcattgtttgggctggcaatacgtggggacttaaagactggaaatgtatctttgtctccgggcacgcagaagcgaccggcagggacgggaaacttattcgtgggcttgagggggagattgttccgcttgcaagagaaagcaccgcagagatgggcaagaagcgcatgacaagcttaatagagtattcgcaggcgtgggctataggtgaaggcgtaaaaccgcgcacaacgcgatacagcttcaattactacggacatcagatatga

SEQ ID NO: 291316 - DNA, 276 bp, Morganella morganii
atgtttggcgggagcttatatcttccgcaaaaagaaaatatggatggtgggagtgctgatatgggaaagaaaacacagaagcttaagccgtgtcctttttgcggaggaaaaaacattaagtcattttggtttttcgcagacacggaaaatgaaaagcatgtaaggcagtcagcaatttactgtgatgattgtcctggtcaggtgatagtgattggattcaagcgtgatgcaatcgccgcctggaaccacagagcaccacaatgtgagaaggagtag

SEQ ID NO: 291317 - DNA, 186 bp, Morganella morganii
atgaaactatcagagaaacaaatagttgcattacaagaggtatacagcgggaaattcaggccaaaatcatcagcaagaacagtgaactcattagcgagtaaagggctgattaaatttgctgttggctttgggtgggttatgtcacctgctggtgttgaggtaattaagcagattcaggaggggtga

SEQ ID NO: 291318 - DNA, 240 bp, Morganella morganii
atggatataaccgaaaagcagcgccgtgaaataatgaaacaaggcgttcgatatgcacgtaatcatttaatcagtgcataccgtgccaatttcattaactgtgaccaaaagacatttgcagaattcatggcattattatctcagattgccaatgaatccattgataccgagttaatgatgggcgacgtgcttgcgtgtaatcagcaggcggaagactggattaaatctattctgagttaa

SEQ ID NO: 291319 - DNA, 351 bp, Morganella morganii
atgaacaaatatagtgacagaccagactatgaattaaatttagcggtagcgcgccaccttggtcacaagccatcactggagcacggggttgttaaaatcaaaaaagaacttcgtcatggtgtagttatttactctgataacttcgacccctgcaacaaccccgctgacgcaatgccgattgttaaagacaatctcatatcactcgaacatgatggaatagcatggcaggttagctgtgttcggcatcctgaaataagcgtttgggatgggtgcgaaaattacaacgataatttttatcgcaaggctatggaattatttttgctgatgaaggacgcggagaatgaaagctga

SEQ ID NO: 291320 - DNA, 729 bp, Morganella morganii
atgaacaaccgagatattgaaaaagagattcagatgaaaggtaaaaccgctccgcgagtcacaccggaacacattgaaagccttattgtcagtgaccactacttcacagcagctcagggttatgagaaatctgccgcagataactttaaggatgacccttatcctctggcaactcctcccgcattacacctgctaacgttctgtgtattagtcctcaggaacggttttactgccaccggtgaatcagcctgtgccagccctgagaattatgatgaaggaattggtatggaaatcgcccgccggaatgcgataaataaaatctggctgttggaaggttatctgctgaaacagcgactgcatgaggaaaaaacagaaaacgatactgacaaggcgctccatcttgaatgcgtcgctcgcattgcacatgaagttaatcgtgcgtactgccaatctatcggcgatgacagccagccttcgtgggaagatgctccatactggcagcgagatagtgcaatcaatggcgttgcattccacctgaaaaacgaggcgtcaccagaacaatcacacgccaattggctcgatcagaaagctaaggaaggatggaaatacggccctattaaggatgctgagaagaaagagcatccgtgcttctgcctgtatagcgagcttccagcagagcagcgagccaaagactatctatttcgtggggtagtaaactcatttaaataa

SEQ ID NO: 291321 - DNA, 621 bp, Morganella morganii
atgcaaaacgtacagaatgtagtggacaacacgacgaatttttttgataacttacctcaatacgcagcattaattacagcaagcatagctattatattgtttcttttgaaagagttttttgaaatgagaaggagaagtaaaaataaaaaaaacgaaatagaatcattgaatgcaattatgtatgaggagataaaattaaattctcgttacatgagggatgtattagcattttttgctgacattaaaaataaaaaggtattcaagttatcaaaagatattgttcttaatcagattctcatagaatatattgatgataacggaaacgaaaaattttttgttgcagtgaggcattcatcgagattaatagaaaactacctattagatgtatcaagggttaatcaaaagcttgcgatagacctagtttatttaaatgcatacattaaacattataatgacacgatattacttggtatcgatgagtttacaacagcaaagcctaacaccgatgctattttgaacatggtagaaagaaatgatgattttatggtggtgtatacagtgttatgtaattcagttttaattaaatgcaatgaaagagatgaagaaccatttcagatttga

SEQ ID NO: 291322 - DNA, 741 bp, Morganella morganii
atgaaagagcatggaataattttcaactccgagatggtacgcgccattctcgatggccggaaaatgcagacgcggcggattattaaagcagttccgactactcacgactttcacggctggataatgtccagtacatgtacgaaagatgagggtaaagcctgctgggctatcggtaattcaccgctccttaaagacccgattcgccttaattgccctctcggaaagattggcgatcggctttgggtgcgggaaacatactcattacttggcaatgaagatgcctgcccaattgattggagtgacgacatcgttaacgataaaacggaagccgcacgtatttaccgggctagctgtgaacaaaagccaggtaactacggcttgtggtcaattccggatgatgctgactggaagccccgcactgaaaatatggagtttgaaggttcatggaccccatcaatccacatgccccgctgggcttcacgcatactgctggaaataaccggcgttcgtgttgagcgatcgcaggatatcagagaagaagatgcggtagcggaaggtgttgttactggccgctatggtaatgaaggtaattgggtgaagggcttttatgcgccgggaggtaatcagccgcatcagaccgcaaaatctgcatatagcgagctatggtgttcaatttacggtgttgatgcctggtatgaaaatccgtgggtgtgggtagttgagtttaaaaatgtgagctaa

SEQ ID NO: 291323 - DNA, 1212 bp, Morganella morganii
atgagtgagctgagttatctggaaaagctgttggatggggctgaggtggaatggttgccacttgcagatttaggggaacttattcgtggaaatggattaccaaaaactgatttcactgaatcaggtattccggctattcactatggccagatttatactttttatggtctttcaacagaaacaacgaagtcttttgtgtctaaagaaacggccaataaattaagaaaagtaaatactggtgatgtagtgataactaataccagtgaaaaccttgccgatgttggtaaagctttggtctatctgggcaaggaacaggcggttactggtggtcatgctacaatatttaaacccaggagttctattattggaaaatactttgcttatttcactcaaacagatttttttgcaaatgagaaaaggaagtacgctaaaggaactaaagtaattgatgtgtctacgtctgatatggcgaaaattactattcccatcccttgccccggaaacccagagaaatctcttgcgattcaatctgaaattgtccggattttggatgcatttaccgcccttaccgctgagcttaccgctgagcttaccgcacgcaaaaaacaatacaactactatcgtgaccagttgctgagttttgatgatggtgcggtggaatggaagacactgggtgagcttgcagaaaatctggactcaaaacgtaaacctataaccagtgggttgagagaaactggcaaaatcccatactacggcgcgtctggtattgtcgattatgtcagggattacatatttgacggtgattacttattagtttctgaggatggcgcaaatttaatagcccgtaatacgcctatagcatttagtattagtggtaaagcatgggtaaataatcatgctcacgtgcttaaatttgaaacttacgcggagagaaagtacgttgaatactatctgaatagtatcgatttaacttcttacatttctggtgcagcccaacctaagttgaataaaaagaatttagaaaatatcaaaattccaaatccagccccaaaagaaaaagaacgcattgtagctgtattagataaattcgatgcgctgaccaattccatcactgaaggcttgccccgtgaaatcgggttacgccaaaagcagtacgaatattaccgtgatttactgttcagctttccgaaaccggaatctgtgaacaactga

SEQ ID NO: 291324 - DNA, 246 bp, Morganella morganii
atgggtgatatcggcaaagtacaggatatcgctgtctgtccggtacgggcgctgaccggcggccagccggtatccgccctgatacggctccgtgtccagaaagaccaggcgctcactgaaatcccgctgcagtgtgcgggccgagacattaaactcacgggcgagctgcgccggatgcagtgtttcgccccggaacaggcggctgataatcatggccagccggaatgcaagccggtcatggcgtga

SEQ ID NO: 291325 - DNA, 285 bp, Morganella morganii
atgggggaggccggaccggaagcgattatgccgttaacacgggcggcggatggctctctcggtgtccgggcgatcggcagaaatcataataccggttctgcagcaccacaggtgtttattaccattgacagtaacggcagcagccagacgcagtcgtcagctggttatgaacagtttggccgggagattgggcagtatgtagaccagcgttaccgggcgctgattaatacagatctgcggcccggtggtgccatctggtcggttgcgaaaggggcccgtcaatga

SEQ ID NO: 291326 - DNA, 213 bp, Morganella morganii
atgtctgtttttaaattaatggctaccacgctgggtgtggctacggtggcgttagcgacttactgcgcctggcaggccgcggctgaggcggcagacaacgaggatgcctccgcagcggaaaagctggcagcggggctcagtgccgcactggcctgctcagccgtgctgggcggtacccttgaccgtctgctgggccggctcttcccacgctga

SEQ ID NO: 291327 - DNA, 525 bp, Morganella morganii
atgaaatgggtaaccactgtattacgcaacggctgggtgtgggctgtcatgtttttcggtctgtggatgctcagcatgctgtcagccgagcaaacggaaggccaacataaagacaaggttatcactgaccagcaaaaggtgattgataacgcttacaccagcatcgatatctttgaccgagtggccgcggcgaacgccaaccgcagcatgcgcatcgaggccaaatcacaggagaatcagattgaataccgtaccatcatccggaaagaacctacttgtaatctgtatattcctcagtttgtttctgatgggctgttcagccacgcctacgccatccgtgaatcagcgatgcgttctgctcccagcatcactgactcagccggttctggcaccgttgccacccgtagactgacatattgccaggcggttgaatggatagagccgatcctggtggcgctggataaggcgaacggtcaattgatggacatccggaaggttgatttagagagaagcgaaggtttgtaa

SEQ ID NO: 291328 - DNA, 432 bp, Morganella morganii
atgtcagagctttctatggaaaaagaggatactatgaaagatgaattaggtgattggcctgatttttatccttccaacattcctccgaaaactgcattagatgcagagggtgagttcttccggcttgttgaatgtaatccgccggagctatcttgttttgcttcaacctttgaagaaacaccggaaagattgctatctcttaaaactaaagagcaaaaggaatgcgtgtatggtacttcttttttcagtaatttagagggagccctgaataatcaagaaaaattccctcaagctttgggtcataaaaagattgctaagggaatattgatagctaaaatgggaaaaatgaagcaaacatttagaaacccagctcattttactatctggttacgagtaagttcgaatattcatagatatttcgaatgtttataa

SEQ ID NO: 291329 - DNA, 1284 bp, Morganella morganii
atgaaaaatatatttatttcccataagttatttggaaacttagtctttcgtaatgtttatgaattttatgatgagccacgtttgttttctgtgactaatgaagtatcatccatgtatttggtgtattggactggggatacgaaagaatattcaagttggttcattataccgatatcaccaaataaactagagcaatttgaaagaaagaaatttgatatatactcagttttaactgaacaagaacaatcttttttttatacagctaatctatattattgtgataatcatgtggatatagaaacaaaagaaaataaagatatttatgatatagagcttcctagaaaaagcctttttattagctctgttgttccaatgctggaaaatggttgcctgggggagccggtagaatattcaacgcatgaaattcatgtagagaaaagttcgaaaaaaagtattttaggtctaaatcatgtatctaatatttttgatgcctttaattatttttatcaaaacatggttaaatttcatgatgtaaaagataaaattaggccagtgtcagcaagacctggatcttttatattagcttttcaagcggaaaaattgtctgaatttgaatctactttaaatagtttttataatttaattttaaacaggaaggacataaaaaaattcatgatggataatggattggattttcagtctttcttttatttgttaagtagtgttatagaaactggaactaatttagaactaaaaaatacaaatacgaatgatgtaatatttgatctaacaaaatctgctgctgaattttatttgaatgatataaggcgaagtgccaatatctctgtaggcggagagcaagttcctcaggctgatacgcttgaaactatatttaaagttgttgaggtgaaatggttagaaacaagtttaaatactattaatactgggttaagtcagagacatatatattattatcttcatgcatcaaaaatattaggttttactgataattatcgaaatgttactgtttctggtcagcaattaattgaagctgatgatataacaaaattaaagatagctgcaaaaagctttgagcgaagtcattgtggatgggcttggatacaatggtctgaagttagtaatttatcagagctagacccatcttcagcagaagattttttgaaacaacagtgttttaccctcagtagggaaacattaaagagaagagccaggacattaaagcattggtgcgaaaggttaaaagaatattatatttcctattaa

SEQ ID NO: 291330 - DNA, 909 bp, Morganella morganii
atgaaaaaaattggtgatgtcaccagtaccgccgataaaaacggcgagtggacaaacggcaacgtggctgccggtatagcaccgacaattcttgaggctggctggcttaattccgtccagcgggaaattcttggtgtgctggttgaagcgggtattacgcaggataaaaataatgataaccagctgaaggacgcgatcagaaaaataatctccggtggtgactatgccacaaaaacagaagtaaacagcaaactcgccaaagacaagaacggcgcagacatcccgaataaagatacctttatcaaaaaccttggtttaccggaattactggataagaagttcgataagaccggcgggaagattacaggacagacggatattgagtcgccgggcggtcgcacccagacactgaaagcaaaagctggtacatcggtataccaggaattgtaccttcaagataccttcgccgcatggtgggggattaccgctggtaacaagttaagcctggaaaacaggattacaggcaatacgcttactatcggtactgatggtttcaaaattgacggtaaaaatattgcgactacagatcagctttttggtgtcggacaaacctacaaaaatctgacgtccagtcgtcaaaataaagtctggtataccaacaccgacagtaagccccgcattatccatgtcgaatcaaacagaaccggcacacaataccctttcagtattgatattcagattattgatacgggtggacagaatcgcggggattaccgctggacagcggcggatgaggtggtttctctgacggctatagttccgcccggagcaagatatagcgtcaatggaggatggggacagccgacagaatgggctgttattaacttctggttggagtactcgctatga

SEQ ID NO: 291331 - DNA, 333 bp, Morganella morganii
atgattaaacgttatattcctgacgccggggatatcgtctggcttgatttcgatccgcaagcgggacatgaacaagccggacaccgccccgccgtggtattaagcccagctgtttacaatggccggataggattaatgttatgttgtccgatgacaacaaaaatcaaaggctatccttttgaggttgtaatcagcagaaaccctgatagcgcggtgctttcagatcaaataaaaagcctggactgggaaaaacggaacgccacaaaaaaaggaaaagtttctgaggatattttagctgatgtgagggcaaaagccaaagcgttggtaggttaa

SEQ ID NO: 291332 - DNA, 246 bp, Morganella morganii
atgtctcatgtaattatcaaaaaatggggaaacagttcatcggtaagactgccttcctctattatgaaagcggcatctttgaatgttgatgatactgtcagtatttcggtggaggacggtaaaattatcatcatccctgttaaagtaaaagaatatagtctggatgcgttgttagctgatataactacgacaaatattcatgatgaagtcgattttggcacccccgccggaaaggaaatattataa

SEQ ID NO: 291333 - DNA, 198 bp, Morganella morganii
atgccagaacaggtcagtatgacccctttagctgcccgcatattaacacagttaccacacaagcactgggtttcgctgaaagatattgctactatgaccgggctgtctgaatcccgctgtcagtttctgctgacgcagttctgtctggcggggttaatgaatgaacgtgctgacagtacgtcgtttcagcgacgctga

SEQ ID NO: 291334 - DNA, 1044 bp, Morganella morganii
atggaaaaccctgttaatttatccagtattcgactggtcaatgatgatgccctgtctgttctggcaagcctgccggataactgtattgatttgattgtcaccgacccgccgtactttcaggtgaaaacctgtgcctgggataaccagtggccggatgttgaagcctatctgacctgggtggatacggtacttgccgggtgttaccgggtgttaaaacccgccggcagtctgtatctgttctgcagttcgcggctggcggccgacacggaacttctgatgcgtgaacactttcaggtgttaaatcatatcgtctgggcgaaaccgtccggtccgtggcggcgggcgcacaaagaaagcctgcgcgcttatttccctgccaccgaacgtattttgtttgccggtcactacccgggaccgtatcacccgaaaaccgccgggggccatacggtctgccggagactgagacaacagtgctttaaaccactggcggattattttcagcaggcacggaaggcattaggcgtgccttctcaggctattgtgcaggtcaccggtaaaaagatgacatctcactggtttggtaccgcacaatggcagttaccccgtgaggcggattaccgtaagctgcaggggttatttgaccgcctggcggcggaacagggaacggtatccccgctgacccggccctatgaggcgcttgtccgtgaccatcagcggctgcggcaggattttatccggcagcgggattgtaccggactgcgacggtattttcacctgacagcggcagtgccctgtaccgatgtgtggacctttgcaccggtgcagcattacccgggtaaacacccgtgcgaaaaaccggcggatttactggcacatattatccgcagcagcagccgtgaaggggatgtcgtggcggatttttttatggggtcgggagcgacgctgaaagccgcattaaaactgggacgacgcggtctgggggttgagtctgaccgtgagcggtttatgcaaacccggactgagttaaaaatgtccccgccgtga

SEQ ID NO: 291335 - DNA, 243 bp, Morganella morganii
atggcctttacctgcccgttatgccaccacaccgcccgtgtccgcaccagtgtgaaaatgagtgaccgcacccggcgccgttactgccagtgtcagaacctgttgtgcggctgtacctttgtgaccctggacactgtggaatatatcctgaccaaacctgccctccagccgctgccgccgggactcaccttaaaaagtaaaactgtgccgaaacagggaaaacagcaggcatttgagttttaa

SEQ ID NO: 291336 - DNA, 1131 bp, Morganella morganii
atgatgaaacaggccctcacttccttaacgcatgcctttacggaccaccctgtccggcagccggccgttgatattctgctcggcggcaaacacctgcaaagcctgaatgaccggctggtgaacctcaccctggacgataaccgcggctttgaggcggacaccttaaccctggtgctggatgatgcagacggtgccctgcatctgccgccgcgtgaggcacagctctcgctgtcgctcggctggcagggggaacccttagtccacaaggggttgtttaccgtggatgagatgcagcatgagggcccgcctgatcagctgacgctgacggcgcgcagtgcggacttccgggcggaatttaatgtgcagcgcgaacacagctggcgcgacctgacggtgggagaactgctgagctgcctggccgggcgttatcagctgatcccggcggtcagtgaaccgctgataaacattgagattgaccacgccgaccagacccatgaaagcgatatcagttttttaacccggctggcagacgagctcggcgcggtggccacagtgaagaacggggcactgctgctgatcatccccaaccgcggggtcagtgcgtccggtcatccgctgccggaaatcctcatcacccggcgcagcggcgacagtcaccagttcagcctcgctgaccgcgacgcctacaccggggtgaaagcgttctggctggatctgaaccacggtaaacagcagaccacgcaggcgaaacgcaaacgcaaacccgccaaagccagaacaccgcgctcctcacaaaaagaaggcagtctgctggagggggcagacggtaacgtgtttgtgatgagacagacctacaagagcgaacaggcggcgaaacgcgccgccatcagcaaatggcggcagctgcagcgcggcgcggcacactttacgctcaccctggcggaaggacgccccgatctttacccggagatgccggtcaccgtacagggctttaagccggttatcgacagtgaacgctggatcatcgcgcaggtgacccacaccctcgatgagaacgggctgaccagcacccttgaactggaaaaacgtctgcagccggacacacaaccggcggtttctgaggtatcatag

SEQ ID NO: 291337 - DNA, 1173 bp, Morganella morganii
atggcacaacatcacgggatcagcgtccgggaaaccactgacctgggcaccctgatccggtccgcagataccgcggtgatcggggcggtctgcaccgctgacgatgcggacgcggaggtttttcccctgaaccgcccggtattactgacccgcgtgcagcgcgtgctggggaaagccgggcggcgcggcaccctttacaccacccttaaagccatcagcgaccagagcagtccgcgggtggtgatggtgcgggtgcccgaagcgaaagcgggtgagaaagagaaaacccaggagcagctggtgatcggtgccacggataaatccgggcagcgcaccggtatgcaggcatggcgggtggctgaaagcaccgccggggccggcgtgaagccctcggcactgattgccccgctgctggatacgccggcagcggccgcagaaatgattgtgattgccggagccctgggggcgtttgcctatctcggtgccggtcactgtcagagtccggcagaggtcgtccgttaccgtcagaccttcagtcagcgggaggcgatgatactctggccggaatttaccgccctgaacgcggtcaccggggaacaggccgtgctgccggcgaccgcggtggctgccggactgcgggcgcgtattgacgcagagcagggctggcacaaatcgctgtccaacgtgccggtcagcggggtactggggctgtcccgtccggtggactggtctttggagggcacggatactgacgccgccctgctgaaccgcaatcaggtgaccaccctgattcattatcaggggttccgcttctggggcaaccgcacctgtgacagcggaccgtatgtgtttgaggtgtatacccgcaccgcgcaaatcctcagagcgatgattgccgcggcgcactttgcgtatatcgatcagccgctgaccccgggactggccggggatatcattgacggcattcaggcgaaaggggacgaactgaccacacagggtaagctgctgggctttgactgctggtacgacccggaggagaacccggtgagtcagctgcgcgacggggagatgtggattaagtacgcgtacaccccggtgccgccgctggagcatctggggataacgcaggtgttcactgataagtattttgcgcgctttgaggcgctggcataa

SEQ ID NO: 291338 - DNA, 513 bp, Morganella morganii
atgggattaccgttaaaactgtttggctttaatattgcggtggacggccgcagcctgctgggtgtcgcgcaggaactgacgctgccgaaactgaccctgaaaaccgaagagtatcagggctcggggatgatcggcccggtgtcggtgatgcacggatttaccggggactcactggacattgaggtgacgctgggcgggttggatgcggtgctgctgaaagactggggcgcggatctgagtgagaaacagttccgcttctccgggtcgtatgacgatgatgtcagcggggagccggtcggctgtgaaatccgcacccgcggacgttttaccagtctggatatgggtaccgccaaatccggtaacgacaccacgcataagtacaccctgaaaaacacctattaccgtctgcaggtggccggggataagattgttgaactcgattttgtgaacatgaagtgggtgaccggcggcacggaccgctgggcaaaacaccgcggcaatatggggctgtga

SEQ ID NO: 291339 - DNA, 306 bp, Morganella morganii
atgagcgttaaaatacccctcagtgccccattcgtgcgcgacgacggcaaacagaaaatcacagaactgacgttaaccgatgccctgggacaggccggctgcctgcgcgggctgcgggtctacgacgtggcggtgggggatgcggatgcgctgtttgccctgctgccgcgggtgaccgaaccgaagctgaccactgccgaggtgatgcgtctgccgacggccgattttgcggtggtggccaacgaggtggccctttttttaaccccggcttcccgcagcggcgctgcccttacagcggacaactga

SEQ ID NO: 291340 - DNA, 3096 bp, Morganella morganii
atgagtgaacgcacgctggcggtgaaggttaacctgaccgccttcaacagactcaccgcgccctttgaggccgcacaacgcagtaccgccgcactgtccggcggactgcgcaccacacagcaccatcttaaggacctgacgcagcaggcgcgggcctttgacaccctcaccgcaaagacggataaacagactgcctcttatgagcaggcgaaacagcgggttaaatcactgaccgccgcgtatccggccctgcgtcaccagaccggcacacagaaaaaagccctggctgatgcccgtaaagcgcggcagaatgccgggcgggaactggaccggcagaagaaaaaactgaatgcggtcaggggcgcgctctaccggcacggtatttccgcccgcagaggggcggatgtcaccgggcagctgatccggcgcacggaggcgtataaccgcaccctgagtacacagaagcagcgcctggaggcggtgacccgcgcacaacggcgttacagtgacgcaaaaaaaacgcgtgaccggctgatgtccggcggggcgaaagcgacggccgccggggccgggctgttgtacgggaccggaaaactcatcgctcccgggcgcggtttcggggcacagatgtcgaaggtgcaggcgctgctggatttaaacaaagaggacgcagccctcgcgggattgcgggcgcaggcgcggcagatgggtgcatccacccggtacaccgccaccgacgccgcgaccgcccagtcggtgctggccgccgccggcctgaccccggaggccatccgggcgtccctgaaagcggtgctggatctcgcggatgcgggcggtatcgggctggaagagagtgccgggctgggcgccacggtggcgaaccagtttgaactgccggcctcacagatgggccgcatcagtgatacgctggtaaaaaccgccaaaagtgccgacaccaacctgaccattctggcggagagcttcaggaaagccggctcagccgcgcacatggcgggtctcagtgtggaagagaccggggtgctgtttgacagtatggccgatgcggggatcaaaggggccccggccgggacggcggtgtcacagatgttaaacagcctcatcaccccggcggaaaaggggcagaaagcgctggatcagctggggatttcggtgcgtgaccagaccggcagaatgaaagatttccgcgtcattgccggtgaactgggtcaggcgatgcaggggtttgaccgggccggtcagatgcagatcctgacggaactgttcggcggctccgccatcgtcaaatcaggcagcctggcggtgatcaaagccctgcacagcggtaagtttgaccgcctgctggctgataacctgaaggcggccggcgtggcggcgaaagatgcggcggtgatggcggataacctggacggggatctgctgaccctgcgctcagcgtgggaagacctggggattgagctcagtgataatgtcgattcccccctgcgccgggtgacacagaccctgaccggtgtggtcagcggggtgaaaaactggatgaaagcccatccgcagctgacgcaggccctgatgctgagcgggctggctgcgggtgccctggcggccgggttcggcacgctggtcatggccgccgcatcggtactggtgccgtttgcggcgctgcggttgtccgcgtcactgctgggtatcagggggttcggtgcgctgctgcggccactggggcggttattaccggggctgtcgcggcttgccgggggactgaaaaccccgctggcgccgctgaaacagtggggaccgctgctgagccgggtgaaaaaatccgccgccggtctgatgaaacccctgagcggggccggaagccgtctggggcggactgcccgcaccgccgggcggagactggggttcgcttttctgcatccgctgaaatccctgggccgtctgggcaaaggcattacagcgctggggagccggggattcggcggcctgctccgcgccggcggtacggtgttccgggtgttgctgatgggattagcggcgctgtttaccccggccggactgctgattgccgccctggtgaccggagcggtgctgatttataaatactgggagccggttaaagccttctttacggggttctttcaggggctgacggaagctctttccccgctggctgaggcgtttaaacaggcgttcgcctggctggcaccggtgtttgaggggatctggaaaggcattaaaaaagtgtgggagtggctgacatccctgttcaccccggttcagcagtcagaggaagcgctgagaaactgcaccgaagccggtaaaaccttcgggcgcgtggtgggtgaggccatctccgccctgctgaccccggtcaggctggttggtgagggtatcggctggatcctggaaaaactgaacctggtcccggcagcggcaaagcaggcggtggcggaaattgacgggctggagcaggcgaaaacccggacagcggccctggctgatcccgcttccccgcagggggtcggagccctgatcgggaacctgacccgcaatgccctgacactcgcggccgcgggcggcaaaagcgggacggacacaacaccgggccccggcagtgcggaaaccggtaccggggacaacaatacggataacagcggcggcagcggggggaaatggggttacggcaataaaccgtttgcgctgaatgacggcaaagacagcgccatgggcgcagcggctgccgcgcagcctgacccggataaaccgggggcgattgtgtttaaacaccggccgccggtggtgccggtccgcggacgttatcaggagccgagggtgatgcagacgccgccggtaccggcactgccgcgggcggagaaaatggcactgccgtcagccgcgtctgtggcggcaccgtctgcccacacggaaacgaccgtgtttaacctgcattttcacggggtgaatatggaccgggctaaagacctggcacgcctggtgaaacgggaaatcgaaaaactgcagacggaagcggcccgtaaacgccgctcctgtttcagcgaaagaggaatgtcgcagtga

SEQ ID NO: 291341 - DNA, 507 bp, Morganella morganii
gtgatacagaattccgttatgatgatattcggcggctttgtgtttatgcgtcagaccgtgccgtatctggaaagcagtcaggaggcgcagtggcgttatgcccgtaatgagcgactcgggcgttctgcccgggtgcagtatctggggccgggggaggatacactgaccttaagcggggtgttgctgccggaaatcaccggcggggacatgtccctgtcattactgcgtactctggcttaccgcgggcgggcgtggccgctgatagagggcaccgggcggatttacgggcgttatgtgctggaaagcctcacggaaacccgcagcgaattcttcggtgacggtaaagcgcggcggattgagtttaccctggcgctgagccgggccagtgaagacatccgggaatcgctggctgactcaccggatgatgattggcgggcatttgctgactgggcaggacagcaggcggatgtgctgacagagactgtgcagacattcttcacatcatga

SEQ ID NO: 291342 - DNA, 261 bp, Morganella morganii
atgaaaaaactattacctcttacgctgctgattttatccggtaccgcttttgcagaaagtcatcaatccatcgaaagctgcgcaaaattgttaccaaacgacggtaaacaatacgaattttctctgatcggtattattaccggcgatcaaaaattcaaaggggaactggggataagtgataagacaaaaaaaccgctgaccgatgaggaaaaaaagaaaacagagccttttgttgaatgtgttaaaaaactcattaaataa

SEQ ID NO: 291343 - DNA, 447 bp, Morganella morganii
atgaagaagaaaaatatgatttggagtggaattattgctgctattatgttgatcatcattgcttttctggtgctcaattttctttcggaagagaaaacggttacagcaatggattcattattaccaccacaggaaaaaccaatcaaacctgaaaaaccaatgatcccggaaaacatcaacaccccgggtatcaacgatgcccgcacatctgcgcaaggcaatgataaaaccacagagtttataggggatccgggcagtccggactgtgtgatgcttaatgataaactcatccaactgatgaaatcatcacaaccagaagttgttaatcaacagctgtccctgatgaaagatcgtgtaaaaaatgcgccgccggccctaatgggtaaggtgtgccaggaaaatgcacatgaggttgatatattgttacaaaaagcagaacaacagtga

SEQ ID NO: 291344 - DNA, 777 bp, Morganella morganii
gtgccggtgacctgcaccattaacggcaaatcacttaagcaaaacttaaccttaacggccggtgacattggtgcgtattccagaacggaaacagatgaaatttttctgccggtaaacagtcgtcaggcggtcactcacggtaatctggtgattgataatggcacggaatggccggggttacgttataaagccgctaatggctatactgtcggcattgaaggctccggtggtaaaggtctgactgtctgggcggatgatccgcagggtaaacgccgttataacctcagcaccccgcagaaatccggcacactggcgacactggaggatatcggtcagaaaagcaatattcctgtgggctctcccgttccgtggccgcaggacactccccctgccggttatctggcctgcagcggacagacctttgataaatccgtttaccctgaactgggtgcggcttatccgtccggtcgcctgccggatttacgcagtgaatttatccgcggattgtattccgggcgttctgcactgagtcttcagcgctgcgctgtcgaaaggcataaacatatcggtggactgggtgagaacggcggtgaccactttggtaaaaccagcacatacgggcattttggcctcgggaaggcagactgggataacccgctgctgtacactaacgacggggacgtatggaacggcaataatccgaacccggatggcgttatcagtaatgaaacccgtccccgtaacatcgcatttctgtacattgtgagggctgcataa

SEQ ID NO: 291345 - DNA, 624 bp, Morganella morganii
atgagcaaatatgatttggagcttcagcagggaaaaatcggggctgacggattaggcgaacaggccggatggataaaaacctatctggcccatccggtgacccgtgagtatctgaaagcgtatatggaatatgtgatgcagggtgtctcattgtcagccggtgcttatccggatgcaccggaactgccggcagagcccggcaaagccatccgccgcagtgcagacggatcacactgggaaattgtgcctgatcaccgggggagaacggccaggcagactgcaaccggggaaccggtgttaatcaccgtaatgggtgaatgcccgccacacctgacttttctgaaacctgccaccgcctttgatgtctggcgggaggataaatgggttaccgacgaaacagcacagcgcgaacaggcgatcctggaagcagagcagtaccgggacacactgattgaagaggcactgcagcagacacaattatggcagtcacaactgttactgaacatgatcagtgatgaagataaacaggcgctggcagaatggctgaactacattcaggctctgagagaaacagacatcacttcagctcccgatatcgactggcctcacaaatccacacaataa

SEQ ID NO: 291346 - DNA, 159 bp, Morganella morganii
atgagctctgtactcgacatcacggagtctcttcctgaaaaatataaaaatagtcctctttctataattataattacgccagttgatacagttcttctggcgttttttattatcaatccggatccggttcacaaatccacatttttcttatggcaataa

SEQ ID NO: 291347 - DNA, 189 bp, Morganella morganii
atgagaaaaatattaaccagtcaaaaattcaaaacagacgaggaatgtcctaaaactggcttgtacggacagtttcatgataataagaatcgttatgccggtaaaaaatatgaccgtcaggttacgaaaggcgataaatttccacaaaataaaggtaatcatcattttaaagaaataaatattatttag

SEQ ID NO: 291348 - DNA, 180 bp, Morganella morganii
atggataattatcagcggttttattcaggtcagatatgccctaagaccgcattgtatgggcaattttacggaaaagaccaatatgcgggcagagagtatgaacgccgggtaagaaatggtaataagtttcctaaaaccaagaccggttattattttaaaaaactcttaaactttacctaa

SEQ ID NO: 291349 - DNA, 216 bp, Morganella morganii
atgccggaaatttctttacatcccaggcagaaccaacaaaagcgggtatgtacctatgtgttaatggggcggggtataacccctgaaggaatggctatgaatattagtgtccatgtacaggcttctgagccgcagagtgcaattattgaggcagcaaaatattataagggaaaaggttatcgccatattaagtttgatgtatataaacctgaatga

SEQ ID NO: 291350 - DNA, 168 bp, Morganella morganii
atgaataatcagaaattttattccggtcagaaatgcaagaagaccgcgttatatggtcagtttgatcacaatgatgagtatgccggtaaagattatgattgccaggttaaaaaaggtaacaaatttccgcaagcgcaggaaggatgctgttttagacgcttaaattaa

SEQ ID NO: 291351 - DNA, 216 bp, Morganella morganii
atggtaagtcattatcaaaaacaacaaaaagaaccacatatataccacctgatggggcactgtgtggactcaaaaggcaataaggtggagtttcaggcaaacgtacaggcatgtggctcaagggaagccgtttcaaaagcgaagaaacattgtaaattaagcggccgccattatattgaatttcacagtgtacatgataaaggggttgtttgttaa

SEQ ID NO: 291352 - DNA, 309 bp, Morganella morganii
atgaggttattgctaaatatattagccaatcaattttctgtggctgtttatgaagatattatgtcatattacggtattaatttaaaagtgtctccggtcagtacccacagccgggttaaaattatccgtcggttagtggatgattatttactgaaaaccatgaagaggctctgcacaaactggcaggatcttgcctttgatgtactgaaacaatgcgttaataaagaaggcaatttgagtcgttatggcaaaaaaatctggcgaatgatgttaaaagatataggggaaaaatcttatcattggcattga

SEQ ID NO: 291353 - DNA, 423 bp, Morganella morganii
atgtattactacagtgcagcaacaaatgcgttttatcctgacgccttaaaaccggattatctccgtgccggaacctggccagatgatgccactgaagttgatgataaggtctatcagacatttgcggccagtgccgttcccgaagggaaaatacgcattgccggtaaagacggattacccgcctggggggatatcccgccgccaacagcggcagaacggagagcacagacacagtaccgaaaacagctgttactcacagaagctgctcaggccatggcacccttacaggatgcagtcgatttaggaatagtaacacaggaagaaattcaggcactcaatgtctggaaagaataccgggtgcagcttggcaggattgatatttccgcaggagcagatatcaactggccggagaagccaatataa

SEQ ID NO: 291354 - DNA, 1479 bp, Morganella morganii
atgacaaccccgctgcgttattttgccctgctgacacacacgggcgcacagaaactggcgcaggccgccgccctcggcaaaccactcagtatcaccgacatggctgtgggggacggtaacgggcagttacccgctcctgacccggcacagacggcactggtgaacgagcgccgccgcggagccatcaataccctgaccacggacaaacgtaatcctgaccagctgattgccgaacaggtgataccggaaaccgagggcggcttctggatccgtgaaatcgggctgtatgacaaagacggcaccctgattgccgcgggtaactgcccggagacctacaagcctcagctgcaggaaggcagcggccgcacccagataatccgcatggtgctggtcgtcagtcacaccggagcggtcaccctgaaaatcgacccgtccacggtgctggccaccgtggagtatgtcggtgaccggattgaaacgctggacaacacgttacagcagcaactgaaagactacataaaacacacggataaatccgatgcggttacctcggacagcagtgacaccgtggccacctcaaaggcggtaaaaaaagtccgtgatattgccctgcgaaaatacaccgcacaggatgcgaccaccacacaaaaaggactgacacagctctgcagtgacaccaacagtgacgatgaaacacaggcagcaaccccgaaagcggtcagtacggccatgcgggaagcccggagccggcaacccaaaggggattatgcgcttaaaggagacagccacagtaaacaggaggcactgaacctgttcctgcaaaaaagcaaaaacggcggtgacattccggataagaatgcctttgtcaaaaaccttggtttatcggaaacggtaaaacaggcgcaaaatgccgtgccggtgacctgcaccattaacggcaaatcacttaagcagaacttaaccttaacggccggtgacatcggggccgccacaccggcacaggtcgctgatgcaaagaaagcaggaacaaatgcgcaccacgcagcaagcactgccaataataatgccaatggccgtgtgccaaattcacgcaaggtcaacagtaaaccgctaacttcagatatcaccctgagtgcaggtgatgtggggacttacaccagagcggagattgacaaaaaaatcatcagtgcaggcggtaaaaacaccgccggtaaaggcgtcaacggttggtggaaatgcggggataccgggctgattattcagtgggggatcatccccagacaaagtgatggtacccgaaattacccactcagtattccttttccaaccaaaggattatgggctattggctatgtttatgaagcccttccttatgataatgattcaaactcaagttctgccagattggttgataataaaacaatcagaataacactcgataattatctgcccacgacctggatagccataggatattga

SEQ ID NO: 291355 - DNA, 615 bp, Morganella morganii
atgacggataatacattattaccgccgggggcctccccgctggaaattgccgccgccaccgcctgtgcggaaattaaccggctgccggtgtccgtgattaagacgctgctgaacccggacacctgcccggaaagattactgccgtatctggcgtgggcgttctcggcagaccactgggacgcccgctggtctgtgcagaccagacgccgggtgattaaggccgcgtactttgtgcataaacacaagggcactattggcgccctgcgccgcgtggtggagccgctgggatatctgatccgcatcaccgaatggtggcagcacgacggggagccgggcaccttccgtattgatatcggcgtgcaggagcacggcgtcaccccggaactgcatgccgaactggaacggctgatagccggtgcgaaaccgctgagccgccatctgcgcggtctcggggtgcggctggaaacccgcggcaccgtcacggtggccgccggcagtgacagcggtgacatcctgaccgtttatccgcataccccggcacgcattaccgtcactgcccgtccggcagccggtgccggtgtgcatcttattgacgaggtgagaatagcatcatga

SEQ ID NO: 291356 - DNA, 912 bp, Morganella morganii
atgccggtgattgatttgagtcagctgccgccgccggacgtgattgagacgccggattttgagcagattttcagtgagcgcaaagcggccctgctggcttctctgccggaagcgctgcggaagccggtcgcccgtgtgctgcagatggaatccgaaccgctgacaaaactgctgcaggagaatgcttaccgcgagctgctgttgcgtcagcggattaatgaagcctgtctggccaatatggtggcatatgcccgcggcagtgatcttgaccagctgggcgccaatgtgaacaccccgcgcctgattgtccgccccgcggatgagacggccgtcccgccgctgccggccgtgtatgaaagtgataccgattaccggctgcgactcccgcaggcgtttgagggactgtcaaccgccgggccgcagggtgcttatattgcccatgcccggcaggccgacggccgggtggcggatgcgtcggcgatcagcccgtccccggcctgtgtcacggtgagtgtgttatcccgtgagggggacggcaccgcgtccgcagatttactccggaaagttgaggcggccctgaacgatgaggatgtgcgcccggtggctgaccgcctgacagtacagtcagcggagattgtgccttataccgtgaaagcggaactgcacctgtgtccgctgccggcgtctgaaccggtgaaagcgtctgcggaagcccgcttacagcgctatgtcacggcgcagcaccggttagggcgggatatccgccgctctgccttgtttgccgccctgcacaccgaaggggtacagcaggtggtgctgatgacaccggagaaggatatcgtcctgaatgagacacaggcggcgtactgcacacagataaccctgacagtgaggggaaacgatgacggataa

SEQ ID NO: 291357 - DNA, 342 bp, Morganella morganii
atgacggtcaccggcatgaatgctctcaccggccggtggctgaccggggaggcccatctgcaccagagcgtgcacgatattttactgaccccgcagggcacccgggtgatgcgccgcgattacgggtcgctgctgccggcactgctggacctgccgcagaacgccgccacacggctgaaaatcatgagtgccgcgtatctggcgctgtggcggtgggagccgcgcctgacggtacaccagattgcggtgaccggggcagacgaaggcgcctggtcggtgacgctgaacggacagaccacagagggctcacgcccgttttcattttccgtaccgctgaggtga

SEQ ID NO: 291358 - DNA, 630 bp, Morganella morganii
atgacgaataacgaactggaacgccggctgatgaatctggtgcgggtcggtaccgtcacggaggttgacacaaaaaataccgtctgccgggtgcagaccggcggcctcaccaccgactggctgcgctggtgccccccgcgggcaggcactgcccggacctggtgggcgccgtccccgggtgaacaggtcatcattctggccgccggcggcgaactgaccacggcctttgtggccggcagcctgtacagtcaggcgcacccggccccgtgtgactccgccgcggcgtgtcacctgcgttttccggacggggcggtactggaatatgaaccggccaccgggacactgacggtaaccggcatcagaaccgcagtggtgaccgcaaaaaaacagattgaggccaccgccccggacgtgaccgtgaccgctgctgaccatatccgtctgaacaccccgcaggtggtgtgctccgatcacttaagctgcgccaccttaagcgtgacaaaaggcggtaccctgaccggcaatatccgtcatcagggcgggcagctctcctccaacggtgtggtcgcggataaacacacccacggcggcgtcaaatccggcggcagccgtaccggaggcccgcaatga

SEQ ID NO: 291359 - DNA, 645 bp, Morganella morganii
atgatccccgtcaccggttccctgaccctgcagctggagcgcgaactgacgcggctgctgcaggccaccaaaccggcaaagcgccgggaaatcgcccgtaaaatggcggtagtgatacgtcaggcacagcagctgcacatcaaagcgcagcagagtccggacggacaggcgtttgcaccgcgccgccgtaaggtcctgcgcggcagcgcccgcctcgtgtttgtgtatcagggtcaggtgcggacgttaaacaacttccgggcggcccgcggacgcagcggacggctgatcaccggctttgatgatgaccgcggtgcggtacgctcgttccgccgggcgctcatcacccgctacctggactatgaccggcgcagtattgcccgcaccacagagcgccgtgacccgatgtttaagcgcctgcgcgacaaacggcacctggttatccgcacctcaccggataccgtgagtgtggggtttcaggggaaaacggcacagattgcccgcgaacatcacgacgggctgaccggggcggtgaatgcgctggcacaggtaaagtacccgcagcgcccgttactgggactcagtgatgcggagaaacttgacctgctggacctcatttatcaggccctgctgacaggaggatga

SEQ ID NO: 291360 - DNA, 429 bp, Morganella morganii
atgttaaaagcgaatctgttacgtcagtacctgacggaagaggtgccgttcttccgccgtcacccggagtccctgacggtgtatgccgaaaacggccacgttgaaatcaccggcagcgccggccgcagtttccgttatcactacccgctgaacatactgatcctgcgttacccggacgcgctggataccctgatagtgccgctcaccgactggctgcgccgtcatcagccggaacggctgtttaacccggactggcgccgcggcggtattgtgtttgatgccgacattctggacgatgacaccgccgatattttactgtcggtgcccctcagcgaacgggtgtttgaacgggacggacagtgggtacaccgggatgagccggacatcaccgccgtcacggatgagtcgtggccggagccggaaacatga

SEQ ID NO: 291361 - DNA, 408 bp, Morganella morganii
atgaaacaccaccgcttactgtggttaatcaccgggctgatattactgataaccgcggcgttcgctgccggctggcagatcagcgggttatatcatgacagcatacagcagactgcggaactggcggccgtaaaaactgccggggagacccgggcgcagatgctgtcgctgtctcaggcaaacagccgccgtctggagcagcagttacaggagatcgccgatgcacccccgaaagccatccgcactgaagtgcttaagccggtgtttactcatcagtgtgtcagccctgagtttgtggagctgtacaacaccaccgcccgccgtctgtccgccgctctctcatcaggagaacctgctgacgccgtgcccggtgacgctgccgctgctgacggggcagaccggcgctga

SEQ ID NO: 291362 - DNA, 360 bp, Morganella morganii
atgagccgggtcagcccgcattttaccgcccgggaatttgcctgccgctgcggctgtggtgctgatgaggttaacgctgaattactccgcgtgctggaagatctccgcacgtattttcaggcgccggtcatcattaccagcggccgccgctgtgtgacgcataactgccgctgcggcggcgccccgcaatcacagcacctgtcaggcaatgcagccgatatccgggtgaaaggggttaccccgcagcgggtggcggattatctgaaccggacatatccggaccggtatggtctcggccgttataaccagtttacccatattgacgtgcgcccggccagagcccgctggggcaccggttaa

SEQ ID NO: 291363 - DNA, 306 bp, Morganella morganii
atgaaaccgtatcacgaaaatattcttatcctcgccctgatcggggccgttgtgacggccgggaaaattctctgcgccggggagccggtcaccttccgtctgtttatcggccggctgctgctgggatcggcggtgtcggtaaccgccggagccctgttgctgctgtggccggggatcagtccgttagcggtggccggggccggctccatcctggggatcgccggttaccagtgcattgaactgtggctgcagaaacacggcatggcgcaattaactgactggttaacccggagaatgaaaaaatga

SEQ ID NO: 291364 - DNA, 207 bp, Morganella morganii
atgaaagtccgggcacagcagaatgataccgcggatttactgtgtcaccgccacctggggcggacacagggagtgaccgaagcggtgctggttttaaaccccgggctgtgtgagcagccccggctggaaaccggtcaggccgtgacattaccggatccggacaccctgccggtgccgcgccggaaaatgatccaattatgggagtaa

SEQ ID NO: 291365 - DNA, 489 bp, Morganella morganii
atgagcagttttgtggcggaaaaaccggtgttacccggtgaacctgacccgcaggacggggagacactggtacacggtgacccgttttacccggctgtccgcctgacggacttacgccgggccatgcgtctggacggcaacatcaccacggaccgcctgcggcacctcgccaccgccgcagtgctgtatgtcagtcagtgcctgcacggctggcagactgagcagcagaccgcgggataccgcacgctgaaagatgtgccggccccggcgcctgacggcgaaaccgcgcacaccttccgctaccgccatgcggtgtactgtttcacccgggcggcactgattgagcagtaccgcgatattgacaccacccgtgagggggagaaacacgcgctggccctcggcagccagattgcggacttacagcgcgacggtcagcatgccctgcgggatattcaggggcggtgccgtattcaggcggagatagtgtga

SEQ ID NO: 291366 - DNA, 711 bp, Morganella morganii
atgttaaccccggcacagaaacaccgtcagcgcattctggctcagttgcacagcgaccgcccggccaccgtgcagggcagcgcgtatgagcagatactgcaccgcctgcgcaccgacgaggtgcgcctgaaacagctgcagtccaccgaaaacaaagtggcctgcaagcaccgcctgctgccggattacgacggctggattgacggggtgctgagtgcccgcaccgggcaggcggacgaggtgtttatgacggtgctggtctggcagattgactgcggtcactgtgaccgcgccctggacatggcggaatacgcgctggccgctgacctgccgatgcccgaccgctatcaccgcaccttaccgtcggtgctggttgatgaaatctgcgatccggtgttaaccctgttaaacagtggtattgacgcggcgccgccggtgtccgtgaagacgctggcacggctggaaaccttaacccaaaacagcgatatgccggatgaggtgcgcgccaaactgcataaaacgatcgccctgaccttaaaggcacagggtgaccccgcgcactacccgcaggcattaacccgcctgaaacaggcgctgttactgcacccgaaagcgggcgtgaagcaggacataaaaaccttaacccgcgcgctgaaaaaagcagacagcacgccccccggacaaccgcctgccggaaaaccggcaggataa

SEQ ID NO: 291367 - DNA, 1113 bp, Morganella morganii
atggccgtaatgaattcacagacccgtcagcgctggttaaactatctgagcacacaggcacagctgcacggggcacagcgcgaaggcacctacctcgaatttaacgtcgatccggcggtgcagcagcgcatggaaaaagcccggatggacagtgatccgtttctgagcaaagtcggctcttacggggtcaccgatcaggaaggggaaaaagtcagtctcggcgtcagcggtccggtcgccagtgtgcataaatccaccacggaacgccgtcagccgcgcgatatcagccgcttaagtgcggatcgttaccgctgcgaacgcgttaactacgacacctatatcagttttgtcaaattagacgcctggaacgggcagcgcaactttcagacgttactcagtcagcagatcattcagcaggaagccaacgaccgtctgatgatcggctttaacggtactcaccatcatgacccgtccgacccggcccgttacccgatgctggaagacgtcaacaccggctggttacagcacatccgcagtaacgccccggcacaggtgatgagcgatgtcaccttaagccactttgacgatgacggtaaacgtctggcaaaagggatgtacaacaacctggatgcggtggtctatgatgcgaccacctcactgctggcaccctggcaccagaacgccaaagatctggtggtgatcaccggccgccggctgacgacgtttgaggattttcgtatcattaacgaatatctgccgcatgcacccaataccgagcgtctcgccggtaacgagttactgaaactgaacgccctgaacgggatcccggtgtatccggtgccgttcttcccggacggcacgatgcttatcaccccgtttaaaaacctgtcggtctactggcagaaaggccgttatgcccgccgccttcagatcgaaccggaatataaccgcatcgccacctacgccgataacgttgagggttatgtggtggaagattacgggctgtgctgcctgattgagggtattcaccatgccggtgaggaaaaggaagaggcagaagaaatcccgcctcagccgcacccggatgacagcactgacggcggggaggcgtaa

SEQ ID NO: 291368 - DNA, 858 bp, Morganella morganii
gtgcctgaactgaaatcgattgtctgtaccgaaggcgccacgctgaacggctataccatttcggccgaccatatccggaagatggccgaaaactacgatcaccgccgttatccggcgcgcctcaatctggagcatatccgcagtctgtttccggatacgccgttccgctgtttttccctgatcaacaaagccgaggctgtcacggtgccggacggcccgctgaagggcaaactggcgctggaagtgaccgccgagctggacgaggcaaaagacgcggatttgatccggctgaaccgctccggtcagaagattttctccagcattgagtggtatccggagtttccggatacgcagtcggcgtatctgaccggggttgccctgaccgactcccctgcggcgatgggcacccgccagatcaacctgagcaccgccggcggaagtgaagagacccatccgcagtattcagctgccctggaaacggcggtgacctttaccccggataccccgtctcagcacagcgaaaaccgcacggaaaaaccggacgcccccgcgtggggcgaaaagttcctctccgtcattcaggaaaaactgggactgcataaaaaatcacccaccgctgagatagcggcactgcgtgaggccatcaccctgaccgccgaaaaatgcggtgaggcattagatgccgcacagcagactgaacagctgaacaccacggtcagtgagcagaaacaccagctggccaccctgctgcaggacctgactgccctgaaaatgcagcttagtcagcaggacagcagtccggttgtccgcccgctctccgccgggtttgccggcggcgaagaaccgtgtgattactga

SEQ ID NO: 291369 - DNA, 1725 bp, Morganella morganii
atggctcaaaaaacggttttcttacacgatgaaccctgtcagcgtgcccgcgatttgtactggcaggactattccctgccgcagattgcacaggcgctgcaggtgaatatcaataccctgtacacgtggcgccgccgtgacggctgggacagtgtgccgggggatgaacgggtgctgcggaccctgcgggtgcaggtgctgcgcctgtcggcaaatacgccgctgtctgccggggagatgaaacagatggattttctcacccgtcagatagagcggctggagaaagcgcaggcggccggtacgggcggggagaaaaagaaaaaaacgaaaaagaaccactttaccccggagcaggtggttaaattaaaagcactcgtgcttaaccccttatttgtgcaccagaagcgctggtaccggcagcggaagcggcgtaaccggatgattctaaaatcacggcagattggcgccacctggtactttgcccgtgaggcgctgctgacctcgctggagaccgggcgcaaccagatatttttatcggccagccgcatgcaggcgtttgagtttaaggacgtcattattgaactggcagagcaggtcggcgttgaacttaaaggcggcaaacagattaaactcagtaacggcgccagactctactttctcggcacgtatgccgccactgcccagacttaccatggcgacctgtattttgatgaattcttctggacggtcagctttctgaagctgcgcaaagcggccgccgcgatggcctcccacaagggactgcgcaaaacctacttctcgacccccacttcggaagctcatgcggcgtacccgttctggacgggcgaacactacaatgacggccggccggaaaaagagcgcattaaattagatgtcagccatgcggcgttaaaagacgggcggttgtgtgaggacgccatctggcggcaaatcgtcaccctggaggatgccgtggcacagggctttgacctgattgacccggccgatgttcagcaggagaacagcccgcaggattatgccaacctgtacggctgtcagtttgtcaaaccgggcgagcgggcatttgattttaataccctggtgaactgcgcggtggacggctacgacgtgtggccggactggcgcccttactacgcctccccgctgggtgaacggggcgtgattatcggggctgacccgaccggcaccggtgataacggggacgggctcggactggcggtgctggtgccgccgctgaccgccggagccccgtggcgggtgttggaagccatacagtaccgcggcatggcgtttgagaagcagtcagaggtgataagacaactggccgcaaaataccatgttgaaggtatcgtgattgacggcaccggcggcaccggagaggcggtgcatgagctggtgagcaaatggttcccggcggcggtgctgctgcgctactcagcccccttaaaacggcagatggtactgaaagcgcagatgttactgcgcacggggcgtctggagtatgacgccggcctgcggctgattgcggattcctttatgaccattgagaaggtggtgaccaccggcgggatagtgacctacaaatcggcccgcacccgcaggattgaccacggggatatcgcctgggcgattatgaacgtactgctgcgtgagccgttaggcagtgacaccggcggcagtgaaacccggatatgggagttttaa

SEQ ID NO: 291370 - DNA, 1065 bp, Morganella morganii
atgtcagagtcagtcatgaccgcagacgcggagaacaaaaccgccggtacccggccacatcctgataccgcggagaaccgctgcagtgtgataacctttgaccgtgcgcagccggtggcatacggcgacgaactgttcggctttatggagtgcacggaaaatgaccgctggtatgagccgccactgagctttgacgggctggcgcggcagtttttcggtgcggtgcatcatcagtcgccgctgtattttaagcgcaatgtgattatgggctgttttatgccacacccgctgctgccgcggcaggtgatgtcggcgtttgtgctggattatctggtgctggggaatgcctatctggagcgccggcgcaaccggctgggcgggacgctggcgttaaaacacgtgccggcccggtatgcgcgccggggattacaggacgaccactactactttgcagtgcagtggaaggacgcgcatgcgtttaccccggggagcgtgtttcatctgctgaaccccgatattaaccaggaggtgtacgggctgccggagtacctggcagcactgctgtccgcccggctcaacaaatccgccacgctgttccgtacccactactatgataacggctcgcatgccggggtgatagtgcaccttgacggggcgatggcggacaaagaccttgaagatctgaaaaaatcgttaacggggttacgcggcgaaaatgcgttccgtaacctgtttgtgcatacctcaggcagcgggccgaacggggagaaagcgttgaagatcctgccgttcagtcagatagcaacgcgggatgagtttttgcacgtcaagcagaccacgcgggatgatatgctggcgatgcaccgggtgccgccgcagctgatggggatgatgccggacggcaacggcgcgttcggtgatgtggagaaagcggcacgggtattctcggtcaacgagctggcgcccgttatggcggatttgcagtcggtcaatgactggctgggtgaggaagtggtgcgctttaaaccgtatgcgctgctggagacactgacgccggcgggatga

SEQ ID NO: 291371 - DNA, 258 bp, Morganella morganii
gtgttaaccgaagatgaaattgaagaaaaaaaagaccggatcagaaaacttgaagaagatgtcagcgatatcaaaacagatctcgctgtgattaaatctgactatgccacacaaaaagatatcattgccactcaaaaagacatcgctgaagtcagaacggattttatcactgccattaacaaacagacaaaatggatcattacctctgtgtttggcgcccttgcatccggtctggcaatagcgaagtttattttttaa

SEQ ID NO: 291372 - DNA, 279 bp, Morganella morganii
atgaagaaattaattttagccggtatcataatgtctatgtcttcattggctttttctgctgaattatctaaaacatgtaaagattattatacagaaatagataaatatgttgattcgttagcctctaatgagacaatgaagactcaggcagaaactatcaaggcacaatatgaagaatctaaaaaacaaattgaagctatgcccggtgatatgcaagaacaagcatgcaaaacggctttagattctttaaaacaagctcagcaaatgatgcctaaataa

SEQ ID NO: 291373 - DNA, 774 bp, Morganella morganii
atgccatccacagaaaactattatgacctgatacagataatggctgagcatctctgcgaacaaacctgtccggatgagtttacagttaaacgtatagagcagacatttggctcctgtgatgttcccggtctgcaggcttatggttttggttatctggctgccgcaatgggtgatatgcaaaaaatgcagcattactttgaacaggccagtcagttgaccaatgacccgatgatttttgaggattttttggtattactccagcatctggctttttctcgtgaatggagcaaacttattttagcactggctcctaaaataaaaacgtccgactacctcacttacgaagctgccaaaatcagcctgatacagggagacatattaaatgcccggcattatattgacaggttaagtcagcagctctctgagcccgaaaaatcagaaactgaaaattggtttcactatcacctgcaaaacctgctggcagcttaccggatgtccggttgcacacccgaacagatacgcaccctaacccactctgtgttcgaactgcttgaccactacgaggtagatcattacgccatttatattgatggtcaatgcggcggacgttaccagatagagttgtgcggtaccggaactattgaaatgttaacagctttccggcacgatttagacaaaaagcgggcggaaaacacactgctgaaacaatgtccgttaatcacgactgtcagattaccggctcttttcttcggttctggtatagatgataaatag

SEQ ID NO: 291374 - DNA, 198 bp, Morganella morganii
atgtataaaatcaccgccaccctttaccggagagggaaagatcccgtcagatggacacactattcccgtcataatctctcccaggaagagagtcttaaactattatcgcagaaaaccaaagaccaacccgactatctccgccggggtccgattactctggaaaactttcagtgtgaacgggtaccggatgatggatga

SEQ ID NO: 291375 - DNA, 2421 bp, Morganella morganii
atgtctgagccgtcgtatatagaccgtggcccgctgcgggaaaaaccggcaccgttactgacaccgctggcgtatgcgtataagcaggacgggcagtgggactactgctgccccctcgggttcactccgccggagccggtctacagctggcattatcagactgaccgctggctgaacgcgctggaaaaacgtgaactgctcgacagccataaccgcccggcggcgctgaatgattttctgcgccacaaagccggtgaggtccgtaccgcacatcaggcgggacaaacacaatggatgcacaccgcggatggcattgaacagcgcttactgcaggaaccgtactttatccgccgccattatcagcaacgtctgactcatctgcagcagcatgccccggtgcaggcggtcactgattatctgactgaccgggtaaaaccggtgctgttacgggtggcggcggtacgccgtcagcaggccatcagcgcatacggaatgctcactgccttattccattcccgcatggcacacctgacagaactgccacgtgcggatgtccgcctgctgggaaatgatattgccgtccgtctggacaccctcctggatcagaccttactccgctggcacgataagcacgggagcgatatcaccgggtttccgctgcggccgctgacctttcatctggcgcgggaagcgctttcactgcgggtgtggccgcccggtattgatgacgacgatgccggtgaagcggtgctgaccggattcctcagccgcctcactgatgcacagtggtgggcagaccgcctgtggcggctgcgccgcgatgaccgtgaagccctgctgcgggccgccaaccgcgtgcatgcaaaggcccatccgtatctcagccacgaagcgtttactgactggcgcgagcagcgccgccgtaaccgcggttttctgcaggctcatgaactggaagatgaggacggccataccgcaccactcttcgaacaggtgttaaagagcactgccaatcccgtcctgcgccgccatgaactgatggcccgtatggagggggttgaacagattgccctgcggcgcggggatatcggtatgttctacaccttaacctgtccgtcaaaataccacagcacccaccatgatggccgccccaacgacaagtggcagcagctgaccatccgtgacggtcagcactacctgtgtcacctgtggggactcatcggggccaaacttaaacgccaaggactgcgaccttacggtatgcgcgttgccgaaccccaccacgacggtaccccgcactggcatctgttactgtttatgccaccggagcaggaagcggatatcaccgttattatccgcacctacgctgaacgggaagataaacacgaaatccccgccggccgggcggacgtccgttttaaggctaaacggatagatccggaaatcggcagtgccaccgcctatattgccaaatacatatccaagaacatcgacggttacgcgctggacaatgagaccgaccatgaaagcggccggccgttacaggacaccgcccggtttgccaccgcctgggcgtcgctgcaccggatccgccagtaccagccgctgggcctgccgccggttaccgtgtggcgtgagctgcgcaaactcaataaccagctgaccggcaaaatgacactccgcgactgttaccgccgcggacagccgctgctcaccgtgcgccggctggacaacatcatggcagctgccgatgctggctgttttgcctcttacattgaagctcagggcggcgtgcttattccgcgcaaaaattattatgtgcgtattgcttatgaaacggcggagaaacccaaccgcttcggggagacggtacagaaggtgtttggtatccgggcacagggcacggacggggagatacggatcaatacccatccggtgaaatggaagattgtgcgaaaaaaaacaaagaaaaccacgcaatgtgttggtttggctgttgacgttgaccttccgggcggctccgccgccccttggagttctgtcagtaactcgacggccggtcagaatatgaacaaaaaagcggcagtaaaactgcgcgaaaaagcgcgggaaacacgttttaaacaggtatgtcagcaactggaaacggtaaaacgggggctgggtatcactattccggcggagtttctcgcccggcagctgcttaacggggggaaagtgcgcctgacggatgcggaaatcagtcttgagcggggacaggtgcgtctgacggatgtgcccgcgccgccgcaggagcgcccggaaaccggcaccgctcctcaaacccgggacaaaaaacagaaaatgacgcaacaggacactgcgttactgcaacgcgtggcgtggttacggacacagtccccgccgtggcagccgttttga

SEQ ID NO: 291376 - DNA, 822 bp, Morganella morganii
atgacctgtaaaccgtttttaaaatgggcgggcagcaaagcccgcctcatggacacactgcggctgtatctgccgctgtgtcaccggctgattgaaccattctgcggttcgtgcgcggtgatgctcaatacgcattatccgcgctaccggctgaacgatgtcaaccccgacctgattaactgttatcagcagctggtccgtgacccggagactttcattgccgcttaccgtgaacgggttaatcagcctgccatcactgccgaaacggattattactgtatccgtgagcgctttaatcagaacaatctgccgctgttttaccgggcgctttactttctctttctcaaccggcacggttttaacggtctgtgccgctataatcaggccggagcattcaatgtgccgtacggtcgttacaaagccccgtattttccggaaacggagatgcgccattttgcttaccgggtccgccagggtcaccttcactttctctgcggtgactggcgggaagcgctggctgacgtgcgccccggggacggcatttatgccgacccgccgtacctgacggataaaggcggttttacacaatacagcccgcacggctttgatgaccgcgaacacgaaacgctggctgtcaccctgaaagccctgcatacccgcttcggcattccggtgacggtatccaattcagcgctggcacatgaagtgtacggtgacctgggttttcaggtgcatgagattagtgccccgcgcacgattgccgccaatggcagccggaccccggcaacagaaatcattgccaccctgccggtattgcattag

SEQ ID NO: 291377 - DNA, 276 bp, Morganella morganii
atgacccttaaatcccggcagaaaatatcaccggatgagcaggtcttcgcggacggtctctggcgggatgtggtgaaaccggttgcggagtatgccgaaaaaacagaacgctttaacaccctgattgcctgtcatgcacatctgatgtttctggtgaccgtcatgcagacacagaggtttaatccctttttaaccgcctccctgctgaacagttaccttcacacactggagagcatgattgagaagctgcatcaggagatagccgatgacctgtaa

SEQ ID NO: 291378 - DNA, 285 bp, Morganella morganii
atgaacacccacactaacccgctcattaccgcagccgcactgacccgcgcccggactctgttccgggtggctaaccgggcagagcgcggtctgctcattcagattatccacgaactggctgagttccggctgatggcggatctccttgactacgaaggtgaacactatcagaccgccctggatgattacctgacggctctgaccggccgttataacacgctggcttctttcgggcagcagcttgagcaggccgcagataaaaaggagacccccgatgacccttaa

SEQ ID NO: 291379 - DNA, 261 bp, Morganella morganii
atgacaatgaacaataaaccccgttcctctcagaacaacgacctgaaaccggccggtctgttaaaaaacctcatgatggccacccgggctgccacactggaacagatgcatgactcgctggcgctgatggccagtaccgcaaaacacaccgaaccgggcgccaccgtcacccacgccctgctcgacggctttctgaccggactcagcgaacagataaacacactgagaaaggagatgacacaggatgaacacccacactaa

SEQ ID NO: 291380 - DNA, 264 bp, Morganella morganii
atgcaacgtaaacccccgttaatctccgtaaataaccggtctttaaaggcctttattctgggcagtctgcaccgggaacaggtgctgatattaaccgaatggcgcggcagtctgactgacctcgcggtacatatccgcgacctcagcctgacacctcagaacgctcacaaactgctgatgaaaagcgctgaccgcgtacagcgccggattaaccgcctgctgtataccactgataaccctgacacacaggagacatcaccatga

SEQ ID NO: 291381 - DNA, 387 bp, Morganella morganii
atgtccgcgttaaaacaacccgccatcccgcccgaacaccggttactgccggatgacgtggtggcggccggtacgtttacgccagatgaacgcattgacgccctgaatcacacggcgcgcctgcgcggacaactggtgtcccgggcgcatatcagccggatgatgcagggctttatggatgaattacgcgaccacaccaacaaccggcagcgtaaaaacggccgggtactggaactgctgttttaccttgccggcattgcaaaagaccggcatgccctgaattttgctgacctgaccctcagtgaacagcagcggttcacggaagccatgaaccagttaaaagtggtggtgagcctgtttccggcagaattagccatcgcggaataa

SEQ ID NO: 291382 - DNA, 162 bp, Morganella morganii
atgaccgcacgcaccaacggacagtaccggtacaaactgaccggcgccgattttcaccccggccgccggaagtctcagcaccaccgccggtgccacggtcggggggccgtgctgctgtgcgccgtgaccgcggttctcggcacactctggctgctcagttaa

SEQ ID NO: 291383 - DNA, 561 bp, Morganella morganii
atgacaaccggttttgattacatcaccacccacagcggcaaacacctgaatttaaatcaccccgtgccggagatgattgagattgacgatattgcccgcggtctggccaatgaatgccgctttgccgggcaactggagacgttctattccgtcgcccagcactcggtacacgtcagccgggcggttgaacataagcaccgccgctatgcccttgaagggttgttacatgatgctgctgaggcatatctcaaagacctgccgaccccgctcaaagcactgctgccggactatcagcagctggaaaaacagctggacgcggttatccgcgcccgttttggtttaccggagatgacgtccaacgatgtgctgcgggctgaccgggctatgttagcggccgaaaaaaccgcttttaaccttgacccgggtattgactggccggtattgcaggacgctcctgttatcccctggccggaagcgtcgccgccgttaaccccgcagcaggcgtatcacgatttcctgcgccgttaccatgaaatcagaacgtggagggtatcgtcatga

SEQ ID NO: 291384 - DNA, 282 bp, Morganella morganii
atgcacacactaaaaccgctggaacaggccgacatgaaactcaccctgttaaaccggctcaatgacgtgtttaacaatgcccaccctgcgtggccactgagcacggatgatatccgcgaaatattattactgtatctcagtatcaccactaatgagcgctggtgcttaagtaaaatcgtttcacacgccggcaacaaaaaggcccccgtaaccgttcccctgaccgcacacttacacaccggcctgcataccccgtgtccgcagaaggaggtcactccatga

SEQ ID NO: 291385 - DNA, 504 bp, Morganella morganii
atgaaactcagaaacaatcagacattaacccccgccgcgcgggccgatctcactctgcagctgctgactgaaattaatgctgccctgcatcacaaagaccgtgaaatcgaactgtccccgtttgatattaaagcgctgctggtgcgctgtatacagatgaacaccgcctgcggtacgatctgtattgaagatgaacccgtcagccggccgtctgcaaacacccgtatctccccgccggacagacacacgaaaaacacccccggcacggccgctgcaggaacagaaatcccatcggaggaacgccgcaaactatcagaacaattcggttacctgtgtgatgacctgattgagagtcagcaccggttagacaccgatgtcgtccgtgctgaaaaacaatggcagacactgctgcaacacaaggattccgacctgtccgttctggcttccagactggcgcgcgcgttcaatcaggcaggccgccgtcacgcccggcatccggattaa

SEQ ID NO: 291386 - DNA, 186 bp, Morganella morganii
atggctcagttgaaacgtctcggcggctacaccagtgaataccgggcatttacccttcaccgcgtgacaagaccggttcaacgctggcgcatcaccgaaaccgccacccaaatttcttacggactgtgggattcaccggcagaggcggtccgttatatcgataaactgtaccggagtcgaaaatga

SEQ ID NO: 291387 - DNA, 393 bp, Morganella morganii
atgaatgagactatcttgcagatgttattcaaaattccggagccgattacggcagaagagttcggtcgcagaaccggaaaaacacccggcagcgtgcgacgcctgattgatcgccgccgtctgcctatccgcacggaacgtgatctgctcgggaaagatttcagcgatatgcgcctggtgattatgtggaatgagtggctggagatgatttatgaggcaaccggcagaattcctgactatgaccgtctgggctggaaagccacctggtttaaacgcgcccgaaaactggcgatggatattcaggtcgtgccgatagagcaggaatccaccgcaaaagcactggagcggattttccctgaatacaaagaaaccggcggtgttgcggcaggatga

SEQ ID NO: 291388 - DNA, 291 bp, Morganella morganii
atgcatcttggagaaaagatcaaacttatgagagaaagtgagaggttgaccagccgaccttctgtcgcacagatgattggtataggaaatgacgctctttggaggtatgaagaaggtaaaagcattcccaatgcagaagtaattcttaggttactgaaattaccacagtttgaaaaatatactctctggtttgtaacaggaaaaaccatacctgaagcagggcagatagcccctgcactttatgatccgaaaaaatatgaaaatgaagatgaggaggataaaccggcatga

SEQ ID NO: 291389 - DNA, 213 bp, Morganella morganii
atgactatttatcgtaagctgaatgacatcatgaaagctgaaaataaaatcattcgagttgagaaaaatccaagttggtctgaaattgtacatatcttaaaaagaaagccgtacaggaaatacgtttattggtttgtccataacaaaatttatcctgaaatcggtcaagtttcaccgactctcacacactgtgggcgaaacagaatcatgtag

SEQ ID NO: 291390 - DNA, 990 bp, Morganella morganii
atgacaattaaagcgcttgaaggtaaacgttataaagtggatatcagaccgaacggtcgggctggaagacgcatacagcgtatttttaacaagagggcggatgctgttgcctttgaacgctatgtattggcaactgccgatcgggaagagtggcaaccgcaaaccagggattttcgccggttatcagaattggttgagatatggtggaattacaccggacgtaatctaacctggggaaagaaaaagagaacggcacttgtgcgtatcgttaaggaaatgggcgatccggctgtttatcaaatgaccccgcgattcttaaatgctcattgttcagaacggttatacgggggagtaaaagccgcaacagtgaatcgggatatggcggtattaatgggaatgtttactatattaattaacgtcaatgaattttccggtaaaaaccccataaaggaagttccccggttgagagagaaaaaggtagaaatgtcctatctgacgaaaagtgaaatagctcgattgctgggcagtgtcagcggtgataactggcggattacggtattatgcctgagtacaggtgcccgatggggagaggccaccaaactgagggcggaatatctcttacacgggcgggtcacctttactcatactaaaaacggtaaacccagaacagtccctatctctgaaaaagtaatgaacgcgatcaaaattaaagaaactggtttattatttgacgtaaactatgaagagtatcgtaaggtattaaaaacagttgtaccgagtttaccgttcgggcaagctgttcacgtgctgcgacatacttttgccgcccattttatgatgaacggcggaaatattcttactttacaaaaaattatgggacatgccagtattcagcaaacgatgacctatgcccatctggcacccgattatttacaggaggcgattgatttgaatccgttgcaaggagatgtccacatcctgtccacttag

SEQ ID NO: 291391 - DNA, 738 bp, Morganella morganii
atggcagtacataaaatatctaaggaatttaatgacagtttgagtgttgactggccgtgccccatctgtcatcaaaaaactttgcaaattataaaggacagtttcattacgaaacattcagccgaaactcgtaggtgctggagtgaagattggtttgagccggaaatgagcacatcagtgttcgtctgcatggctgaatgcacaagaccacagtgtaaagaaattgtggcttgctcaggtattggtggtactgaaaggtgctggtctagttacattgaagacaggctagaaaattggtatcgccccatgtcgttcttaccggtacttcatcctttcctgattcctgagccatgtgcggaagaaataagaaaaccgcttaccgcttccttctctgtttatctcagtcagccagggtctgcagctaatctgatcagaattacggttgaaaagattcttacggccattggtatccctgagttagatgacaaaaataaccgaattaagcttcatcatcgccttgagagccttaaggatcaatatgcgccttataaagacaccctgatggccataaaattccttggaaatgccggtagtcatacctatgatgaagtaaacattgatgatatcgaagctgcattcgagattatggaatatgtaatgaatgaccttttctctggtaagaaagagtctattgatattcttaccaagcgtctccacgggaagtttgaaaaacagtaa

SEQ ID NO: 291392 - DNA, 1299 bp, Morganella morganii
atggttttagtgtttttaccgacattagcattttcttctgattcaaaagaacatggttttttaactgatttattgttacctacattagctgttatagtttcaataatagtactacttataacatatgcaaataataagcgaattaattttaataataaatttaatttattcatggagcaacatgatagattacattctattttagaagggtgtattaacaatgatattaatgaatatgactctatagtaaaggagttagagtgtgaaaatagcataaaaaaactatttagacatgaaaaatatagtccatatatgaggtttttatatcatgtgttaaagtttattgataaagaaacaccgttttccaatgtgtggtttattccaaatggaactaaaaaaaagaaagattattcatcggtaattagagcgctaataagtaacaaagtaatgatattggtaatgataaattcattaaataaaaattttgaatattatagggagttattaaataaatttagtttttttgagcatgtttctttatcttatttatataaaaatagtaattacagccatgagtatcattgctttttaagcagcaatgggttatttgacggcaacgtccgtccattcgtacttgattacattaaaagcaaagcgttaggaaaagaaataaagaataattattactttgaaatgaaaaagttttggtctatgtatatagatttaagcagaaggaataatgattactataatgatctaattctaaagagtatttattctaaaataaaatttggtatagaaaaattggtaaaaatcgccatcgatgatataagggaatcaaatgtagttactaatgaaccatatcgtattatagcatctgtgagtcatgatgatgagaatggaggtgtaaaatattgtgatgattttatatcaaagccatatttttacttctctgaagttgcatctgaatcagatgataaccgtgagtttttaaatgaacttagatatgagttcgaaaaattcattagtagtagaaaatatatttccccgagaattagcattgttgctatttgtaaaaatgacgttgacccattggggtataattactatattgatggttatattgaagttgatattttctacaagtgcataataaatcaacgtaaaattgattatgttaatagcgtaactgaaaaagaaattttattaaattgtgttgatattattggaaaaaaaatgaacccagctaacttagatatttttaatagaccagttcacacattaaataaagtcaaataa

SEQ ID NO: 291393 - DNA, 204 bp, Morganella morganii
atgaaagaaacaaaaattgctccattcataaaagccgataaatttggctatattgaagataaaaatggctatgcctttatcggctttcagtttcctgaaacaaaaatagataacacaactgagctatttatgggcgttgacctgacaaccataaaagaattaattgttgttcttcaggatcacgttaaacgaaattccaactaa

SEQ ID NO: 291394 - DNA, 399 bp, Morganella morganii
atgagttatatgaaaaaagagcatcataatatcgaagaagcgcgagatgatggatttgtttttgctatcagtaattttatctctgccggaaagactatagacagggatacaattgaacttgtaaaagagtcagtagattatttatttcattgggatattcccaatgataattttacgaaatgccatattaatttattgaaaacaatcattgcgagtgccccgtggttttctgagtcagaggaaattagattattttttagaaaaaataaaagattagctctaatggtggaagaggtttcacgcaaagagtttttaccgcaaagaaccgaaactataacattgatatcagcgcacggtggtggtgaaaaaatcgacaccaccgtgagatggtattattag

SEQ ID NO: 291395 - DNA, 192 bp, Morganella morganii
atgtcatataccagcgctgattgtgacaaagttcacgaaacaaacgttatggatgaagtaaatgccgcattacagaaaggatggatacttcttcaaacaagcgaaattaaaacggtttatgaagatggttcaactggagtttattataaatatctagttggacacctcagagtcacacctaaatcacagtaa

SEQ ID NO: 291396 - DNA, 858 bp, Morganella morganii
atggttgaacgtatcaaaagtcctatagttggggcttttgtattttcttggttattttttaattggaaaattattttaatattattatttagtgatagcaaaatagaagataaaatagacgttatttctaaatatataacattagagtcatttttatatcccgctattttttcagttgtttatagcttggctattcctgttgtttcagtagtcgttgaatggtgccttaaaaaagtatcaataaattctatagcattagcatatgcgaaaaaaaatattgggttgataaagaagaaagatagtgaaaaattaagagctgatgctgatattgcatatgaacgtcaaaaaacaggagctgaaaaagaaatacaggagatgcgtgaaagaattatagaatcgaaggataaactaggagttttggttagtgaaaaagagaatgcaataaaagaaaaggagaatgtaataaaggaaagagatttgttaataaaagaaaatgatgatttatcaaataaaattaataatcttagtaaaaacattgaagttttagagttgaaaaataaaaatcatggtattccatatttaaatggcatggagttatttcaaagtgacgataatgtaatgatggctagtattaaaaataaaataattgaaaaattaaaaataaatcctagtgatagtatgtattctatttataaagagatagggtttgatactgctataatgaagatacccggtatttcaaagttatatccatcaccagaagaattattttctcctaaacttaaattttataaatttcttgatagccttaatgtagggcagttactttattatggtaattctgttttgaataaataa

SEQ ID NO: 291397 - DNA, 1059 bp, Morganella morganii
atgataacgagaggatatatgattggtcaaatagtcgaccaattagaagctgtatcattacaagctaaaaccagaaactcacttggtttgactgacttaagtgtattctgtgaagattacttcaaagacatcttaaatataataaaagatttaaaattagaaaacctgaacgtacaaaagtcaaactttaaaggattggatttaggcgatgaaaaaaattcaattggctttcaaatcacaacaacaaatacaaaacaaaaaatagaaaaaaccttagaaaaaatcacccctgaaatcaacaaaaaattcaaaaagataaatatttttattatcggagataaaaccaaccataaaaaaataaaaaataacgggatcagtttttcagaacaagataatatattagatatacgatggttgcagagaaaaataataaaccttgatgtggtaaaaataaaaaagatatatgatatcgttaatgaaaaaaccatcttcatattatcggagctcactctccctgattcaaatggtaattttgcaaaaattgatattagccattggcagagtaaacctaccccccggaaatcttcagctaaaaaattaatatcttacataaaaaataatgaagatgatattaaattatcaataagaaatgaaagtgatatagttgaattacttacatcgcttaatgatacattatcttgtctccctaggcaaacccgtgaatttattgttaactttattgaaaatagaaatgagttattatctgaagaaagtaactctatcgcggcattaataaccaacgaactgaatttaaaatattcaggggatataaaaagccatgaagcaatattaaaacagtatgatttattggatatatatgaacatgaaaataacgatggatacatagagtactattactattcattaactctcataaaagaacgtaggtttaaattaccgcttggacgtaatcttgagcaatatttatatgattacttgaaagaagagaatatatcccttgataacacctttgttaacttagacttttctacaatataa

SEQ ID NO: 291398 - DNA, 1023 bp, Morganella morganii
atgagcttaataatttttttcattatttctttacgagttagtctttggatatgggagcaccgtgataagtttatattgaactcggacagtttacataaacagtggctgtttagattagccattgttttccctttattttcaagtgcttactttatattgtggctaggtgcaccatacccatttagatttgatgctcatggatatagcgctttcttggaaataaataaattctctttgggaatattagctctatccccaatattaggtgcttttgttgtatccgcacaccgttcattacaaactgaaaaacaaataaaaacagcagaaaaacagttagaagaagcacaaaataaaaacaaagccgatatttatttttcaactaaaaaatttatatttgagcaattatctaatgtaacgacatcaaaaggtgaaaaaatatctagcgtagcagctttatatttaaaagcatatcaaccaaatggaaactttactgataaaaggctactatctatctacctaaaaataaatgaattattatattcagcaaaagaaaactatattttagataaagtggattttataaatgaaatgatattgatatcagattgtgaattaaataaaacacttccacccttaaatatagaaatatgttttgctaacctagatcattgttttgatagaataaaaaatgagcttttcattgaaaataaaacactgaggtttttagaaaaaaaatacatgaaagctattgatgatataaatgagctaaagaaaagcacaaataccaataccaataccaataccaataccaataccaataccgagaaaattaaaaccatcgttattgacaataaaattaaaagtagactaaatttatttattagagatgtgaataattatatattggatatattaaccaccatatatcaaactatagccacattaaatccagttgataacataaatagacttatgccatcattaaatatgtatattaaattaattaaaagccaacacagctag

SEQ ID NO: 291399 - DNA, 687 bp, Morganella morganii
atgctaaataattttataaaacaggctattgaagatcaccaatttatagaagttgaaagtacacaagaaaatatttatttttttaaaaaggagaaagatgcattacgtcgatatataataacttacagaactgataaacttgaagatgcgagtttcattaatgagttaattattaacaacaccccaactgaacttttagaagctccagcttttgcaaaaaacactgatcttataatagtgtttcaactcgacaaactttcaaattacaagcaatatgaaaaaagtatatttgatatagaagagaatgcttatcatttcaaaaaatatgtattgtattattcaaatgaagagaatcaattaatttccgggaagaacttcaataatcttagagcagttctctcagatcatgaagaattctccacatataaagcagatccatcccgacccagcctgtataatatggcagctagaattttcattaaactaccttttttagagatgcctgatatagaaaaggatattgttccaattgacctccaaatcaatacactggtagattcattaaatctatctgagccatataataagatcagcacagcaaacaaacaaacagatataaatgtagaaatgctaattgaggaattaataaatgaagaactggaaactatcaaagctgagaataaataa

SEQ ID NO: 291400 - DNA, 330 bp, Morganella morganii
atgaattatgaacaacgtattgtagcatttattgacattctgggttttaagtcattacttaatgatacccttgataaaaatggaaatgataaagaagaaaaaattgatgcggtaatatcggcatataatgcaattagagaaatatgggacttagattctgtgcctcaatacttagatgttaagattgctgaaacaaaaaaaatatcaatattttcggactgtttagttgtttcttttgccatcgaacagccaggaggggtcttttctactctacttgaaattaagatgttgattatgagactaatatctaggaaaattctatgtagatga

SEQ ID NO: 291401 - DNA, 1149 bp, Morganella morganii
atggtttcgcttaaaataggcagtggtagaagcctatcattagaaattatgttatctactattttttatgacagcttattgtttgaaataacagacgataatggtgaaaagataaattactcccttctcccaaaccgtatttctttcaaaaaaaataagatattagttgatagtaaaatttgcatgttacaagagcgttatggctataaaataaatatacgcaacccatcatactctcgttctatatttactccattactatacgctatattattttttaaaacattatttactaaaattttcatccccagccaatggattcttgcatttaaagaaaaaagcaccgataaatggtcaaaaataaagtttgataataatgaattaatggctgacccttttatatactatcataactcaaaatattatgttctatatgaagcattaaattatgatactgataaaggctatatttcaattggtacactagatgttaaaaacaaagaaataattgataatcatataattattgaagagaattatcatctttcctatccatttatattgaaaataaatgatgagctatatattattcctgaatcatcatataacaacactattgatttatataaatgtatagagttcccttataaatgggaaaaaataagaacactcattgataatatatctgctgttgatactaatttaattaataaaaatgggctatggtacctattaacctctgaaaaaaaaatgggtgtatcatttggtgatgaacttagtctatatgttacagacgacccattaagtggaacattcttacctgttatcgggaatcctgttgttcatgatatttcaaagtcacggaacgccggtgagatattaaataatataagagtttctcaggattgttcaaaacgttatggttaccgcgttaattttatggaaataaatgagctatcggagaataattatagtgaacgttatataaagagcttgaaattaccatttggaacaatagcaatgcatacctataatagcgcagaaaatattgaaatagttgatttaaaaatcataaatatatctccttattttttgtataggaacctttgcagaataattaaaaaactaaaagcaaaaatattaaaatga

SEQ ID NO: 291402 - DNA, 435 bp, Morganella morganii
gtgccggaaaaaaagcggcctgggcggcggggatatcaaactgttttctgcctccggtgcctgggtgggggcggaacagctcgcgctgttgctgatgctggcctgtgtgtccgcgctggtggtgtccgggctgcaatatttacgtcaccgctgtcatcatcacccgcgatgcggcccgcgcattattgccttcgggccgcatttaattgcggggatgattatggtgatgggaatgatatcaggcagtcgttttcagtaacgggatcagcctttcccagtgtgattccgcaccgagtacagcctggttcgggatgtgctgaaatgcgccgttctcttccagcagcagggtcgggaagccgccggtcgggttatgcacaaataactgacggctctcatgaatatgctgctcagtattatcagactgaatatcactga

SEQ ID NO: 291403 - DNA, 909 bp, Morganella morganii
atgaatattgggctatctgattttttagctactgctgcactaattgtttctatattcagcatgttatatactaaaaaacaaagtgaacttgcaaaagctagtcatattaatgactatcgttctcaactatctcaataccactcggattatagaaaagctcttactaaaatacaaaaaaaacatagtagcgaccttcaggaactaagtgtgttagctggaaggatattggttaatataattaatcgtttcgaccagcatgatattaatcaccatgcaaatagacctttaagacatttacttcatgaaagttctgaaatggtttttcgtacattccaaggtcagttaggctggcaaacagcagaaaatatatcccggcgactacttcaaatatcttttattgaagataatctaaatcctaccgaacatatttttggaaaacactcttttagagaagttataaaatcacaatatattttaaatccaaatacatatttagaaatgaatttacttaatgatatttatttttgcgacctagtatcagagataaaatcaagaacttcacagtctaaaatagaagagctagcaaatagtctacaaaaagaaatacactcttttaatcaattatatagcagactaaagcttgatttttcaaaaagtagcaatcaccttaaggaattaatcactcaaggaaataaagaacattttcaactaaaagaatcttaccttctttttaatgaaattaaaaaaacacaaataatattaaatacactaagctatatacatttttctgaggaaattgataaaaccatttgtggaaaatatcctttcttcatttctaaaagtatttatatatgcacccttcttcatgcaattcaatgtttacattcatggggatgggaatatgaataa

SEQ ID NO: 291404 - DNA, 363 bp, Morganella morganii
atgaataaagaattaaaagaaacacgaaaaaatagcacaccaataaaagtttattgtttgcgaagtgaaaaagaaaatattgaatctcaggctaaaaaagcaggcttgagtgttgctaaatatctacgggaagtaggacaaggttatcatataacaggaatagttgattatgaatgtgtcagagagctagcaaaaataaatggtgatttaggtcggttaggagggctattaaaattatggctaacaaataatatcaaaacaaaaaacattagcagtgtaaccataagagcagtattaaacaaaatagaatctaatcaaaatgaaataggaagaataatgaaagatattgtaatgcgaaaataa

SEQ ID NO: 291405 - DNA, 252 bp, Morganella morganii
atgagcatatcagtgaaaaataaaacgctgatcaaccgtaagacattgttgaaaatgatcccattatcagaccgaaccatctacaacctggaacaacgaggggagtttcctcgtcgtattgtgttgacaagtcggagcgttgcctgggatttgactgaagttgaaaactggatagaagaaaggcgcagatcattgttaaaagcggctagaccaggagatttatgcagggagttatcatggcgattgaaataa

SEQ ID NO: 291406 - DNA, 1179 bp, Morganella morganii
atgaaactggaatttgatatccaaaaacgattaggtaagttctatattccaatatgggctggctgtgataaatccgtagcagctgccattacgatgtttagggaacaatggcattcatattctcaagtttccaaaagccataatatagtcagactaatcaaagaattagttgacccagctgtatctgaatacttgaatagtcttcctgccaactatctgcgatatagtccaatagcgccagctaagctaacttacagcgatttaatcaaaatgagaggttttcattactgctctgattgtattggcgattatcttaggccttttgttgagcattctacgtatacagagccagataaattatttatagctactcaagaaacattaaaaagcttattttcccactgcaaaggaaaacgccccaaaagatcaaggcttgcacctgatatctactttaatacggaaagaagcaaaggattatgtcgtctttgtggcaacccaactgagttttcttcatttattaccaattgggataacgacggttttattgatgatactgaagaaaaatatggactaaagaaagggccagattttagccataaatactgtgctcaccataaaccacaattacaagatggctcttggaacccagcctataaacaagcaatgcgctcttctaaacaatttgaattggaagttttaagattatgtcgccaaatagctaaaccagagcgtttaaacgctatgtcaggtgataatctcatagatgagtatttttattattatcttaaaaataaaacaataaattacgctcaatcacttacatgttttgagcatatccaaaatacattttctggatcaattaccgttgatgaaaaaacatgtgaggaaataattagtattgttaataacatgacaaatgcaggaatttctttggggcctgatgatatagataagatacgcaatattgcccgtgaaatggtcaattcacgtttatcagataataaaaagcgcatgttagttttacgcaaaaaaggttttaatcaacgagagatagctgaaataatcagctcactgatcggtaaaaaattatcacaccaagcggtatctaaggctataaaatcagtttgtgataaatttcaattaaattatatatcaaataagcatgtatacatggagtaa

SEQ ID NO: 291407 - DNA, 1860 bp, Morganella morganii
atgaaattgatactaaattatgatggctggtgtagaagaatcgatttaaattttcgagccgagtatccttatatatctacaagaatattcaaaataagtaactatgaatatcatttatatgccattggcttagctgaagatttctcccacatagagaaaatatttgataacaaaattagatatataacaacacctataaaacttgttgcaaaaattcctgaaaagtacgagtgtgaactcacatcgattgccgatgaaaatataccttcaaattttgaaggtataccttttacattagatcaaatgctggttcatattgcgtctatacactctaatgtaatgttttcacaaatcagagaggatcatgaaaatagcaggattattattgaactagctccaaacagcaaacaacatgatcttgataatgttgaaaaaactactagtcaattaaaatccccatactcatttcaagttatcatagggaatactgaagcaaaaaaaattataatgcatgatgaagtattcagtatcgcaccatctcaatataaaaaggatttaaattgtaattttttagaacgtgatgaaagcctatggtttgaaaatattgataaaatatattctggcgaatttaaaaaatctgaattatatttcatagaaaaaaacaagtctagttgcctagtgaatttttctatttttaaaaattcaaacttaagaaatcacttattactttatgatatagtttactgcgtacttcccttttcggaaaatataaataacttttttgaagatcaaaaaataagtagatttgaatttttaactttacttaaacgaggtcggattaaaatattaaacatacagcctgaaatcagattagattatggtttacttaacgaagcatatagcgaaaatccgtcctcagtaataagcagaagagcactttcagcattatctgctatcgatctagttgagttaaaccaatcttatatattcagtgacccagaattggaaaaacacatacttcctctattgaaacaaatttctgagcttacagctattaatttagatttaatcagcaatttcatactttggccaaaaaaagcgttaagaaatagcttagatacattaaatcaatcaggtcctataggaatagctcaatatggggtcaataatacaattactaggttattaccatctaaaaataaacaaagttatgactttgaatttacagttaatagtaatcagattcatttagcacatgctttggatgctacatattttcctttctatactgaaaatgcagaatattcagaccatccctatgcactaatgatggggcacttattaaatttttataaaaagtatagctaccaaacattgagtcagtgttatgatatgaatgaaatgaagatgattacaaaccctagcttatctcttatttctatatttgatattaatgagtatattccaatattagagtttgagaatgaattgtctagtggcactacgcgtaaatatatgcaatctttgttttcagagttaagcactcttgaccaaacagataggaatgaacgcatacaccaatataatattgagcttgagaaagcactcaaaaataaaaacaagatcagacatggtctagatttaggattagatgccttaggtatggctgtgccatttttatccactataaaaaaggcacttacataccaaataaaaagaacaaaatctaacagttcagccatacaagagacttttgattttattgaagataaagctttacgaggaaatatgaaacagcgtcaaatatctctcttaacaaaaatcaatagagttgctaggcttaaacgcagcttaaaatag

SEQ ID NO: 291408 - DNA, 171 bp, Morganella morganii
atgcaaaactatgcaccttatggatgtatgtcctatttcgttaaaaatagcgggatttacgggggctttttgactgtttactgcgcggtcagtttggcgtgtcaggcttgtatgtccactttcctgaataatttgacgcaggaagaatactggttgttagctgaaaattga

SEQ ID NO: 291409 - DNA, 1032 bp, Morganella morganii
atgctggcaagaagagatctcgttataaatgaaaaatatcaacgtggggctgggttgtggccggttggacccgctagttattttattgacaccattcttgaggggtatccattcccaaaaatttatttatatgaattttttaatagagatgaaagaataactagaagagagattgttgatgggcagcaacgtgttacaacaataaggaattttatcagtaataaatttaagatttctggtgatagtaaattttcaggattgtattttagggatttggatgaagagactcaagagaagttcatgacttactccgtctctgcggatgtaattagaagtgcaaatcgagctgaaattttacagatgtttaggcgaatgaatgcatatacattgccattgaatgaagcagaaaaaagacatgctgcatttacaggagagtttaaattttttatcaatgaaatttctgattctttaaatgaattttttgttgagtttggtgtttttacagatcgtgaaatattaagaatgaaagatgcagaacttttgtcagaaatcgttttgtcgattgaaaacggtattgtgagtttaagttctgcgcaactaaattcattatacaaaaagtatgatgctgagtttgcaacaaggcatgagtatttaaataaaataacagaagcattttcctttgttattgccgagcttgaaccattaagaaattcttttatgatgaaaagttatgctttacattccttaattattgccttaattgctgctaagtatggaatagctgaaatgagagaggattttaatgcagagcctattaatacttttacaacagatatcgatatggcaagagaaagacttatagcgctagcactggctcatgaagctaaagaagtagatggaccatatggtttttatgttaaagctacgacttccagcactaccaaagcaccaaatagaaagatcagaacagctgttatccttgaggcattaggtgttaatgtgagctatgataattatgagcatgtcttttga

SEQ ID NO: 291410 - DNA, 648 bp, Morganella morganii
atgagcatgtcttttgaacgactatctatgcagttaaaaaatcgagtgaatcgacttgattctgcatttgaacgccacctctttaatttagatcaaaagaggtatgttgatatttattcacttcaggaaggtttgatttcttctttatggcaagcctggtgcttatattgtaaaaatatatttttcggttcaatacgcggtgcaataaccactaatggtcaacatatagacacaccacaatatttacaattaactgattatgagttgttctacgtggctaaattattaggtgataataaagtggttacccaagttaaacaggcaaagcctcaaaatgaacctacatggggtgacgttaataagttaagtttaatctttacccattctaatacacctaactcaaattatgtatcaagccctttatctagctcttctctattgaaagatttgcaaatggtaaggaatgcttcggctcatataacaagtcacactattaagaatattaaagatgctagggttagatattcttttacaaagttcaatcatccatcagatacaattttttgggttgaacctgtaagcaaggattatttatggaaggcatggattgatgagataaaattaatatcttcgattatggctcaatga

SEQ ID NO: 291411 - DNA, 777 bp, Morganella morganii
atgggactcggtgccttctccaccctttcgcttgctgatgctcgagtgttaagaactgattatcttgcattattagccattggaatcgccctacgagttcaagctgtagttgcagaggaagagcagcaaattgccctggacagcattttttcgactgtcgccgccaaatggttcaaactcaaaagcgttacacttgattgcgcaaaagatattgggagctcattggagaaaggtgtatttcgtgccatcggtgagattcccgttcagcaaatcaaagcccgaacattggttgaatcgtttgggccaattaaagctcgtagagcgcttgaggctgtacgtcgaccagtgcagcgcattaatgagataatgatttatgccgtaaacactggtctgattgacaccagtccagtatctggtgttggaatggtctttgagaagctcaaaaaacaaaacatgtcgatgctgcggccagaagaattgctgaagctgatgcgttctttagttatgtcaaatctgtctgttccgactcgctatcttattgaatggcgactcctgacgcttatgcgcccttatgaggcctctagtgcttggtgggcagagatcgagctcgatgcaaagttctggacaattccggcagatcggatgaaagctaagcatgaacatgttgttttcttatcgcctcaggcattagagattctggaagtgatgaagccaatcagtgctcatcgtgagcatatttttccccagcaggaatgccccaaagcagccaatgaatag

SEQ ID NO: 291412 - DNA, 153 bp, Morganella morganii
atgttggatgaatatccagtgttttacgatctgacacgcattttgtgtgtagtatgtcagtttaatgacattatctttgcggtgcaggctgaggtatcggctgatattcataaatctgtcacaaaagtgacgcataatcgcggcactgtctga

SEQ ID NO: 291413 - DNA, 468 bp, Morganella morganii
atgaataaaagcgaaaaacaggaacaatgggcagcagaaagagtgcagtatattcgcggcttaaagtcgccgaatgagcaacagaaacttatgctgatactgacggataaagcagataaaacagcacaggatatcaaaacgctgtccctgctgatgaaggctgaacaggcagcagagaaagcgcaggaagccagagcgaaagtcatgaacctgatacaggcagaaaagcgagccgaagccagagccgcccgtaaagcccgtgaccatgctctgtaccagtctgccggattgcttatcctggcgggtctggttgacagtaagacgggtaagcctgttgatgataccgctgccttactgggtgcattagccagtctgaatgacctgtcacgggataatccgaagtggtcagactggaaaatcagagggcaggaactgctgaacagcaaaaagtcagatagcaccacatag

SEQ ID NO: 291414 - DNA, 951 bp, Morganella morganii
atgtctgaattagttgttttcaaagcaaatgaactagcgattagtcgctatgacttaacggagcatgaaaccaagctaattttatgctgtgtggcactactcaaccccacgattgaaaaccctacaaggaaagaacggacggtatcgttcacttataaccaatacgctcagatgatgaacatcagtagggaaaatgcttatggtgtattagctaaagcaaccagagagctgatgacgagaactgtggaaatcaggaatcctttggttaaaggctttgagattttccagtggacaaactatgccaagttctcaagcgaaaaattagaattagtttttagtgaagagatattgccttatcttttccagttaaaaaaattcataaaatataatctggaacatgttaagtcttttgaaaacaaatactctatgaggatttatgagtggttattaaaagaactaacacaaaagaaaactcacaaggcaaatatagagattagccttgatgaatttaagttcatgttaatgcttgaaaataactaccatgagtttaaaaggcttaaccaatgggttttgaaaccaataagtaaagatttaaacacttacagcaatatgaaattggtggttgataagcgaggccgcccgactgatacgttgattttccaagttgaactagatagacaaatggatctcgtaaccgaacttgagaacaaccagataaaaatgaatggtgacaaaataccaacaaccattacatcagattcctacctacataacggactaagaaaaacactacacgatgctttaactgcaaaaattcagctcaccagttttgaggcaaaatttttgagtgacatgcaaagtaagtatgatctcaatggttcgttctcatggctcacgcaaaaacaacgaaccacactagagaacatactggctaaatacggaaggatctga

SEQ ID NO: 291415 - DNA, 414 bp, Morganella morganii
atggctcttgtatctatcagtgaagcatcaagactaacaaacaaaagtagaacaactgttcaccgttacatatcaaagggaaaactgtccatatgcacagatgaaaacggtgtaaaaaagatagatacatcagagcttttacgagtttttggtgcattcaaagctgttcaccatgaacagatcgacaatgtaacagatgaacagcatgtaacacctaatagaacaggtgaaaccagtaaaacaaagcaactagaacatgaaattgaacacctgagacaacttgttacagctcaacagtcacacatagacagcctgaaacaggcgatgctgcttatcgaatcaaagctgccgacaacacgggagccagtgacgcctcccgtggggaaaaaatcatggcaattctggaagaaatag

SEQ ID NO: 291416 - DNA, 2628 bp, Morganella morganii
atgagtgaatctgtatttgcatacggaagccgctggttaaaggccgacttccacctccatactcgcgctgataaagagtttacttatactggtgaagaaaatgactatgctaaccagtatgttgcggcgcttgcgaatgcgggcattggtcttggggttatcaccaaccacaataaatttgatgcagatgaatttaaggcattgcgcaaaaaagccaaaaaatcaggcattggtttgttgccgggcattgagttatccatcaaggatggtcaggcaggtgtgcatactttagtggtattttcggatgagtggtttagaaacaaagaacaaaccaaccatattcagacgtttcttagcctggcttttgctggtattgcgaacttcgaagatgaaaatgcgcgctcgaaccacgatattgtcgaaaccgtgcgtgagctggataaatttcacaaagattactttctcatttttgcccacgtcgaagcgccaaggggggtgtggaaagaactcgcagcaggacgaataaaggatttatttgataacgcgacagtaaggcgtagagtcttggcttttcaaaaagtgcgtacccgtgatgaacgcgcgaaaatccagcaggcattaggtaatttatatccggctgaagtggaaggttgtgatgccaagaaccttgccgatatggcggcacgtaaagaggctagctacttaaagcttggctcattcagctttgaggcggttaagtttgcgttgcgtgataaagcttcccgagtctgtgccgagctgcctagctataaacattcttatattcaaaaaatccgctttgaaggggcgggtactttaggtggcacagaaatttccctttcacctgagctcaataccctgattggaattcgaggcagtggtaaatcatccgtattggaaggggtgcgttatgcgctgaatattccctttggtgataagtcgtcggatgtggaatataaagaggggctggtaaaacacttactgcgtagtggcggtaaaattaccatcgacgccattgatcgccgtggtcagccctatcaaatccgccgtatcttgggtgagcgccccgatgtgtatgtgaatggtcagttgcaacccggcgtgtcggtgcgtgaaacggtattgcaccagccaatctattttggtcagaaagatctttcctgtacgggcgctggctttgaaaaagatttgattgaaaagttgcttggcgacgcactggtgcccattcgacaaaaaattgatcagggccggcagcgggtggtggatgcgattaatcagattaagcgtcttactcgagcggcaacgcaaaagcaagaatggttgcagaaaaagcaagatgctgaatttaagctcaagttctatcagcaacacggtgttgaaactaagctacaaaagcaaattgattttgagcgcgatgagcgcaaagcacagcaagtcattcaaggtgctgagcattatctatccgagctcaatagttttgtggccagctttgaagatgagctaaaaaatcaggcgttgtataagtctgcccagaatcagatattttttgatgacttttttgcgacctaccagcagttgattgctggctttgatggcattaagcaaacgatactaacgggtcaaagtacggttgcactattacagcagaagctagctggctttgtacaacaaaagcaggcgctaaaagaagagtttgccgagattgaacgcaaactggccaccgagcttaagcaagccggtgcacaggcaattagcccgcaagagtttaagcagcttaaaaacttgttagaccaagccgagcaaatgttagccgtactcgccaaaagcgagcagcagtatgcggatttgaatcaatccctagagcgtgaattagcgcagcttaatgatctttggctggaggagtaccgcactattgaacaggtactgagcaggatcaatcgagctaattcgccccttaaaattgtgccgcaatttaaagcgaataaggctgccatgcttaagcacattcaagatttgtatcgcgggagccgtattcgtgaagcaacgttgcaaagtgtggtggatgaatacagtgatttcgcatctgcctatcgcgacattgaaaaactgaaaagcacgcttggcgggtcttttgataccttctggcagtattttgaagacaacttagaagccttgttaacctggcaagtgccgaatgtgtttactatcgagtatcacggcaaagcactggcgcaccactcgttggggcaaagggcatcggcgttgatgctgtttgtgttaagtcagcaagaaaacgacgtggtgatcattgatcagccagaagatgatttggacaaccaaactatctatgacgatgtcatcaagttgattagagagcttaagccttctacccagtttatcttcgcaacacacaacgccaatattccggtactgggtgatgcggaacaggtgattgcctgtgagtatcaagatgaccatatcgcattagttaacggcagcattgactgtgctgacgttcagcaacgcattgtaaatattatggaaggtggtgccgaagccttcgagaaacgtaagcaggtatatgaagcatggaaaccgaagaactcttag

SEQ ID NO: 291417 - DNA, 2430 bp, Morganella morganii
atggccattaagaaaaacgaactatactcctcactatgggccagttgcgacgaattacgcggtgggatggatgccagccagtacaaagactatgtactgaccatgctgtttatgaagtatgtatctgataagtataaaggcgacccatacggtatgattgtcgtgccacaaggtgccagttttgacgatatggttgcgcttaaaggcgataaagaaatcggcgataaaataaacaaaatcatcagtgtcatcagtgcgttagccgaagaaaacgatctcaaaagtgtcatcgatgtcgccgattttaacgacgaagataaactaggaaaaggcaaagagatgattgaccgcctttccaagctgataggcatatttgaagggctagatctctcttccaaccgcgcggatggtgacgatttattgggtgatgcttacgagtacctaatgcgtcactttgcgactgagtcaggtaagtccaaaggccagttttataccccatccgaagtttcacgcattctttcgaaagtgattggtattgatagtaataccccgcaagacgctaccgtttatgatccaacttgcggttcaggttcattattattaaaagcgagtgatgaagcaccgcgtggcttgagtatttttggccaagaaatggacaacgccaccagcgccttggctcgtatgaatatgatcctacacaacaacgccaccgcgaaaatctggaaaggcaacaccatttcagatccgcaatggaaagaagccaacgggcagctaaaaacgtttgactttgctgtcgctaatccgcccttctccaataaaaactggactaacggcattaatcccaaagaggatgaatttgatcgttttagctggggaattcccccagaaaaaaatggtgactacgccttcttgttgcatattatcaaaagcttaaaaagcacgggtaaaggcgccgtcattctcccccacggtgtattgttccggggcaacgccgaagcgcgtattcgtgaaaatctgattaagcaaggttatatcaaaggaattatcggtttacctgccaacctattctacggcacgggtattcctgcctgtattatcgtgatcgacaaagaacacgcacaggcgagagaaagtatttttatggtcgatgccagcaaaggctttatcaaagatggaaataaaaaccgcctacgtagtcaggatatttataaaattgttgaggtattcaccaatcaattgaagcgctctcgctttagccggatggtgccattaagcgaaatagtggctaatgactacaacctaaatataccgcgttatattgattccagtgaacctgaagacttgcacgacctcagtgcccacctacaaggtggtattcccaatcgtgatatcgatgccttagaacactactggcagatattcccaagtattcgtgcgaccttattcaaaccagcacgtgaaggttatagcgaagctttagttaaagcctctgaagtgaagaataccattctaaaccatgatgaatttaaacagtttgcgacgaatagcttgcagcattatcacgcttgggctcgcgcatctaatttagctgagatcagtgtaggtgatcagcctaaagcgttaatcgctgaaattggcgaaagtttgttgcaaagctattcacaaacaccattgctgagcaaatacgatatctaccagatcctgatggattactggagtgatacgatgcaagacgatgtgtacgtactggtacaagatggttggtctacaggtaaggtattgcgtgagttagaagtcaaaaaaggtgaaaaactgagagaaacgcctgacttagtgattggtaaaaccaagtataaagctgagttgatcccccctgcacttatcgtggcacgctattttgccgatgaacaaactaaaatcgataccttgcaaagcaaacttgatagtgccagtcaagagttagagagctatcttgaggaaaatagcggtgacgacggcctacttaatgaggcattgaatgataaagacaaagtcaccaaagccacagtcacggcacgtttgaaagttgccactgaccccgatgaaaaatcggcattaaaacaagctcaaaagctgtttgataatgaagccaatgctaaaaaagcgctaaaaaaagcccaagatgccctcgatttagcggtgtttaaacaatacccgaaactgagtatcgacgaaattaaaaccttgattataaaagataaatggctggcaacgttgcaaagcaatattgaggctgaaattgagcgcgtgactcagcaactggctaatcgcgttaaagagttggaagaacgctacagtgaaccattgccggatattactaaatcggtagaagagctgagtgagaaagtcgcaggccatttaaaagcgatgggtttggagtggtcactatga

SEQ ID NO: 291418 - DNA, 414 bp, Morganella morganii
  misc_feature (384)..(393): n is a, c, g, or t
atggcattaattgaaaaaatgactaaggatattcaacaaaaaggagggctgatcgtttcttgtcagcctgtcgataatagccctatggataagccagaaattgtggcagcaatggcccgggctgctgtaaatgcaggtgccgtagcagtacgaattgaggggatagataatttaaaagcaacccgcccccttattgatgtaccaattatcggtattgtcaaacgtgatttaccggatagtccggtcaggattacgccttggttaagtgatgcagaagcattagcgacagaaggtgccgatattatcgcttttgatggtacggatcgtgtacgtccagttccaattaatgagttactggcttgcataccccaccttaataaattnnnnnnnnnnggcttgcatacaccaccttaa

SEQ ID NO: 291419 - DNA, 1539 bp, Morganella morganii
atgtcgaacattaaaagtaatgatctggtaaaatttttaatttcttgtgttgcattgattgttttattttatacagcaactttaatgctaaagggtgcagggttaggttcaagtgaaagacaggtttttcttcttgttattcttattgtttttttgagtgtatctaaaaaatcattttggtttcttacttttccgatggtgtttatatatgctatttattctccgataggcagtatatttggtaagccaacataccaatatgtagcctctgtttttgcaacagacttacttgaaagtaaagagtttttttctcaaataccatgggttaattattcatttccatttttgataatcttagggatacttttttatcgctttctatgtgttagatattctatagagatatataggaataaaacaatgatgattataatgattattttctcaatgaataatctatcgccatcttattttttaaaggatatgatgaactcatcaaagtcagtttatgaagagttaattaaaataaatgaaataaaattaaaaagtgaatggggtaaatcttttgttttaaattccaaatacaatacatatattttaattatcggggagagcgcaaggaaagattaccaccatgcatatggatatccaatcaataacactccttttatgagtagctcaaatggtacattaattaatggtttgacatcaggaggttcaaatacagtatcttcattgagacttatgttgactaagccagatgttaataaatgggagcctaattatgctttggattttatagaacttgtgaaatctgcaggtataaaaacttattggatatcgaatcaaggctattttggaaaatatgatactccaatttcagctattgcatcaaaaagtgacagtaaattttttataaaatctggtgattactcatctaaaaatacatctgattttatgttgcttgataagattaaaaatatagttaccaaggataatggtaaaaagttaattgtggtgcatttatatggtagccatccaaatgcttgtgataggataaaagactataaaaaaatagtagatatacatgatgggaaatataattatttaaattgttacgtttcatcaataaataaaactgacgatctgatttttaatataaatgaatttatgagagataggtatttagaaaacaagggaacatattccatgatttatttttctgatcatggtttggctcatcgtgacgttgacggtgttatattatttaataataacagattaagtaaactacattatgatgttcctttgtttaagatatcatctggtgatgaaaatagaatggaatgtgattcatttaagtcaggattgaattttgtaaatggaatagcatcatggatagggatagagaacgaaaaattagataagaattatagtctgtttgattgtaaagatgatcctaatgattttgggctcaaacagcgtatcgagaagcgttctaatctctttgatcctgctattgatttgactggaaagtaa

SEQ ID NO: 291420 - DNA, 195 bp, Morganella morganii
atgaccgagacagaacaactcttagagaacgccttgaacaccttgttacaacagcaagagatcgttatcagcaatttatctcagcgtgtcggggaactcgagacacagaacagtcagttagccatgcaatacagggaaatcagccaacagttagcgactttaaccggactgctgaacaggtatcagaacggctga

SEQ ID NO: 291421 - DNA, 468 bp, Morganella morganii
atgagcaggattttaaatttagcgcagacgttctccgagaatgccaagcaagacagcgagattatgacggagaaagtgaaactcgctatcgaacagcacgagaacgacttgaaagcgcaactggcagacgccagcaggaatttgagggaaagtatccaagccgagcagacgaaattgatcaggcgtaccgtgagcgtgtggaaattaccgttcatcattctgggcgtactggtgctgatattggcagggatcagtctgtttctcacgtactggagcgcgaacgaatatcagaacctgaccgaatggaaacggtcagccgagatataccagacgcagagccacaatatcaaactgaccaactgcaccatggacgacaagagcaagcgaccgtgcgtcgccgtcgatccggcatatcagaacgaaaactggggcgggaagaacgaagcctaccgaattctagcgaagtga

SEQ ID NO: 291422 - DNA, 312 bp, Morganella morganii
atgacgaccaaacgcaccgaaactgtgattattcgcctgacacctgacgagaaacaatcgttacttttgcggaaaaccaaaccccgtttagcggagtggttacgtgaactagcattaggtcagaagccaaagcgtcagccgaaaagtgtagaccctgcactgttgtttgagcttaaccggataggtgtgaacctcaaccagatagcccgtcattgtcatcaggctccagtctcgatggagacggtcaatatcgccttagcgttacggcatattgagtcacagcttcgtgaggtgttcgaccgtgctggttaa

SEQ ID NO: 291423 - DNA, 189 bp, Morganella morganii
atgacgaagcaggaaaaagtaatcgtaaacatggctaagtttttacaggctcaaagtctgctcttactggaaaagctcaatgaactggattcggataagctcgatgcagaaactaacctttgcgaagaactccacgaacaagcagagtcactacaccaacaactgagcgcaaagctaggaggggagtag

SEQ ID NO: 291424 - DNA, 945 bp, Morganella morganii
atggcaacctatcatctcagcgtgaaatttggcggcaagggtaaagcccttgctcatgccaattacatcacgcgggaagataagttcagtcagcgaaaagatctcgaacacaccgagcacggcaatatgccggaatgggcgaaagatgaccccgcccatttctggcaggctgcggatgcgttcgaacgtgccaacggttcaacgtaccgggaaatcgagatagcactaccccgtgaactgaacgaagcgcagcggctggagcttgtcagggattttgtgaagcaggaaacgggcggtcaacatgcgtattcgtttgcgattcacaatccgcaagccagcattgacggcggcgaacagccgcacgcccatatcatgatgagccagcgtgttgatgacggtattaagcgcagccctgagcagtatttccggcgatataacgctaaatttcctgagcgtggcggcgcacgtaaggactcaggacacaatttaacgccgacagaacaaaaacaggcactgaaagatctgcgccagcgttgggaaagcacacacaattcacacatgcagcgacatggttttgaacagggttttattgataaccggtcactgaaagaacagggtatcgaccggaaaccggagcaacatttcggttttgaagcagccggacgactggatgatgctcaacggctggatatcagacgtaaccgcctgtcactcaccgaaaatacgctgaattttaccagtaattcagaatattccggtcatgactggctgaaagaaaacagcattgatattcagcggcaacatgaacagctgacccgaacgctgattcaggatatttcaaaagaacgggggcgtgatatgaaattctccgttcataaaaacggggatgtgggcatcaccaaagcctcacattctcacggaatgcgattcaaattagggttttaa

SEQ ID NO: 291425 - DNA, 834 bp, Morganella morganii
atgttgaataggatctattggatagtgctcctgctagcggttagctattactttccatatgctttatttgcagtggccttcattatcgctgaaatttatatcagcaaaacaggaaataaacacatcgaaccagatatagtctggggggatgattggcttgatacattcatatcaatgtgtgaatcacccgctgaagaagctttcctgaaaacaatgataaaagaattcaatttaaaaccaaatggttacgtgttgatttcaaatggaataaccttagagctacaagtaaaaaaacaacaatatcggtttgattttttaatgaatggcaagcagataattgaaatagacggaaaagcttggcattcgagtccggaacaacaagagaaagatcggattagagatcagcagtctattgaatggggatacagtgttttacgcataccggcaaaaacagtgcttttctcaccccaaaaaaccatatcgctagttaatgattgtttagataaaacacctgtatacgcagaaccaaaagacgacaaaacagaatatattttttccaggagccccatatctgttctggaagacttgtcatcagcctcatcttcactagctgattatatagaaaaagccgcagagaaaaggcgtgtagaaatagagatacgaagagaaaagaacagaaaagaaatagaagaaatgatggctatgttcgaagatgagaaaaaaaataataaaataaaaagatcattagctaaaactgtaaatattcacgacgcagtaaactcatttaacgctcctgacatcaaagaaaattcaaatgataacagcccaaaataa

SEQ ID NO: 291426 - DNA, 159 bp, Morganella morganii
atgaatgaaacagtggttcatcaagctcttggtgatgatgaatataaagcgcattattccattctactggcccatagcttccagcgagagttaaataaccagctggccagcctaatatcatatgatgcatcacgaggctatgctgatcaggatcgttag

SEQ ID NO: 291427 - DNA, 717 bp, Morganella morganii
atgatgacgatgattgaaattggttcaatcgcaatacagttgaatcgtaaagcaatcaaaaatttacatatcagcgtgttaccaccagatggtcgtgtacgtgtatctgcacctgtatctatgacagaaacagctattcgtatggcggtgatccgtcgtatcccttggattaaacagcagcagaataattttataaaacaaccccgccaatcagaacgcgaaatggtcagtggagaatgccattacttgtggggtcggcgctatcgcctcaatgttgtaacacatgtaggaaagcatgaagccaaattaggccgtgggcgattacatttgtatgtaagccatactgcaactgctgagcaaaaggctttagttctcactgaatactaccgtgatgcacttaaaaagcgaatagctgacttgttacctatttgggaaagcaaaataggtgtcactgtcgacgcttggggcgtgagaaaaatgaaaaccaaatggggcagttgcaatacgcaagcaaaacgtatttggttaaacttagaactcgccaaaaaaccaccagaatgtttagaatacatcctagttcatgagttagttcacctacttgaacgtaaacataatgaacgatttaaagcctatatggataagctacttcctgattggcaagaacgcaaagacttgctgaataaagcaccgttggcttacagccattggttgtactaa

SEQ ID NO: 291428 - DNA, 873 bp, Morganella morganii
atgtatcacaacgctcactttaaaatcctcctatcgactctaccgacttcattccaaacctcttttttcaaccaattcaatcacctaatcaactattcccccaccattggtctaatgggtaaaacaggggctggaaaatccagtctgctaaatgcgctgttccaatcccaactatcgcctgtgagtgatgtctccggctgcacacgccaagcccaacgcttcagcatgacgatgaacaaccatactctcacttttgtagatttacccggtgtgggggaaaaccttgagcgggataaagagtaccaccagctctatcgcaacttattaccagaactggatttaatcatttgggtactcaaggccgatgaccgagcatggtcttctgatgaacagtactatcgctttctcacgaagaaatgcggttaccaacctaatcaatttctatttgtcttgaatcaagccgataagatagagccttgtcgccagtgggatgaatacaagcatcaaccatcctcagagcagacctataacttaaaattaaagcaacaagccgtcataaccgcctttaagccacatcatccagtgataacagtttctgcggtcgaaaactatcaactcactgaattagcagagcaactcatacaggcgttaccggcgcaagccagtagcggagtagctaggcaactgaacacctcttaccggacgcaatcggtggagaacaccgcacgtaacgattttggtcaatgtgtcagtgatatcgtcaatactctgatagatatccttcccctgcctgcattaataaaaggaacgatgaatacagtcaaaaatagcatcgtatccgttgctaaatccctgtggagcatattcttttag

SEQ ID NO: 291429 - DNA, 645 bp, Morganella morganii; identical to SEQ ID NO: 83408

SEQ ID NO: 291430 - DNA, 627 bp, Morganella morganii
atgtctaatgataacgattccatgtataaccctgattatataagaatcatagaaaagaccttaacccgttccttaactgactatacacgtattatggcattacgtgtagacttacggtttcctgtcatagataaccacggggatatgccaacctgctttattaacctagataaagtgatgtctcgtttcattgattcattaaacgctaagcttaaacattatcaatacagtaaaaggcgaaaaggtcaacgtacttaccttaaccgattgcgttacgtatgggtaaaagaacaatccagttctgagctccctcactaccactgtgtattaatcttcaataaagacgcctactatcacctaggagactataacttagatgaaccgagtctaaggacaatgatcacgtccgcgtggtacagtgcgttacagctccaattagaccctatctcagacccgactggcgcattagtacactatcctaataacggtaagtattgcttaaatcagaattccttaacgtttgaagcggatcgagcgatgttgatgaataggctaagctacttagcgaaagagcactcgaaacattataatgcgaattcacgtagcataggttatagcctttcataa

SEQ ID NO: 291431 - DNA, 435 bp, Morganella morganii
atgtccgggcatggtattttaattgtggataacctgtttgagtcttgtctgttatcaaaagataccacagcggaaatgctcggtttgtgtttaaagaaatgcctgaaacaaagccggatagtagatccgggaaattatgatttctttgactataaaaaagtaaaagaaagatatgaagaatggattaaaaacatcattcaattgcgcggatataaaaataaaaaaacactttttaaacaaatgaatacatgtaatgcaaggcaggttggtgattttattacaatacgacctctaaaccacgttaagcttgaagcctggagcggtgatggtatatcagaaactgattatgtcattattccggtatcggcttcagatgaagagttgggtaatgccgttatcgaggcgttttcccgctgtaagggaaggaaattctga

SEQ ID NO: 291432 - DNA, 300 bp, Morganella morganii
atgtctattgttacttttaacagccctgtcaccctgaaaaacggcactgaaattaccgaagtgaccattactgattccatgcgtcaggctggcgctctgcgcggcctgaaattatgggaagtggcaaccggtgatgtgaactcattaatcacactgctgccgcgagttacccaaccccgcctgtctgaacaggatattgcaaccatgccgattgattgctttgctcagctggctaacgaggtggcgacttttttagcgccgagtgccccgggcgaagagacccgagaaccggaagaataa

SEQ ID NO: 291433 - DNA, 441 bp, Morganella morganii
atgaaaaaagaaaattttatctacagtgcaaaagataacgccatttatcctgtggcactgaagaagatttatgttgatgccggaacatggcctgatgacggcgctcccattacggatgctatggctgatgagttcagcaagcgaccagccgataaatttatggttaccggtgcggatggcttgccagcctgggaaatggagccgccgctgacaaaagaacaactgattgcacaggctgaaatgcaaaaacgaatcctgatggcagaagccggggagaaaatcagcgtattgcaggatgctgttgattttggcatggcgacaccggaagaagaatcagccctgaaagagtggaaaatataccgcgtaatactaagccgcgtcgatacctcccccggggctgatgtggtatggcctacaccgccggtttcaccggccagataa

SEQ ID NO: 291434 - DNA, 429 bp, Morganella morganii
atgatgaaatacagatttaatccggaaaacaacatgttctacccatacagcatgaaagaaagctacgaagcttccggggactggcctgttgccggtgctgatgtcagtgaggatatttaccttaaatttatcggagaggcatctgatgggaaaaagttgggttcagataagaaaggcaatccggtgtgggttgatattccgcctttgagtagtgaagaatatattgagttggcggaaatcaaaaagcagtcccttattaccgaagccagacaaaaaactcagttatggcagactcagttaatgctcggcattattacagacggagataaagccactctcaaagaatggatgctgtatgtacagaaagtacaggcggcagacgtatccgccgccccggatattatctggccggtgaaaccggcggtgtag

SEQ ID NO: 291435 - DNA, 189 bp, Morganella morganii
atgaatttattagattgcacggtaactaaggttatttctgcgccgatccatcgtatcagtgaacacggtgattactggtatgtggcagtagaaggcgagtgctgcggggatgtgtcggaaagccgcctgatatttaattcaaaagaagaagccgagaaagtagcagttggcttccggttcttggggtaa

SEQ ID NO: 291436 - DNA, 141 bp, Morganella morganii; identical to SEQ ID NO: 279071

SEQ ID NO: 291437 - DNA, 243 bp, Morganella morganii
atgaacccaactacacaatcatccaccacatcaacacacccagcgcgtcagcagcggattttgcgcttgcccgaggtaaaggccaaaacaggctttggccgcagtaccatttatgccctgatggccagcggtgaatttccacgttccattcgtattggtgcgcgtgccgtgggctggttagaaagcgatatcgaccagtggattgaaacccgccgtatcggtgctgcttatggccgtggataa

SEQ ID NO: 291438 - DNA, 1314 bp, Morganella morganii
atgcagcgcaacttactcaacgccctaatagcatggaaaagtcaacctgtgcgcaagccattattgatcgatggcgcaagacaaacaggtaaaacctatctactgcaagagttgtttgggaatacctttgccaacatccttcgtatcgacttccttgaaaacccagcttacaaagaagcgttcgatggctcgttgtcacctgacgagctagtaatgaacattgagttgttaaccaaccaagcgttcaatccagacaccgacttgctgatattagatgaaattggcgaatgtgaacgagccgtaacttcgctgaagtattttgccgaaaaagcaccgtcctattttgtcgcagccagcggttcaaatattggtttgctcaacaccttccctgtgggcaaggtagaacaatacaatttacgaccactgacattccaagaatttatttacgcatccaacgagcaagcactgatcaaagcatttgatagtcaagcaagcacaccggcggtgcacactaaattgatggataaactaaccgactatttttttaccggaggtatgccggaagccgtttctgcttggtatcagtttaaggattcaagcattctagagcgtgttgaaaaagtcacaaaaattcatgccgatttagttgaaggttatcgccgcgatttcggtaagtacgcgggcaaggtcgatgccacactgattgaatcggtgtttaatagcattccagcccagctatcacttgtcagcgatgagtcagttaaacgctttaaatttaagcatgtgcatgagcgtaaatctcgttatagcgattttgaaaccacgatccattggcttaactgctgccgcttagctttgccaaactaccctattgaaggattaccgaaatctccgttggcggcctataaaaaagacaatatggttaaactatttctgtttgatgtgggtctgctcaatcatatgctgggcagcagttataaagagattaagcaacaaaactatgaatacaaaggctatgtggctgaaaactttgtgcaacaagagctcactgccattggcgttgacccaagctattcatggaatgacgcccgcgcagaaatcgaatttattttggcgaccgatgaaggcgatatcatccctgtggaagtcaaaagtggtaaacgtacaagagcaaaatcgttggcatcctacgttgaaaaatgtactccaaataaaacctttaagttaacgggtacacaaggctcttcagcgttagaacaaaccaatatcgtgatgcctttgtatttcacgcagtatttaccagagagatggtaa

SEQ ID NO: 291439 - DNA, 1119 bp, Morganella morganii
gtgagcgaatatcaatactataaatttgagcgtctggatgggtatttagatgctaaagcacgtcaagcactcagggccatttcaagccgtgccgagatcagcgctacgtcctttcaggtgtattacacctacagtgatctaaaggccgagccttttgagctgatgttaaaatactttgatatcggtttttactatgccgattggggctcaatcgatgtatacatcaagctaccagcaggaacgcttccagatgcgttacttggcttttcaagtgatggacttcatattcacgaaaacgatgagtggcagttgctgattttttcccttgaggagtatgacgaatattttgacgatgagcatgccgaccaatttttccagcatttagctgggttacgcagcgggttaatgcaaggggattggcgccttgtgtactttatgtggctcaaaatgtttgattttaatgatgacgttgagcgagtgccgttaattcaattcgattttgagcacttcagtgaagaggagcaggcgtttgcagcgctgtatgatattcccttagcattagttaaggctctggccatggtgctgaaggagcaacccagtcacctagccaaacaaacccaatttcagtttgattcgtggctccataatctctcgcaagcagagaaagacacgcttttacgcacgctgtttgagcaaggccagctaacccgacaccaagccttagcgctgacgcgaaaagaacctgtcaacacagacgagatctatcagtattggttaacccccgaggtaatttctccttttattgagcaagcgcaaagtcaattacagcaagagcaatccgcagcactcgcaaaaaaattagctatcgaaaaagcggaaaaagaaaaagcgttgactgatatctacaatcaacgtgagcactactggcagcaatcacaagagcaagcggatcgaacttgcgccagtggttacgatgcggcatcacgctatctgcatcagctttttgaggcctatcagttcaaagctgatgaagcggcgtttgaacaacgctttaagcgcttttttgtggcgaataatagccgtaaagcactgttaaatcgcttgagtgatttgctttaa

SEQ ID NO: 291440 - DNA, 1350 bp, Morganella morganii
atgagttttaaacccattcaaaaactcgccgtgactcgcaccttaagttcaggtgagcaggttgcagtaggggtcttggcgcagaatcggcaaggcgtttttttccagtatgcagacagctatttgcagcagtttggcaacttatcaccttttaccttgcatgcgaacgcgcaagttcaagtcgctcctaaagcgccgcaccaaggtgtacatggcgtatttggagattgtttacccgatggctggggcatgctgttacaagatcgtatttttcggcaaaagggcatcctacctaatcaattaacggcgatggatagactggcctttgtcggtgataaaggcatgggagcattgtctttttctccggtgtctgagttttcagccaccacgcacgcggatattgatttagcgacgttaggcttagaagcacaaacgctgttcgattcttcgatgtcagattatatggatgataatcacgatgagttagatgggcatactcaacaggtgttggccgcattagtcgccggaggtagttcgggtggggcaaggcctaaggcacaaatttatatgcctgctggggaaactcagtattgtcgaaccttcgctcagcttggagatgaggcttggctgattaaatttacttctaaaaatctcgcgctcgggcatgaagaaggtttgtgcgaggcagtttatttacaaatggcagaacttgctaagtgtcaaccgccgcaatggcaactcattgaagcaccacctacaagcggtgcgtctgcttggttggcgcttaagcgttttgattatgtcactgaacaggccgacttaggcagaaagcgcagtgcaggtcgattgcatatgcacagcgcttgcgggctgctggatgcagactttcgaacgccaagtttagattacattgatttaattaaagccagccgtcagttgtgtaaatcgccagcggctggacagctgcaatttcgccgcgccatttttaatctgctgtcgtctaatcaagacgaccacagtaaaaactgggcgtttttgcaagcggatgacggtcaatgggatcctgcccctttttacgatgttacctacagcccgcatccattcaacgaacacgccactgctttcggcggttatggcaaagcgccatcgcttaaggtgatgcaaaaacttgctactagtgctggctttgcgaattggaatgatgcaaagcaagttattgaagaagtcgcagaagccatcagccaatttacgtatcttgccaagcaacaagggatcagtaaaacaacagtgtctgcgattgctaagacattggagcagcgtaaacaagaaaatgcagcgctttttctataa

SEQ ID NO: 291441 - DNA, 324 bp, Morganella morganii
atggatatgactgtatccatttggcctttgcggatgaaatttaccttacttgatgataccgatgtaagccacgcctatgcggcttatttacgtgagttacgaaagcaggcaaagctgtcacgagcggcgcttgctgagcgaagctgcgtacctgcggccaccattaagaaatttgagctgaccgggcaaatttcatttcgccaattgctgttgctatggcagacccttgattcgctagagaggctctatcaactcacacaacctagcaaagaacgggtcactatgccctctagtattgatgaggtgctaaaagatgagttttaa

SEQ ID NO: 291442 - DNA, 150 bp, Morganella morganii; identical to SEQ ID NO: 279073

SEQ ID NO: 291443 - DNA, 483 bp, Morganella morganii
  misc_feature (460)..(469): n is a, c, g, or t
atgggtaacagcaacgctgaacgaactgtttccattaaaatcggtgacggcagtgatgcgaaaaagaattttgatataaaactgagcagcgataaaacatcgccgattgaagtcgctgatgccataaataaagcggataaaggcgtctctgccagtgtggtaaaagataaacagggtgaataccacctggtgttaatcagtaaaacccaggggaccaattctgctatcagtatttctgttaccggcgatgatgatctggataaagccatcggcggaaaatcagaaaaacaaaccgacggtaccgttaaatttatcagtaacggcggcatgaagcagacgaccgcaccggaaaacgcactgttcactgtaaatggtatcgaacaggaatcacagactaacgaagtcaaagatgctttttttggtctgacactgacactgaaaaaaaccactgaaaaagacnnnnnnnnnnccgctgattggtga

SEQ ID NO: 291444 - DNA, 309 bp, Morganella morganii
atgaaggatgcggacggcaaaatcctcaacctgatggatgccggtacgggtctgaatattatgaatgtaagtaccggcatccatcaggttgaggattttgccgtccgcatccttcataccaaagaccgcattgctgtcaccggccacgtttttcacatatgcgaaatcagcagactgagggcgattcagaacggcttctttaccggtgccccgctcaatgatggtgacatagtgctgaccataagcattatcagtattgataaagtcagaattaccattgaggatattgctgttcatggtgaaatctaa

SEQ ID NO: 291445 - DNA, 303 bp, Morganella morganii
atgagaattatcgcactatcaaccttaaaaacattttgggaagacagcccagaatacattgacgctaaagagccaactttagcgtggtataggcatgcattaaacgctgattggggctcaccggcggatgtgaaacaggacttcagaaatgccagcatcctcaaagatgggcgtgtcgtgtttaacattgccggtaataagtaccggttagttgtttggatcaattatgcctacaaagtggtttacatacggtttatcggcagccatgcgcaatacgataaaattgatgtgcaaacgatttga

SEQ ID NO: 291446 - DNA, 339 bp, Morganella morganii
atgcaatttatgatgcgacttgcccccattacctttccaatcaccatgctggcagggcttggttggtgtattggcattgccttactcgaacaacctcatggtataggctacgcacttactcggcattgcctgatggtattcgtggtactcgctccttggttgatgctaaagctcatgttctacgtgattgtcagtttaggacgcaaactggggctcatcccgcctgcacgtccaacgcacagcttggggtatgaagaatcactctattggttcagagtattggcctttttcgatggcaaacgcagccgcatgccgaaaaggcccatcaggcgaaactaa

SEQ ID NO: 291447 - DNA, 1251 bp, Morganella morganii
atgggaaaactcacagcaaaacaggttattgcatacagcaaagccgacccaaaaaaatattcagatggtgaaggactatacttttgcgtccgcaaacagggctcgccttattggatgatccgctacaccacagccaaaggaagacgagaagcaaccttggggcaatttcctttaatgtcattggcagacgcaagaattgctgctgcttattttcgaaaagaagtacgtgacggtatagatcctcttctagaaaaacagaaaatcgagttacctgacattgaaaccgtggatcaactgttccatgactggtatcgaaccgatctgagtcgacgactaaagcaccccaagattccgtatcgggtttacaccaaagagataagcccagtcattggcattaagtgtatttctgaggtgaccgcacgcgatgtgcgcgaagtattagagcgcattcgagaaagtaaccgccctaccattgccaacgataccttgatgtacatgaagcagctgtttcgacatgcgataaagctcgacttaacgctgaacaacccagccgcagccttcacggtggacgatgccggtggcgtggagcccagtaaagacaggatgctcaacaaagaggaaattcactacgcctttagcgtgtttcatacccatatcaatagctttggccgcgacaactacctcgcttgctgcctgtttttggtattgggcgtgcgcaaaagcgaactgtgcgaagccatgtggcgtgaaatggatttaaccacaggcgtgtgggatcttcccaaagaacgcagtaaaactggcgtgccaatcagcatccctttaccgcgccaagccattgcttggtttaacgagttgcaaatccgcgcttgtggctcgccttatgttttcccagccagacgagcaagccatcgtccgcatatggggccagatacgcttaaccgtgccatttctaagctctttggtcgcgagcctgggcgcaaaaagcagcctcccaataaaatgggcaaacttgaacacttcaccgtacacgatttgcgccgcacctttcgcagccttgccgcctctttgggcattgcaggcaacgtggccgaacgctgccttaaccataagctaaaaggcgttgagggcatctacgaccgccacgattactttgaagagcgccgtattgcccatcaaaccgtggctgatgtggttgaaccgctagtgaactttgagccacattcgcaacagcacgcaggagggcattaa

SEQ ID NO: 291448 - DNA, 561 bp, Morganella morganii
gtgcaccgtctgggttttcctgatgatatcgaatatgacgaattaccgggtaaaagtgacggcatggaagaatcatcttctgcccgtgaccaggaaaagcgggataaaaaaccgaaggaatgcacatcctgtcactacatgaagcctgccggtgtttacgtctgcccgaaatgcggctttaaaccgctggccggtgaagacgttgatgttgatacctcccgtaacatcaaaaaaatgggtaaatccgagaaggtttacaccacaaaagacaaacagagcttttactcccaactcaaatattaccagaacatccgcgccaccgaaggaaagccggtcagtgacggatgggtctcaaatactttcagagataagttcggtgaatggccgcgcagcctgcatgccacaccgcaggaaataaccccggaggtatccaatttcatcacacacaaacgtattcagtgggttaagcgtaaacagaaagccgaagcactgatgccacagagaatcgcagatttaaaacagcaactgaataaaaacgcacagcagggagaattattgtga

SEQ ID NO: 291449 - DNA, 486 bp, Morganella morganii
atgttaactatcacaccaaattttgcacaggaaagagcactgcggttattgcgcagcgagtggaaatcacaccgcacgttcatgatcagcagtccgaccggcagcggtaaaacagcgctggctgcattcatcacgcacggttgcaacagccgtaatatgcgggtgatgtttgttgtgccgtatacgatcctgattgaacagaccgcagcacggtttatcgattacgggattccgatggaagatatcggttttgtctggcgtgatcatccgaactatgaccctacacgactgatccagattgcctcagccgatacgctgatccgccgtgaattcccggacaacatcgatctgctgtttatcgatgaggcccatctgcgccgtaaaaaattgctggaagttatccgcgataatgaatttaaggtgattggcctgtccggcacaccgttttctccgttcctggggacgtattacgaaagactgatctaa

SEQ ID NO: 291450 - DNA, 189 bp, Morganella morganii
atggcgcatgaaattaaattagagacggtgaccaataaagccgctcaattaaacgccttattgttcacgatcagtggtgagttcacgagtaacccaataaccgacaatctcatcgaactgacccatgagttatctgacagcgtcgcctgctggttgattgaagaaaacgcacatagaaaggagtcgtga

SEQ ID NO: 291451 - DNA, 249 bp, Morganella morganii
atgatcttgattgcaaagcccgtttaccctccccaacgcaatcaaaagcctgataaacagagaaatgaaattattggtgttattagcgatatcaacaacgctgaattatcaatacagcaacttaaaagtgatttatacgaaaacgaaccagagaaagaaataatattcgcacagcttgatttagtgacatctaagttaagtggttcattagaccaactggaaataataacaggaaacaatcatgactaa

SEQ ID NO: 291452 - DNA, 3177 bp, Morganella morganii
atgacacaaatcacaggccgcaaaggaggcggtggcagcccgcgcacgcccgtcgaacagccggacgatctacagtccgttgccaaagcaaaattgctgattgccctcggtgaaggggaatttgccggtgagctgaccgggaaggctatttttctggacggtacgccgctgctgaatgctgacgggtcggaaaactttcccggcgtggtgtgggaataccgccccggtacccaggcgcaaacctatatacaggggatgccggcggcggagaatgaaatcaccgttggtaccacggtacaaagcagtacaccgtgggcacacgcattcactaacccgcagttgtctgcggtccgcgtacgcctgaaatggccgtccctgttccgccaggaggataacggggacatggtcggcaacgaagtgaaatacgccattgatttacagactgacggcgggagctggaaaaccgttgtggacggacgtgtaaagggcaaaacaacttccggttatgagcgtactcaccgcattgatctgccacagtcggccacatcctggacactgcgtgtgcgtaaaatcacggcagatgccaacagcgcaaaaattggtgacaccatggtgctgcagagttacaccgaggtgattgatgccaaactgacctatccgcacaccgcgctgctgtatattgagtttgactcaaaacagtttaacggctccatcccgcaggtcacctgcgagccgaagatgcggatcatccgtgtaccgtcaaactatgactcggagcaccggacgtattccggtacctgggacggttcgtttaaatgggcatggaccaataacccggcctgggtcttttacgatatcgtgatttccgatcgtttcggcctcggtgaccgtatcaaaattcagaatatcgataaatgggagttgtaccgcgttgcgcagtattgtgaccagccggtaccggacggcaaaggtggcagcggcactgagccgcgctatatctgtgatgtgtatgtgcaggatcgcaatgaagcctataccgtgctgcgggattttgcggccatcttccggggcatgacctactggggcggaaaccagattatcaccctggcggatatgccgcgcgacattgattacagctacaccaaagccaacgtgctggacggtaaattcacctattccggcagcagcagtaaggcccgctattcctccgcgctggtgtcgtactcagatccgctgaacggttatgctgacgcgatggagccggtgtttgaaaatgagctggtttaccggttcggctttaatcagctggaaatgacggcgatcggctgtacccgccagtcagaggccaaccgcaaaggccgctggggcatcctcaccaataacaaagaccgcgtggtgacattcggtgtgggactagacggtaatatcccgcagccgggctacatcattgcagtggcggatgaaaacctgtccgggaaagtcaccgggggccgcgtcagtgcggtgaatggccggagtatcaccctcgaccgcaaaccggatgccgcgccgggtgacaggctgatgctgaacctgccgtccggtaaatcacaggcccgcaccatccagatggtcacggataacgttataaccgttaccacggaatacagcgaaacgccggagccggaatgtgtctgggtaacggaatcagacgagctgtacgcacagcagtatcgcgtggtgagcgtgactgagaatgatgacggtacgttcacgatatctgcggccatgcatgatccggacaaatacgaccggatagacaccggcgcggtactcgatgaacggccaatcagtattattccgcccggtaaccagttcccgccgaaggatatcactatcagctcttattctgtcgtgaaccaggggatcagcattgaaaccatgcaggttacctggtcaccggcggagaacgcgattgcctacgaggcgcagtggcggcgtgatgacggcaactggatcaatgtgccgcgtaatgccaccacttcatttgacgcgcccggggtctattcaggccgctatctggtgcgggtcagggcgataaatgcagcggaaatctccagcggatgggggtattcagaggaaacccggctgactggcaaggtgggtgatccgccgatgccgctgaacttccgggcatccacactggtattcgggatcaaactgaactgggagtttgggaaatttacggaagacaccctgaaaactgaaattcagtacagcaaaaccaacgatggtcaggatctgttgctgctggctgatgtgccgtacccgtcccgctctcacgaactggccggtctggccgccggtaccgcgttttatttccgcgcccgcctggtagataaaaccggcaatcagtccccctggactgagtttgtgcgcggtgtggccgagtttgatacagaggctattctggatgatgttgaagcgatcctggaagactcaaaaattattcaggaactcagcaataacgacatggactcattcgaggccattatcaacaatgccaacaacacctatggccagtggatgcacctgcagcgtgaaaatggtgtgatgaaggctgaaattatccgcgttgataactatgtggtgacggaaaccaaagcgcttgctgagcaccttgatgcagtacaggccactgcagataaaagccttgcccgtgcgcagaactccatcaaagccgagtatgacatggagaaaggcacggcttcggcaatctggaagtcgttggtcagtattgtgtatgacggcgtgaattatgatgccggtatggtgattggtgcagagctgaaaggcggtaaggtcgataccatcatgggctttaacgctcagcagtttgcgttttataacccggtgaacgggaaaatggatctgttcatgtatatgaaggacggacagattttcatgaacgaagcctttattaacaaagcctggctcaacagcgtggttgtcactgacaaaatacagtcggaggaccatgtaccgggacagcaggggtttattctggatgcaaaggctaataaattcgaattctttggcgggacaacaacaaatggaacctctattacagcagacggtattaaggtgtatgacaataaacgactgactgttattgttggtgatatatcggggtattaa

SEQ ID NO: 291453 - DNA, 726 bp, Morganella morganii
atgatgcgtaaaaacattcaggcagctatttttgcacacgcagagcgtgaatatccccgcgagtgctgcggagtaatagctcaaaaatcccgtgtggtgaaatactttccctgccgtaatatcgcggctacgccggaagagcattttgtattatcgccggaggattacaccgctgctgaggattggggtacggtgaccggtattgtgcacagtcacccggatgctaccacccagccgtcagaacttgataaagcacactgtgatgctctcggcataccgtggtatatcgtcagctggccggagggggatctgcggactgttcagccgcgcggcgagctgccattacttggtcggccttttgtgctcgggtttacggactgctgggggctggtgatgagctggttccggcaggaacacggtattgaactgccggattaccgggtggattatccctggtgggagcagggtgagaaccgttacgccgataactggcaggaggctggatttattcaggttgacgacccgcaacccggtgatgtgatagtgatgcaggtacaggcacctgtcgctaatcatgccggtattctgctggatgataatatgctgctgcatcatttgtacggacacctgagtcaacgtgtgccgtatggtggttattggcgcgaccgcacagttacggttttgagattaagaaagtcattgtttttaaaaaaaatacatgaataa

SEQ ID NO: 291454 - DNA, 594 bp, Morganella morganii; identical to SEQ ID NO: 279398

SEQ ID NO: 291455 - DNA, 669 bp, Morganella morganii
ttgcggttccatgcatacaatatcccgcacacagaggcagagattactgccgctggtggtgatccggaaaaattaccggcgaaatccatctggtggcagggtaatgaataccgcgcgtggccggtacagattgacgggattgaggcatccacaaccggatccggtgcgcagccgaagttatcggtggcaaatctggacggttcggtcactgcactgtgtctggcatacgatgacatgctgaaggcgaaagtcacgatacacgataccctggcgcactatctggatgctgataatttcccggacggcaatccggcggaagatccgacacaggaaaaagtctcggtcttttatatcgacagcaaatcctcggaaaccaatgaggttatcgagtttgaattagccagtccgatggatttgcagggggtgttgatcccgacgcggcaactgcatgcaatgtgtacctggtgcatacgcggcaaatacaaatccggtgacggttgtgattatgtcgggcagaacgggtatttcgataagcacggcaatcgtgtggatgatccggcacaggatcagtgcagcggcatgctgaacacaggttgcttcccccgcttcggcaaaaacaatccgatcccgtttggcggctttccgggaacctcattactgaggaaataa

SEQ ID NO: 291456 - DNA, 804 bp, Morganella morganii
ttgtggtttgcgctggccgtggtggcgctgctggtactggccatgattgccgggccgtggatctccccgcatgatccggatctggtggagttatcaaaccggcttcaggaaccggatagtcagtactggcttggtactgaccatctcgggcgtgatattttttcccgtctgattgccggggcgcggatttctctcggcactgttgctatcacgctggtgattattatgacgctcggactggtgatcggcggcattgccgggtttaccggcggacggacggatcaaatcatcatgcggtttaccgatgtgttcctgacattcccgacactggtgctggcactgtttttaatcggcatcctcggtaccgggctgacaaacgtgattatcgcgatcgcattgtcacactgggcgtggtatgcgcggattgtccgcgggatcatcctctcgctgcgccaccgggaatttctgctggctgcacgtctgagcggagccggtaatgtgcggatctttttccggcatctgtttccggccaccatttcacagctgatcgtactggcgactctggatatcggccatatgatgctgcatgtctccgggttgtcattcctcgggctgggcgtggcggcacccaccgcagagtggggcgtgatgatcagcgatgcccgtcagtttgtctggacatcaccgatgctgattttctggccgggtttaattttatttttcagtgtgatggcgtttaacatcctcggggatgctctgcgtgatcgtctggatccgacactgagggccgggacatgtcattaa

SEQ ID NO: 291457 - DNA, 162 bp, Morganella morganii
atgagcaaaattaacaaaactagcctgcctataggtgacagtatgcccccgggtctagccaaagccatctatgaacaagccaaacagcagcaacagtcgactaacacgcaaactaatcagtcccctcctaaatccagcggggataacaacaaaaaccagtga

SEQ ID NO: 291458 - DNA, 780 bp, Morganella morganii
atggatattgagctttttaagttcgcttttttccctggatttgacgataagataaaagatcttgctgagaatcttgctgataaagaaaattgggatttttctacgggtggtgggaaacattccattttgaaaaactatatgttccacactttcagtaaaataaaagaagaagataagatagttttctccgctgggaatacacacgcttgcttcaatacaggccttgtgactagcgcttgggaggagattgtcgcctttttcgaaaaaaataaaaataaaaattcaaagcagccttattatttcaaaggtttttttaaaataagccataggaatataaccgacaagtttaataatacaccgcaggttgctgactattttaaaaacccagaagattttatatttaacccccacctggaaataaaagcggacatagagcatattatatctgacaatatagagcgcttccctgcaaatttcaaaaccatgcccgaaatgcaagtgaggaccatgttggatggggcgatcaaaaccactgtaaataggcttaaaacaaattataccattgctgttccacaatactacggtgggagcattcagttgcttattccattacatataacttactcaggcgcaaatccggatttagctctggttgtaaacaagtctaagggacaacaattttacacatctagaacgtgtctaacgttagagatggcatataacaatgccaggctaatagttaagccacttagtagctggctgtccgctgataaaatatag

SEQ ID NO: 291459 - DNA, 138 bp, Morganella morganii
atgggtgatgattatttgaaagacgaagacgaagacgaagctccatcattagacgagatttatggtactgaagacggagatgaatacacttctgatgaactgtttactcgtgatgtatttagagctaatgacctctaa

SEQ ID NO: 291460 - DNA, 216 bp, Morganella morganii
atgacagagctggaaaaacagttgctgagcgcattagagcagctacagcaggactactcgaaaaggctggacgagtgggagaacgccttcgtggaatggcggacgatgtctggtcttatgcaacgggagaacgcggcgctgagcgagcgcgtcacggtcttgagcaggcaggtgcagaatttgagcgatcagctgcgccggttgtcgcaaggctga

SEQ ID NO: 291461 - DNA, 273 bp, Morganella morganii
  misc_feature (259)..(268): n is a, c, g, or t
atgattgaaaaatataatcaggaagaagttaaaggtcataactttatatcagatccttattttgaagaatggggtaatggtgactgggaaaagggagagccaaataaatacacgaagaaaaaagaagggaacagaacttacctttatatcagtggcaaaggtagtgtttcacagtctgttattttaccgaaaaaaagttcgggggagtcaacagttcctcctttttattcattatcgtttgattactctgttaaaaatnnnnnnnnnncttga

SEQ ID NO: 291462 - DNA, 444 bp, Morganella morganii
atgcaaaaacagacattccttctcaggaatatacagatactcagaaatctcaaggcagagctcgacaatctcccgcttaacgaagaattccccctcgaagtaaaaatatccgatccgaagcgaacccttccccaaaatgacatgtttcatgcgctgtacggcaacgtagcagagcagggcattgtatgggctggtaatacgtggggattgcaggactggaaatgtattttcgtatccggacatgcaaaggcgacaggccgtgacgggacgcttattccgggacttgagggagagattgtaccactggcaagagaaagtaccgcaaacatgagtaagaagcgcatgacaagcttaatcgaatattcgcaggcgtgggctataggtgaaggtataaaaccccgcgccgcgcgatacaggtttaatcattacggacatcaggaatag

SEQ ID NO: 291463 - DNA, 753 bp, Morganella morganii
ttgttctccgaagagggcgcgcaggagtttcaggagtgggtgcagtttttatgccaagagcttgaaccggatcacggtgactgtggctatacgctggttatgccgcgtgattatgagctgtatatgccgcaagaatatgaactggcacaacgttatccggcaatggtcgtcaattcatcagtctatatagcagcctgtcaatatgaaaattctatccgtagtgtgcaatggctgacattcctggctgaccgttatattgaacgcctcggtggtgaaactcatgtccgcaaaatattatctgctgatccggaaattaccctgacccgttactctggcgggttgattatccgggccggtgactatccggatctcacaccgggcacaccgccggaaagttattaccggattaatgaacttatccggccaatccgttatgtgcggcaggaaggacactctctgcattttctcggagaggggcattttacaggcgaaacaaccaggcagtggtatgagcgttatgaccgcggtccgatggtcgtttctccgttgtatgcgggtgaaccggcccgggttgacggttactggacgaccaaaggccgcgagaatgtggagaccatttttcttcagggcacaccggcgattgatattgaaggcaatccacccggacggacagaatggcggctgatccgtgaaattccgcacgatgatgaacgggatctgaccctgctggagcaaaaactcaatggccggtaa

SEQ ID NO: 291464 - DNA, 243 bp, Morganella morganii
  misc_feature (171)..(180): n is a, c, g, or t
gtgaaaattgtgttcgaggttaatggaaagaaagtcccactaaaatctttaaaatacataagcaaaaaagatcaactcgaagtaatgaaaaactggttctttgaaaactttgaagatccggcaaatgcttgtccatatgaaagtagagaaggtggctatgcttacatatannnnnnnnnnattttggccataaattgcttaataaccttctcctgcgataaaatggatgtatccaaacggtag

SEQ ID NO: 291465 - DNA, 1521 bp, Morganella morganii
atgaatgacgctcgctacccaaatatttcggctattgataacaggttagctgagcttgaaaacgaaaagcagcggcttctcgcattaagagaggctttgcgtagcgctcaaaaccagcgttcaatacagacattcaccccagaacaaaaagtcgccctattcagacaacgatttcgtggacgagaggatatcttcgccaatcgttggcaaaaccaacagggccgcagtggctattccgtagcctgtgataatgaatgggtaaacggggtttgcaacaaaccccgcattaaatgccaagactgttcacaccgaaagtttagcgaactaaacgagcccatcatttacaggcaccttgccggtcatcaagtggtggggctgtataccttactgaaagataatacgtgctatttgttggcagccgattttgacaaaggctgttggcaagaagaagtcaaagcaatgtctaaagcgtgccaagagtttgatattccgcacgcgatagaaatctcgcgctctggcaacggggcgcacttatggatcttttttgaaaccaatatccccgctaaccaggctcgggcactgggtttcgctttgcttgataaagccatggaaatatttccaaatctttcgtttgactcctatgacaggctctttcctaaccaagatgtccttcctgaaggcgggtttggcaatctcattgcgctaccacttcaaaaggaggctcgcctttcaggccgcagttgctttgttgacagtgacctgaatgcgattgacgatcaatggcagtaccttgctgagcttaaaacgctcacgcaatcgagtattgatcaactcataacaaccatttcacccaataccctattactatccgaacaggggataacagacaaccgcccaccttgggaaatcacagctaaagccgcaccaataacattagagtctttgccaaaaaacgtgaccattaccttggccaaccatatctactttttaatgagcgagttacctggaccactactggcaggactaaagcgattagcgagtttttctaatcctgtgttttttaaaacacaagcgttgcgcttttcaacccatggcattccgaggtttatttcctgtgctcgtattgaaaacggttatctagcactaccgcgaggctgtctcgatgacgcgattgctttgctacaagagcacaatatttcgccactgtttgacgataagcgtgaaaccggcaaaccattattaaaacttacccctgagttcactttgcgaaagaaccagcgagacgcagtggccgcaatatctaaacatgacttcggtattttgcatgcgccgaccgcatttggaaaaacggttactgccattggcatgatcgtaaaacgcaaagtaaataccctaatactggttcatagccgacaactgcttgagcagtggcaagagcgattacgcacgttcctaccagaagtaaccattggcagtataggcgggggtaaaagaaagccgagtggcattcatcaacaataa

SEQ ID NO: 291466 - DNA, 849 bp, Morganella morganii
atgattgcaattaccggtgcgacaggcctcctgggtcagcatgttattgaaaatctgctgcaaacagtcccggcaggccagattgtggcgattgtccgtaatccggcaaaaggtgcatccctgagccggaaaggaatttctgtacgtcaggctgattacaatgatgaagcatcattaatcagggccttacagggagttgagaaattgcttttgatttcttccagtgaaatcggacagcgtgtcacgcaacatcgtaatgtgattaatgcggcaaaatcagctaatgtgaaattcattgcttacaccagtttgttacatgccgacacctctccgctgggtttacatactgagcatgtggaaacagaaaaaatgctggctgattccggtatccggtatgcccttctgcgcaatggctggtatacggaaaactatctggccagtgtacctgctgcacttgagcatggtgtctttattggtgcggccggagaaggcaaaatcgctttcgctgccagagctgattatgcggcggctgccgcctgtgttatcagtgaagacgggtatgcgggtaaggtgtatgagcttgccggagatgaggcccggacattaagccacctggcgaaagaactgactgaacagagcggaaagaatgttgtgtatcagaatttaagtcaggctgattttgttgccgcactgaaaaatgcgggcttgcctgatgagttgtctgaaatgcttgctgactctgatgttggtgcgtccgtaggaggattattcgatgatagtcatactctgagtaaactgattggacgaccaacaacaacacttgctgagagcatcaaagatattctgtaa

SEQ ID NO: 291467 - DNA, 222 bp, Morganella morganii
atgcgcatgaacagcgttccgcgtagtattgctgaacgtgccggtgaagactttaaggctcgaactgaagccggtgcagaaaagactctgtcacctcgaaaagcaagcgaatatctgaagtctttgaaaccggatgattgggcgcgtttgaaacctgataattcctcgctgtccggcgaagactatttgaaagtatggaaacggctttcaggtgaagcttaa

SEQ ID NO: 291468 - DNA, 279 bp, Morganella morganii
atggaaagccatgagtttgatgaatgcttgaactggtggagtaacaggatcgttaatcagaatgcctggaaagaaagtgcctcagagattattaaatactccgaaagtggacaactgattgacgtaaatttagatagaaaaaatcctaatagtctcgaagtgcttgaacacgaagagcctatggatttgatagagaaaataaccacgaaagaagagtctcttttagcgatcttagaacagattaaagccgaaataagcactcaaggtatctctaaatga

SEQ ID NO: 291469 - DNA, 225 bp, Morganella morganii
atgactcgtttaactttagttggcgcgttatatattacctttatctgcctaatcccggagttcatgcgtgacgcaatgaaagtacctttctactttggtggtacttccctcttaatcgtggttgtggtcatcatggactttatggctcaagtgcaaactctgatgatgtcaagtcagtacgagtctgcattgaaaaaagcaaacctcaaaggttataaccgttaa

SEQ ID NO: 291470 - DNA, 159 bp, Morganella morganii
atgccacggaaccctttaacactgatcatcattgctatcatcctgctgactactgctctgttggcgggttgttatctgtattcactcccgaattactgtaagccgctgccgggcaattcgctggatggtgtgattcattatgagtgtgaagcaccatga

SEQ ID NO: 291471 - DNA, 231 bp, Morganella morganii
atgatcaaagtgccgattgatgacaatacccgggcgggcatctattcatttgtctataacgtagggcccggtgcgttctcgcgttccacgatgctgcggaaactcaatgccggtgatatcgcgggtgcctgtgacgaaatgaaacgctggacatttgccggtggtaagcagtggcaggggctgattaaccggcgcgaaacggagaaagcggtatgccacggaaccctttaa

SEQ ID NO: 291472 - DNA, 138 bp, Morganella morganii
atgagcctgtcgtattccaatgctcttattgttgctaatggtaaaaagccgcacacagctcttgtgttaagtgataacgaggtgattgataccgtgacggcgtgtatgaaaaaaggccgcaaaacgtgcagcccttga

SEQ ID NO: 291473 - DNA, 471 bp, Morganella morganii
atgccaatttccatgtcatctggagctggtaagtctttgtttttgatggatgtttttgttaaaaattatatttcaaaaaaatcatatttaattattgatgaacccgaattaaatttacaccccaaaaaccaagttaaaatggcagagcttcttgttcgattatcaaattttggggttaaagttataattacaactcatagtgattatattgtaaaagaagtaaataatagaattatggcaagttcaattggctcaagtgaaatacttgatagtttaaactatactaaaaatgatttaataactaaagatagagtaaatgcattcacaatttcgaaggatggtattatttctgaggttgataaagatgagtttggtattaatgcaacactatttgatgaagccattctagatgttgacaaaagggctgaaatccttatcggtaaaatgatgaggttagccaaagatgattaa

SEQ ID NO: 291474 - DNA, 186 bp, Morganella morganii
atggaagataaacccatcaccgttagaagcaaacacaaagggtacatcaagcagtccggcataatccagtccctgctgcatccctttactgatggcgtgcttattggctttggcttcgataaccgccaatggcaggttaggcttgtgatacagtacgatatcggcagatttcactttgatacgtga

SEQ ID NO: 291475 - DNA, 294 bp, Morganella morganii
atgtatattgttgtcacggtattccacggtaccgttttcggtcatgatggtgctgttcccctcgataaaattttccgtccggtagccggtgataacctgttgcgcatctttgagcagaaaaatccggctgatagtcgggcgcgtttttttcttaccaacataatcggcagaaaagcggtattccatactgatggcatcagcagtttccgctccggtgacgcgtatatcaaaggtcatgccgtattgcatacttctgcggatgaaatcatagtgagtgatttgcccgcagggtga

SEQ ID NO: 291476 - DNA, 318 bp, Morganella morganii
  misc_feature (290)..(299): n is a, c, g, or t
atgaaaacaaaatcactctttcttctgataccgttattactctcaggttgtgaccagacggtggtaaaagagatcggcattgaagaattgtcggagaacctgaacaatccggaatacattattatcgatacccggccggacagtttatattttggctttaaagataaaggcgcggcccgcggcggccatattaaaggtgcgatgcaatttaccaccggctggctggattttatcgatgagaataagttcgatactttcgttgaagaaaaggggatttccaaagaaaaaannnnnnnnnntggtattttacgacagtga

SEQ ID NO: 291477 - DNA, 438 bp, Morganella morganii
gtgattcaggaaaaactgcgggaaaaattacgtgaggaagcatcaggtgtttacagtgtcaccgcatggttctggcacaacccgtctgaaatacaggatgagggacggatcatgttcacctgtgcaccggaacgggtggatgaactgattgccctgagtgaacgcgtactgacggaatttgagcacaacgggattgatcggcaggtattcagaaataaaatcgttcagagccgcaatattcttgagcgaacccataattcggtgaccggcatactggaagatattgaacgcagttatatgctgaccggcggcccgttattaatcggcgcttcactgcgggcaaatgaaaaggcatctccggaagagactgaaatggttttacaggactttttacgtcatgccggaaaattccatgcggtattactgcctgcggagtaa

SEQ ID NO: 291478 - DNA, 303 bp, Morganella morganii; identical to SEQ ID NO: 275434

SEQ ID NO: 291479 - DNA, 240 bp, Morganella morganii
atgtatcgttacggcaattcaaagaataatacggaatatgattttgtccggaataaaagtcggggcggactggatgaaaccagtaatgagatcaataacctgatctatgaacaaatgattgaaattctctacaaacccgcatatatgggtgaatcaaggcaccccggtaatattatgccatcactggacagtgtcagaagagaaatggcaccggaactggtgctgaaactggttaaatag

SEQ ID NO: 291480 - DNA, 159 bp, Morganella morganii
atgaaaatcccggtcagaatcagtaatgcgtacgtaaaaggcagtgaaaaaaagacacacagtgtaatgagtaccggtgcaatcgcagcaccggtattattcagcgtcattcgtactgaaaagctttcgctgatattttccgaggtagctttaatatag

SEQ ID NO: 291481 - DNA, 459 bp, Morganella morganii
atgacgacacaaacgcaatacgaattgatgtccgctaatgaacctcaatttgacctcactgcaacccccgtacctgacgagcagcgtctcgatttctggccgctatactttggcgttatcccgcagtggataacgctggaaccccgtattttcgcctggatggaccgcttctgtgatgagtacagcggtggtctctggtccttttacaccctcagcaatggcggcgcgtttatggcccctgagtctgacagtgatgagacatggcatctgttcaatggcatgaacggcaacgatgtgcaaatgagtgcagacgctgccggtatcgcggtctgcctgattgaatacagccaccatgcctgtcgcaccgcatgcgatgcaatgaccgcgcactattaccgcctgcgggactatgccctgcagcatccagaagcccacgccattctgcgcatcattgactga

SEQ ID NO: 291482 - DNA, 237 bp, Morganella morganii
atgtctgaatctcaaattttgccaccgggacctttcacccgacagcaggctgaagcggttacccgccggtatcgcaacatcagcattgaagacgacctggatagccacttccgcctggtggttcgtgactctgaaggtcgaatggtctggcggccgtggagctttgaaacggatgccggtgaaggacttaaccgctatatccggcaatacggcatcctcagagcatcctcctgttga

SEQ ID NO: 291483 - DNA, 864 bp, Morganella morganii
atgaagatacatgaaggtttgcaagatatcacgcagtctgtggctgttcttccggatgttattagaaaacaaatactttcgaatattagcaggcttgcggattatgagccagtgatcggtattatgggtaagaccggagccggaaaatccagcctgtgtaatgcgctttttgccgggaacgtttcgccggtcagtgatgttgcagcctgtacccgtaaaccgctacgcttccgttttcaggtgggtgagcactttatgaccatcgtggatctgcccggtgtcggtgaaagtgaaaggcacgatgaagaatatgctgcgctttacagcgaacagcttccccggctggacctggtactctggctgattaaggccgatgaccgggcgctggcagtagatgaacatttttaccgggaggtgattggtgaggcataccggcataaggtgttgtttgttatcagtcagtcggataaggccgaacccaccagcggtggtgaaaagctgtctacagagcagaaacaaaatatcagccgcaaaatctgcctgctacatgagttgttccagccggtaaaccctgtctgcgcagtgtcggtacgtttgcaatgggggctgcgggtgatggcggagcgaatgattcgttgcctgccacgtgaggccagcagtcctgtagcggtacagctcagtgcgccgcttcgaactgacactgttaataaaaaagcccgtgacgattttggtgaaacggtcggctcggtactggatacagtaagttccatgcccttgataccggccccggttcggacagtcatccagtctgtacgcgacatcgtggtatcggtcgctcgtacagtctggaatttcttcttctga

SEQ ID NO: 291484 - DNA, 930 bp, Morganella morganii
atgaaaggacgatttagctcagattcagattacgatagtcgcttatgcggctacatcagtcaggcgttgaaaagccagtccattacattcacgagccatttaatgaaatcaggggtggacaattggataaggtttctacataaagaaatacccgaaattaataccaacattgatgttgaacaaacaaaattattactggataacatagttagttccgcattagaaaatgtatataaattcagtgagttctcttggattgaggacagtgaccgggcttgttactggatgtggtgtaacatttacacaatgcctgcgctctttttttcaccacctattaagaaaccaggcgtaactccttatatttttttgggctgtgatccccttcctggaaatagcagggcacgattctttaatattgtgaatttttttgatcgatggattaaccctcaagacaaacgtagatttttaaatgaaatgagaaattcttacagacagatcacttgcaaaaaaaacgcactatcatttctgtcctccaagaaaaaagatgattgtctgtgggcatggcattatcttaatgaacgaaacatggttggtgaatacattacacccataatggataacccacatgaggtttatctggcagtcaatgcagcatttgatatatggtgtacttccaatgctttgcttgatgaaactattattaactttagtaaaaagataaaaaatgcatatgcgcagaggaatttcaaagcatctaggaaaaacacaaaagacaagtctaaaaaaacagtgattgccactttgacgccagaactacagaaaaaactgtctgatttatcacaagccagtgagatgacccggcaggaaatgttagagttgtgtattaactccgcatatttaaagcttccgaagaatgccagaagcatttaa

SEQ ID NO: 291485 - DNA, 582 bp, Morganella morganii
atgcaaaaacattacccacatctaaagaaaatcatccctaacgacttcctgctgaatttgattaatcaccatctcaatcagatcctggcatgccacgccaagatactggcttttcgaatggattttgattatcagcgaggcactaaccgatttattcgtaactcttccatcgaaatacaggatgaccttagagaactgacgcagggaatgatcactcttccaggcgttatcggtagtttctgggtactggaatggacatcagaaggggcagttcatgctcatgctattttttatcttaatggtcaggaacatcaaaagtcattcccgttcattttacgggcagaagaactgtggctagagattacccaaggtgaaggcaaatctcagcgatgcaaaccaaatgcatatcatcgggacaacattaacaacgttgtggaatatcacaataacaatgccataaacagcctgagacgtatagccagctatctgacaaaagaagaccagaaatatggctatccgatctggggatgtaatgaggttccttcgcctgcaaggcagggtagaccaagaaagtttagttag

SEQ ID NO: 291486 - DNA, 207 bp, Morganella morganii
atgaacagtaaaccatccctgtttgaagatcagttcgttgatatgactttcatcacccgcctgctgggggtcagtgataagtggatttaccgactcatcaaagatggcatatttccaaaacccatcaaactggggcgaagttcacgatggctacagagtgaagtggaagcctggctacgggcgagaatccacgaatcacgcagctaa

SEQ ID NO: 291487 - DNA, 576 bp, Morganella morganii
atgaaagagacaaagacgcgacataacagtttgctagtcagctatcaacgctggctaaacgggttcaccaaactggccatcataaatggcatgtgtcatcccaatattcaggccagccaccatctgatggtgggcagtctgtactttcccggcgtagggcagatgactgcagtggtaccacaatgcctttaccgactgatttacggaagtcagcatccagagccagtgtcggtattgactgatatgcaaatcagccttgagacaaggcaaaaaactttactgcaccacccaatgttggaagggatattactgagtgaatgtatccgcctcaagcaacgcccactggcaaataggctgattagcctgttacaccaattcagttcaccggagcatcgccacaaactggtctggctatgttggtacgatttgatgatgggtgcgacgctggaagactggttggataacctgaaacgtaaggtacctgaagatctaggcttgtggctggttggacggcaggaggaaaacatatccctcacgcaaatgatggatgaatatctgctatttaccggccactaa

SEQ ID NO: 291488 - DNA, 999 bp, Morganella morganii
atgaatgagaggatattatcatcaaaagtgttcatcatggatgagaggaaaatgagttcgacacagcaagattacctctacagacagttctttcggttaaaagtacatgaatgtatgggtgacagttttcaggcgcttttttcgaaggttatgcaatacgcgactcctggctttcaagctgtttccccttggggaaactggggagatggcgggaatgatgggtggattgctcatgaggctcattacttccaagtttatggacctaaaccttcaaatcaaaccaaagagctagaagctgttaataaatcgattggcgactttgataaattagtcgccaaatgggggaaagtatcaaaatatacttttgtaatgaatgattatttcaagggtattccagcacctgttggactttcattaaatacacttgcaatcagtaaaagtcttaatcacgcaggtgcaatgggcgggatggagctccttcaaaagtttatgtcattatccgagggtgaaaagcaagatattgtaggtttcattcctgaggttgatttagactttacagatactcgagctgttggcgaagtattgacttttttagcacaaaaatcttcttcacccatgaattttttaagtgaaacagctccggactttgaagataaaataaaaataaatggtattacaaaaccaataaaaatcaggctggaatcctttagctatcaactatatttgataaatgaatttttagattctgttgatagcggtcttgaacaaactatagctcaagaagttagagatacttatgcaaaaagtaaattggcgataactgaagataaccacaattatgcagatttaagatatacttggatgatagataaactccttcccccgcaagttcccacaagtgcggtcgcgagttatcgatttgcagcagagttaattttagctaaatattttgagacatgtgatgcttatgaacatccaagcaatgcttctgccacataa

SEQ ID NO: 291489 - DNA, 1674 bp, Morganella morganii
atgaagttaattcgcttaacttgcgatcagccaacttttcatccagtgcatttcaatgatacaggactaacgttgatcattggtgatagctctaaagaaaaagaaggcagtagtaacggagtcggtaagacgcttattctcggtctcattcaacattgtttaggagctaatgctgataaaaaattaacttcagcagttccagattggtggttctctttacttttttctcataatggagttgagtacttaatatctagaacgggcaatggaaaaaaattattattaaatgacaaaacaatatctttaaaagcatttaaagatttattagataaaatagggatatttaatcttgagaataacattccatatttatcattcagatctttatttaagcgtttttcgcgatataccagagatgactgcatcagtccaactaggacaaaaaaggagcaagactttgaagcattgcttcgcaccgcatttcttctcggtatagatcataatttaatattatctaaaagaaataataagcaagagctggataaagtaagtcaatcgctaaaaaattggcaagacgatgatattctaaaagacatgtttagagcaggctctcaaccaaaagtacgctatgagtggctagaaagagagatcccaagactgcaggatgaactgaatgcatttcaagttcacgagcaatacagagctattgagaatgaaacaaacagtttaactataaaattacgagaagttgaaaaaaacaaaaatatagctgaatttaaagtaaataatatagaaaaaactttattagaacaccctgatatttcaagagaagagcttcttgaactgtacacattggcccattttgagtcagttgaaaattttcacaaatcattatcttttaacagaaagaaaagacttgaaaatgataaagtaaaacttttgttagaaattgaatctcttaaaattgacattaaggatatttcagctttacgtgattcatatttggaatccctgcaaggcaagaaagcatttgatgaatacgcagtcatagctagacaactagctgaatttaaagaagaaaaagaaaggttacatgattatctaaatttttctattaaccttcaacagaaagctcaaaatctaagagaacgaaaagttgaacaagacagattagcggtaaactatgcttctacaaaccctctttcagaatacgataaaatttttgctgagctcgcagaaataatgtacccaagggtacctgcaggaatagttttggatgttaatactggtgacaacaaaattcgttatgatctaagcatccaaatcgagggtgatgattctgatgggatcaatgatgctaggatattatgctttgactggttagtatttacatgtggtgaaaaccatgccatggatatgctatggcatgataaccgtctttttgctgatatagatccaggtgttcgcgcaagatggttctcatttgtcaatcagtcattaaaacgaagcggaaagcaatatatagcatctttaaacactgaaaactttaatgctatggaaccaactttatctgaaatcgaaatgttagaactgaaatcaaaaattgttcttactctacgtggcgataaagcagagaataaacttctcggtattcaatttggaagtaaaaagtaa

SEQ ID NO: 291490 - DNA, 936 bp, Morganella morganii
gtgaaagtcgtttttaatgttaatggtaaaaaagttccgctcaaatctctgcaatatataagtaaaacaaatcaactcgaagttatgcggaattggttttttgagaattttgaagatcccgcgaactcttgcccgtatgaatcccgtgaaggcgggtatgcttacatttatgggggcccatacgaagcaagtgaagagttgcaagcgatgtttgaaggacacgtgaaatttgattatatccaagaattagtcaatgaattacaagaacagtgctatgaatggtctggtaattcaaataatattaatgattggtacgatgaagacttgtatgatgctgttacatcttctgaacatcctttttctaagtttgttgaaagcattgatggaataaaattgctgtctaaaggcgaatttaaagataaacaaaaagatcatctgcttagcatcctatatattaatgttattacagccctggaaacactttatgttgagttatttattaactctatagataaaaatgactcatatcttgctgactttatagaaaaaggtaagacggagtttaaggtaaataaagaaatattggctttgccattcaaaggagaaactattgaaaacatgagggcacaattaattaaggtaattaaagagcatttgattagtgcaagttggcatagtacaaacaaagttgtaggacgttataaagctacatttgatataaaagtacataaagagtggccaatagatgcgatcgaaatagcaacacaaaagcgtaatcatttagtccatcgtggcgggaaagataaagaaggtaattcggtagtgattactgaacaagatttagaaatgttgctggatcacgcacaatctcttggaggaaaattgtttgatagccttgaggtggcattacagaacaaagatgagagtgaattttga

SEQ ID NO: 291491 - DNA, 354 bp, Morganella morganii
atgaaaacaaagaaaaatatgttactgatgttatttgcaatgatggtgacattatcttctcaggctgagcagaaaggggacaccagaccatacaccatgaccggcatattacgtgcgatgactatttgccatgtaaataatgaccagataattaccgccgattttaaaaacgtcggtatcaataaactggaaacagaagtctacagcctgccgcttgagttaaataaattcttcaaaatagataatgctgcgcagccgccaaagctggaagcgcagctggtgaaagttccgggtacggatttaacgcaatccccgttccgcgccaccggtacgctggtggcggaatattggtag

SEQ ID NO: 291492 - DNA, 864 bp, Morganella morganii
ttgaaagaatatactggaacagttttttttgtagatattcttggaattggagccttaactcaagggaaaatagatattagtgaaaatgattttttatcacataattttaaatatcaaagtaaattttcagagcatcagttttgcgctaaattattactgaaatttaggaggatattagtaaaagcgacaagtcacataaaaaatattaaggtggctcaactgtctgattgtgcattcgtctggtcagatgatcctgatatagtagttaatgtagccagagatataatgtggaaaagtgtgctgggtgggcttctttgcaggggaggaattgcaaatggacagatcgttgagcccagaaaaataaacactaaactaggcatgttcatttgtgggggggcagtaaccgatgcagtaagacttgaaggagcaggtaaaggtacaagagtatttattaagcaagaactcgtacctgagctaaaaaaagtcccatgtgatgcttttattccaagaaagagcttaattgatttttccacaatagatgaattcaaatggtatctataccctgattttattgagtcaccttatgacgacttaaatgaaaagttagtcatgaatgagcttgctaagcttatagccatgcttatgtactctccaaagtatacatggaatgcgtcgaaccatttaggtcgagttcaactggcaggttctattgacattatatcagctgaaactgaaatgtttggaaagaatatagatttaaaatttgaatatgaaaatttattggataaattaaaaaataggagtgaaaatatatacaaaaatgttctaaatagctatcacaaaacaataaattcatcaatttaa

SEQ ID NO: 291493 - DNA, 912 bp, Morganella morganii
gtgaatataaatttaaaaggtgggttcccactctatacaaacttaaagaatataaacgatgtgaataataattgttttccaccatcttcgacacttgaccgagaattaactactttggccaggcagctttcttttcttgatagcctccaaaaagaagtagaattatccggtaatcaatgggatacagacaatacttatcgtgatgcattgttagatttcgttgaatcaatggataaattacatgatatagcatatttgataatcagaaatgtttctagtatagttgaagatgaatcacttgcaaactctatcgagtgggttaaaaagcatgagcacaataaatatgaactactaaaaggtgctattagtaaagatcatgaatggattaggcttatttcaaatctgaaaaagcatgatgatattcgtgttggttttttaaatatgactactcgctcaggaaaaactgtctatggcttcttttttggtactattaaagagggcgtatttactccaaattctgatgttcacaaacagtataagaatggtgcgactgcattttcttataaccgtttcattaatcaggtagtcttgcacttgtttaaaataatcaaggaattaaataaggcattatttaatggtgtcagagggaaagatattaatgaacattcttgcagcagcattataaaaatcattcagattgctgaccaggtagaacaaatattctttccagacgaatataatagaaaaatattaataattagaaaaaacaaaagttcttattcattaacatctgacaagacgaaatatatcgacaaatttgagtcattcggacaggtcataatgctcgaaaatcaaggaccaaatggttataaaatcccttatcattctatgttatttggtaactcctattag

SEQ ID NO: 291494 - DNA, 789 bp, Morganella morganii
atgatcatcatgactgcttataattttcttgctacaacagagacatatctaaatttgaaacagcaggaaataaacaatgaggtaagctatgcaggcaaggtagtaaaagctaataatttatggaaatcaaaatcgaataaatattttgatgacatcaggactattctggacaaaatgtgtgttggctcacgtcgatgtaattattgtgaagattctgtagctgatgaggttgaacatattaagcctaaaagtctatatcctgatgattgtttcaaaagcgaaaattatttatatgcatgcggtccttgcaatggtccaaaaaataataaatacgctattttcgaccagcaaaataatgttattaatgtttcgagaaaaaatggcggcgctgtcattccacctcaaaatgggaatagtgttttcattaatccaaaaacagaaaaccccttggattttataatccttgacctaaatacatttatttttataccctaccccagtaaaggtacaattgagatagctcgggcaaaatatacaatagaaatactgggactaaactctcgtgattatctagtaaatgcgaggaaacatgctttccatagttataaagactccctagaaacttatattaataaaaaattaaatggtgcaacagatgatcaactactcataagaaaaaatgagattaacggtcgtcaccatcctacagtctggagtgagatgaagcgacaaagctcatttcatccagagctcaaacagctattcgatgctgcaccagaacttatataa

SEQ ID NO: 291495 - DNA, 1260 bp, Morganella morganii
gtgtatattagaaaaattcaattagaaaatattaaatcatttaaaaacttcacttggcatcttgaagatgaagaaaatccggttggctggcatgtaatccttggtgataatggttcaggaaaatcaacatttattaagtccgtatctttagctctattgggtacgacagatgctaaaagaacaaaagtcccttttggcgaatgggttaagcagggctcatcagcaggcttcattcgtttagaaatccagcatacaaaaatagacaactgggcaggaaaaggtaaacagcaaagtgaaaatttaaagttctctttaaagctaagctctaatggagaattaacacatcatggtactccatctccaactaggcatgtttggggtggtaaaactggctggttttctgcagcttatggtccttacagaagatttaccggtggttcttctgattaccaaaagcttttctattctgctcctcttcttgctcggcatttaagtgtttttggcgaagacattgcattgagtgaaacacttgactggcttaaagaattgaaatttaagtcgcttgaaacaaatggtgcaaaaaaatcagaacttctcaaaaatataattagcttcattaaccaagatgacttattgccgaactctgtaaagttaaatgaagtaacctctgatgggataacatttattgatggttttgaaaacatcgtagacattaactcattgagtgatggatatcgaacagtactaagtatgatgttagagttaatccggcagatgactatttgctatgatacagatgcgatattttcacctgatctaaaaagaataataaaaccaggcgtggtattcatcgatgaaattgatgttcacttacatcccaaatggcaaagaacaataggaaaatggttgacctctcactttcctgaaatacagtttattgtgagcactcatagcgcattaatctgccaaagtgcaaaaccaggctcaatctggaagttaccgtccccacattatccaggtggaagaataactggtaatgctttgaatagacttatttacggtgacttacttgaagcaattagcactggtgcgtttggtaatgaaataaaacgttcagatgatgcaaaatctcttatggaagaattggcaaatttaaacattcaagccatgattcaagagttaaatgaagaacaaaaagaaagaaggatagatttacaagctatttttggaagtaattcaaatttaacatctaaaggataa

SEQ ID NO: 291496 - DNA, 2748 bp, Morganella morganii
atgagcagaaacctccgtttacaggtcgtgttaaatgccgtcgataaattaacccggccgttccgcagtgcgcaggaatccaacaaacgactggcgggcgctgtccgccagtcccgcgatgcactgaaagacctgaaccgtcaggcaggacaaattgacggcttccgtaaaacaaaacagcaactcaccgaaacacagcaggcttatcaggcggctacacaacgcgccgccgccctcgcccgcgaaatgaacgcctccggcaatctgacccggcaacaggcagaagcactcaagcgcgcgcagcgtgaagccggtcaactgaaaaaccggtttgaacaactacagcgatccacccagcaacagcgcactgccttacaggctaacggcatatcgacaacccaactcggacaggcacagcgccgcctgaacagcgacattgcccgcaccacccagcaactgcaacggcaggagcagcagctgcgccgcagcgccgaacaggagcgccggatggcagcggccaaaggcagctatcagaaaacgatggatgtccggaataaaatggccggtaccggtgcggcagcgatggcgaccggcggtgcggcgttatatgccgggaagaaatttatggcgccgggctatgagtttgaggtcgggatgtcaaaagtgcaggcgctgacccggcttgataagaactcagaagagtataaagcactgcgcgaacaggcgcggcagctgggggcgaccacggcatttacagcaaacgaagttgcacaggggcaatcgttctatgctatggccggatttaaaccggagcagatacagaacgccatgaaaggcaccctgtcaatgtcccttgccggtgatatcgacctcgccaccacagccgatatcggatccaatatcctgaccgggttcaaactgaactctgacgaaatgaaccgcgtcagtgatacgctcgttgccacctttacccggtcaaacaccaacctgaatatgctgggcgacacgatgaaatatgtcgcgccggtcgcgtccggtctgggtgttgatctggaaaccgccgctgttgccgccggtaaactgggcgatgccggtatacagggcagtatggccggtaccagtctgcgatctattcttggtcgcctcgctgagccgccaaaacaggccgctgacgcactggaagagctaaacatcaagacccgtgatgccaagggtaacttacgtggcctgccggaaatccttgctgatctggataaaaagacaaagaaaatgggtaccgcgcagcgcgccgggtacttcaaacacattgcgggtgaggaagcattctccgctctgtcagtactgacagaccaggcaggcagcggcgagctgcaaaaaatgatcgccgaagtcaaagcggccaaaggtgaggcgcagaaagtcgctgacaccatgaccaacaaccttgacggtgatttaaaaaacctgacctccgcatgggaggatgtcggaatccagatattcggcggtgttgacagcccgctgcgggatatcgcgaaatccatcactgatattatcagtaaggtcggggactgggcgaaacgcaatccggagctggcgaatacgctgacaaaaattgccctggcgctgggcgtgatcctcgccgtgggcggcgcgattgttctgatgctggccgcgatgctcggcccgatcgctatgctgaaactcagtatgtcagttctcggcatcaagggtgccggtgcgtttggcctgttggctaaaggactgaaagccgtcggactggccttattcggtatcggaaaagccctgctgacgaacccgctgtttcttgccgccgccgtgatcgccggtatcgcctacgcaatatataaaaactgggactctgtcgccgcgttctttaaaaagctgtgggcggatattgtcagtgcctgtgatgccgcatggaaatggataggcagcatcatcagcagagcctgggagggaataaaaaattatttcctgaactacacccttgtcgggctgatttataaaaactgggacggtatcaaaaaatacatgtctgatctgtgggaaaccgtgaaaaccaccatcaaaaccaagtgggatcaaatcatcacggatattcagaacctcccggcaaccatgaagcaggccgcatctgacatgatagacagcgtcattaacggcattaacgaaaaatgggaagacctgaagaataaatttgccgaaataaagcaaatggcaaaagacgctcttacgccggactggctgaaggaagcaaaacaggatccgaagttcgtggcggcagtagaggccacaaaacagagcacaacaaccggcggcatccgcaatgccaactggacgataccggataagaaatttgccggggcctatgattccggcgggcatattccgcgcggccagtggggtattgtcggtgagaacgggccggaagtagtggacggcccggcaaatgtgaccggccggaaaaatactgcagcactggcaatgctggcactgagtacgctgtcccagccgatagccgcagcaccggcacaaaccgccggcggttctgtcagcagcgcgtattcatcacagcagaacgccgcgccggtcatcaacatctacccgacaccggcgcattccgcacaggatatcgccagtgaagttgcccgtcagctggacgcgcacgcccgccggcagcaggccagccgccgcagcggatacggtgacacagaggagttttaa

SEQ ID NO: 291497 - DNA, 645 bp, Morganella morganii
atgacagccattgtttcccctcatgtttgctgtaatgacgggattattacggatttatccggttatggctgcattcccggaaaccttggtttagaagaaaagttaaatacaaagcttgataaaaatgacgtcgtatcacaaatcggttacagcaatgaaaaagtcatggatcagcggattgtcacaaacgagctggcgaagcggcttcttatttccgacgtggtaaatgaagccggactcagcaccgaaaaagtcatgaatcagagagccgtgacagaggaattatctcagcggccgacaaaaaacgatgtcaataattccattactgcaattaatgatgaattagcgaaaaaagggaataaaaacacggctcttaaatcgtcccgtggctggtataaggatgagtcaaccggaatgataatgcagtggggggattggtctgtcggtgaaggtggtggcggagaggttaccgttaattttgcgataccgtttcctttcagcggcgtggtatcagcaatatcagtcaatgatgcagcggcacaaatggtgggatacagccttattggcaaaaccagcatgaaagttatcaagggttctaatgacgaccgtggtcgttctggtcagtatattgtgtgggggtggtga

SEQ ID NO: 291498 - DNA, 1290 bp, Morganella morganii
atgcaacaaggtagtacaatttcgtctgtttttaagacatcacgtgatcttcctgagaactatgttataagaaaggatatagatgataaatttattgaggctctcactcaagaaacacatgttgtgatctatggtagttcaaaacaaggtaaaacttccttaagaaaaaaaaatcttcttcccggtgattatatcgatatcacctgttctaataattggaagctcgaagatattcatgttgcaattttaaaaaaaattggttatcaagtttcaatttcttcatctagaacgctaaaaggaacagctaaagttaagttaggaataaaaattccttttattagcaaaggcgaaataaatgtaaatggcgacatagccaaaaccattaataaaaaaaatattgaattagaccctgaagatgtaaatgatgttattagcgctttagaagagattaagtttgataaaattattgttattgaagattttcattatttaccagaacaaacccaaattgatttctcagtagcattaaaagcttttcatgaatcatccaaactttgctttataatagtaggtgtatggctagaagaggataaacttacaacatttaatggtgatttagcagggcgaattgtttctattaatgcagatcgttgggaacaagaggacatatatacattatttaaaaacagtgagaaattgcttaatatcaaatttgatgaaaaatttaaatcagatataattgacaaatgccatggaagtgtttttttagttcaacagttatgctttcaagcatgtgaattagaacaaataaataatacacaacaagagtgtaagattgtaggcacagactttttagttgaagaaaaaatcaaaaaattaataaatgaacaatattctagatattttaaatttttgactgactttagtggagggtttgatcaaacctcacttgaactgtacaaatggattttatataccctaatcactgttgaaaaacactaccttgaaattggcattcctgaagcagctgtcaggagaatgattcaaaataaacatcctaaaaaaacagaagcttctaccaaaaaattacgacaggctttacgaaaatctgtcgatcttcaagtaaaaatatctataaaaccgatcgtttttgagtttgactctagttcatcaagaattaagatagttgacaggccatttatattatggcggtcatatcaaaatcaagacgatttatatgcttatgcagatttgtctgatgatttaaaatctaacatactaacttcctag

SEQ ID NO: 291499 - DNA, 648 bp, Morganella morganii
gtgattgttctttcagataatgatgttattttgaaattagctcagtgtgacctgatccagtatttacctgaaatactaaatgaaaatcagaatgatatatatgttagcccaacagctaggtttcagcttcttccgggaaatacagaaagagctataaagaaatgtggttctaaggacgtttatgagcgtgttgggcatttccttagtaatgttcaaactattagtgatattaaagatgagcaattacttcagcaattgggtgagataccacatattgatagcggagaacaacagttattagcgtcatgtgttgaaaaccctggatcactttttatgaccggtgataaaaggtgcttacaagctgttatgacacataaaaagatagtagcaacggtgcatgccaagcttataaattcagttgttacttttgagagtgctttgcttctatcggttgaattactcggtttttctaattttcagatgcaaataaagcaaaatccgaatatggatggtgtactcaatatagcaatgcgttcgacagaacataaagaggtatgcgaatgcttattttcgtatacaagagatttgtatgattatctggcttttaaagatcgcttgcctgctcaagatgcgtttttaattatgtaa

SEQ ID NO: 291500 - DNA, 993 bp, Morganella morganii
atgactaataagccaatgagtcacttatatgaaaaagttaaaagtgctggttttacaataccatacataaagaaactgctgccagagtggtgggacgatgctttagctgagtctcctgctggtaagcagtttgctagtctgtttttatctaaaagatttagcatatgccatgatagtcttaagaatgatacctctccggtaatgtttaacttaggtggtaatcataagttcaagcataaggtaaatgttggtgaggaagacctgaatgttgcaacagctattgcgtattcagctgctcgagtcgcggctgaaaatttcaaggttccttatgatgagaatgttaatctggattgggaaaatgtgagaaagcatttactcaagaaggagcagtggatatcatttcccttgttgatagatttttgccattcaatcggaatacctgttgtttacataaaaaacttcccttcgaaatgcaccaaaatggccggaatggctctccaggtaatggggcggccagtgatagttttaactcaagcccaaaagtatggttttatgctttttgatttggctcatgagttagggcacatcgcaaaagggcatttaaatgaaggcaatggctgcgtattcgttgatagaaagatagattctcaggcgacagatgagcttgaggcagaagccaaccgttatgcgtttggtttactaagtgggcaagaagatctgaaaataagtgctcattatcatttaaaggctgaagaattggctgatgcgtctcgttcctatggtaaagaacatcatatagacccgactcacatagcgctaaattatgcatatatgaaagggcattggggagttgcaattaatgcattaaagattatctgtgctggttcaaaagttgaccaaatcatattgagagaatcattaatgaattcaattgataacaccgttattaatgatgatgatttagagctcataattaaattatgtggggaatag

SEQ ID NO: 291501 - DNA, 216 bp, Morganella morganii
atggaaaggaggctctattcattagtcaggtataagtcacactgctacatatatcgcggctttaatatttatgtattgcctcgcaacgtgaccagaaaagtaacgcagtatcacgtcaccctgtctgatggggctgatagctgtcattcgttcgggaagtttgacgcgctggcgcaggtaacaagttttattgattcattgttcagcaagaaataa

SEQ ID NO: 291502 - DNA, 873 bp, Morganella morganii; identical to SEQ ID NO: 279096

SEQ ID NO: 291503 - DNA, 1284 bp, Morganella morganii
atgagagttatatgtacaccagaaaaattacttcctaatattttaaatgacgatactgagtatttttcactttactcaatcccatctaataaaaaagttgggtacattgcccaggactggaaagcaagattaaaaaaaatgggaatttatccagacttggtaacctgggattttgttactatagctatgtcagtttgtgcagcagatttagcatgccataggaaaaaatctgctgatggttggaccagggaaatacaattgtctattacaatttgtgataagaaacattggataccacacattgataaacttcaaaatgcatttcggtttttaaccggtgatttctgggatataacactaatcgatggtggagaaccaccattagagccggcaaatataaaaatatctgatgcagactgtatctcactactttcgggaggaatggatagcttaattggagcaatagacctcattgagagtggttattctccatgtttcgtatctcaaatggcaaaaggcgattcaaaaaagcaagttgaattttcagaaacacttaataaaagagttaaacattatcaatggaatcacaggataaaagtaccgcatgtaacagaacgttcaaccagaggtcgctcattaatttttatttcctttggtgttcttgcagcaacaactttgagtaaagaaaaacctgtaaatttattcataccagagaatggatttatcagcttaaatattgcgctcaatgaaggtaggtttggaagccttagtactaaaacaactcatccagtatttttaggaattttacaagagatttttgatgcggtgaaaatatcagttttaataaaacgtccctatcaaggattcacaaaaggccaaatgatttcaaactgtaaaaataaggaactattatctaagtttattggaaatacaacaagctgtggtcgttttggctactataattataagcattgtggtcgctgtgtaccatgtcttgttcgacgagctgcatttctaagtgcaggattaactgatagtactgaaaaacaatatgtatttgaagatctgggactttctgagtccgcaagggaaaaaggagcgaacgatattggagcggtagccagggcttgtttactcttcagacaaaatggtgttgataatgttattggtggagcgctctctttttctaaccagactaaagaaggaagaaaattttatgctgatgttgtagaaaatggactcattgagttagagaaccttctgaaaaaatataaggtattatag

SEQ ID NO: 291504 - DNA, 870 bp, Morganella morganii
atgggaacttcaacttccagtactggtgccggcccaaacgtcccatatactcctccatgggaagataaactccaagctctaccgttaggttcaggccaaatcgagttaattctcgcagaagataataatgagaagacagatgatagtgaagacctctctcttcccgtagatactgaaaacaatagcgagctatcaccactgagacgttacgcaaacgctaggagggaattacgtaactatgctttgagctcagataaatcatactttaataaagcagtaggaaattattcaaaggtaggctctggtggagcaaaaaaagccagccaaaaaatgagagtgtctacaagagctgctaccaatctcatatctcttttaatatcactcagagacggtaaaaatgagttaataaataattgggcagaaaaattactaagccgaggtccatcagctcaagaaataattgacgctataatttttgaaacaactacttccggtggtacagttgatgaggagtcaataaaaaactcaatgtatttcgcaatgtcagaacttataaatagagatgtaaatattaatttactaaaaatgagtaataatagcatttggagtatgattgaattattcttagcaaatgaagttaaaaataaattaattcacgagattggccaattattcgaaggttcgaaaaacattccatccagttccataaaaaacattaacatgatgaaaaaataccttcagtccgaaatttcggaacaattattagagttaagggaaaagataaaaaaccctagtataaaacaatttcaatcaattatggataaggctttggaaaatacctttattgtttatgaggatgcattaaaatga

SEQ ID NO: 291505 - DNA, 1860 bp, Morganella morganii
atgtggaacgatgtagaaacagcagatgacctattgaacttcaagcttattgcaaatattgccacacgccttgtatttgaatctaatggagagcctgtatcaataggcgtgtctggtaaatggggtacaggcaagtcgtctctcgtaaaaatgattggtgagaaactacaagatgaaggtactaaaggaaagtatatattcctagaattcaacgcatggttgtatcaaggttatgatgatgcaaaacttgcattattgcagtctgtatctgacaaaatattatccattgcagaggaaaggaaaagttttgttgaaaaagcattttctttcgcaaaaagaataaactacatcagggcaataaagattgccactcccgcagttgcaggagcttttattggaggtacacttggtgggccaataggtagtattttgggtattgttagttccgttatttcatcaaaacaagtaacaaatgacgatcttgactcacttaaaaatgaatattcaaaaatatctccagatcttcaaggcttattaaaacctaatgaaacaaaatctttaccaaagcaaattgaagaactccgaagcagcctaactcaactacttaaggatttagatattactttagttgtattagttgatgatttagataggtgtatgcccaatactgccatatctactttagaagccatgcggttactcctatttgtacctaggactgcattcataattgcagcagatgaaggtatgattcgtagcgcagttcgctctcacttttcccaaaatgatctagatagtgatcttgttactaattattttgataaattaatacaagtacccctaagagttcctagattaagtaccaatgatgttaccgcatatgtagcaatactattatctgaacttgcatcaaggaataatgttataccacagtctattgcagttgaagctaaaaaaacaatattagaaagaacaaaaaaatcttggggaagtgcattaagtaaaaaagaaattctaaatgcctttgggaattatgctgaaaaaatagaaaccgagatatctatagctatagatatttcatctatacttgcaagcacgaaggaaatcgcaggaaaccccagattaataaaaaggttccttaacaatctaataatacggcaacaaatagccgaagaacaaggtttggctatagcattcgaagaactagtcaagcttcagttatttgaacgctgtgcaactactgcagctttcgattttcttgctcgtgctgttactgaaagtgaagatggaaaaccaaaatttattgaagaaattgaaagagacattcaaaaaggaaatgtatatacaccaccagaccctagctggaaaaataactttatagaatcttggattgaaataaagccaagtctttcatcaattgatcttaggcctctgctgtatcttagcagagaaaaatttatttcaatttcaagcatggatgatataagcgatgaggcaaaaattctcttagagtccatcattatttctgatgatacatttgatatattctctgataaactgaaagatattggagaaaatgaagcaggaaaaatcctctcacgattaaaggtgaaatgccgagcagaacaatggagcattgaatacctaaaaaaatgtttatttataacatctatctatgaatcaatgagcaatgaatttatttccttattacgagagattcctggaaaattgagacccgcatcattaattccattaataaataaaaaaacatgggctattgaattgctggaatcttgggaaagtgaccagactacaaataaacaaacactaaatgctattaaattaaaattaaggagatag

SEQ ID NO: 291506 - DNA, 627 bp, Morganella morganii
  misc_feature (515)..(524): n is a, c, g, or t
atgggatttataaatccagaaagcttgaataagaaaaaatcagtggtactttcatcacatgagaaaacattaactaatgttaggtatggttcaacagaatggtggctgttgcaaatattatatcatactggaatgagaattacagaggttattcaattaacacatgatgactatataacgataaatgataaagacgtagatattcattgtatcagtattaataaaaacaatgggaagagagttaaaaataaagatagtattagaacaattccattgcatgaaaatttaattagacatcgagttatggatataaagccaatatttccgtggaatacatatcatatggcatcatatatagtgacaaaattatttagaacaataggagagaaacactctcctcatgattatagatatggtatgagtgataggcttcgagatattgaaaatttaccggatcatatcaggtttagaatacttggacacagtaataacactattacagatagtatatatannnnnnnnnngatatcaactaatttatttttaaaattagatacaatttcttttgttactgtacgtatatctttatcaccataccattctataaataaatttacagcatgttga

SEQ ID NO: 291507 - DNA, 549 bp, Morganella morganii
  misc_feature (481)..(490): n is a, c, g, or t
atgagcatgtacttttcatgtaataaacgaggttattatatctggcaaaaatatcaccagggaaaacttataaggtttgatcttagaacaagagattttcataccgcaattttacgttcaaatgttattttgagtaaatattttagaaataaagataataatctgacatttgatgaaatgagaagccttctgatttcagaaagggatagttatattgaatatgaaattaagagatatgcagaggattattgctgggggaataatgtaattcaaaataataaaattcaagatgaagttaagcacttaataagtgatgtgtctatagaatggtatcggtatatgtacaaaaaatggcaacctctgacattaaaatctaatcaacatgctgtaaatttatttatagaatggtatggtgataaagatatacgtacagtaacaaaagaaattgtatctaattttaaaaataaattagttgatatcnnnnnnnnnntatatatactatctgtaatagtgttattactgtgtccaagtattctaaacctgatatga

SEQ ID NO: 291508 - DNA, 1368 bp, Morganella morganii
atgagcaatcaatttaaagaacttttcggtaaagcccgaatggatgtcagcagtggcatgaaaatggatagccgaagaaaatcaaatgtgtatgcggattcgcagcagaaagcgatttctgaaagtattaagaaagggatgtacaatgatagtatagatgctttttcggaagtaggccttgaaagctacgctgaagatgacatgccaactatattccgggatgtaaaagctgaattaagaaaagttttttgtaaagaaactgaagtcaatgaagctatcggctgccatccagactttgacgatctcagattaaacgatgagctacgtaacggctatgccgtgacgatgttttttgatatagctggatctaccaaacttggaaaaacgtatcctcctgatatggtgttcaatataaagaacacaatcataaggtatgttattgaaataattcaagcttttgatggtcacgttcatcgtattatgggcgatgctgtgatggcattttttcgtagtgaagttaagtccatagaaggtaaaaaaatagacagtgcgattgatgctattaatgccgctgtatacatacttgaatttatggagcaggttatcaggccagagctgggcgatcagggctcggaagagcgtataggcgtcagagtgggaattgattatgctaaagatgatgagatagtgtgggggaactacggtgtttcaggtgcatttgaagtaacggcgacttcatatcacgttgacgttgcagctaaacttcagcaagcggcagatactgatacgatcatgattggtgaaaatcttaagtcgttgcttgggttaggaactgagtatttgttcactaaatgtaaattggtgaagaatgaagatggtacagaattcaaacgctattaccggcatgtaaagcctaactatagagttagaggagcacagataaactatcctcagtatgtttttgacagcgcagcatattttaagtttctaccgtatggaatagaaagcagaagtatatcagtagtactgacagcaaccttaaacaacgttgaaaaaaaattttattgcccgtgttcagaaagcctcgataaaggaatgtcgctaaatttccatgtaacattcagtgctcctcaaggacagtcgtatactgtcaaagctattaagagaaacactggccctgaagctgaaagaaattctgcgttaaaggaagagaaaaaagatagaattatgaatttttatgcaggccagtggcatgccgatatttctgaaagtaccagttatcacggtttacatcatatggaaattaaaatttatgatagctatgacaaagaagtcgataagacaatattcagtattttcataagttga

SEQ ID NO: 291509 - DNA, 534 bp, Morganella morganii
atgcctttagatgaaaaaaataaatttgataatgatctgatccagaagatgattacccgcacagatggttttcataactatgccaataccaaatccactataatcattacatttattacagccatactggccgcaataggcactaatgccggaagtgcattatcttacctagatttaaaaggctgtcatgaacttgctgttgttttcaagatcctaacgctagtttccgtaatcttacttttatctggatactttttcgttggtcaaaccgttattccctatattaaaacgagctcgaagcgaaatttttactcgtttattgatacagtgaaacagtttaattcggagaaggagtttgaacaagaaataagaacattgtctgtcaatgaaataaccagtaccatgatttctctacagtacaacctctctcaaggtctgttcagaaaatataagctacatcgtctctccatattcttaattcttttctccgcaataccattaataattaacacattaattatcttctttgtataa

SEQ ID NO: 291510 - DNA, 783 bp, Morganella morganii
atgaatacatttatattaataatgtctgtttttctgcttttttatataggaaaaaaaatatctatttggtgtacaagtaaaggaattgctggtgctaaaaaattttttactatgctactctttagcttttcatttttaagtttgattttattatctatagatagatctgatggagtgaaaaataaaaacctcaatgaaaaatattcaggtaagattgtcatccctggagtgatatcttttaattggagccctcatcataaagattatgaaaatgagtcctattatagcatgaatgaaattaatgaaatcattagaaatgatctaaatgaagataaagatttaacaataaaaatattaaatgaaataaacacatatagtgatgaatcggatagaactctggctaagtcgaattatataaactatggagtaagtatgaaagagtatttatctgccatagaaggaactaattgcagagatgattttaaatatgaagagaacctgtatagaaatgcatataattcacattttgaaatagcattaagtgatattccaaaatcaatgtataagttagagttacacaaaagagatttagctaactttaattttaataaacattatagggaaatacaaaataaattcaatatttgtatatttaaagtaataccaaagatagcccacctctcgcgtccaaaggcaaaacccttgtatattaaaaaagcaatattacctagccgcttaaaatgcatgcgtgaaaataatcaaaatatcgatctttgttattaa

SEQ ID NO: 291511 - DNA, 618 bp, Morganella morganii
atgtacgaatttcttgatgtcaggcttaacggacaagagttctactgggcaaagaacaaaagcgactccttaagtctcaagaatggcacagaaataagcccggatgccagagggttcaatcagtacagagacgttgatacatgcgtctggcttgcctgtatgaggccttctgaagtagaagctaagcagtgtgagttattctttggatttgatggcgaggaaattcatatcgcgagagagtatgaaagtttgcatcagttcgtactccgaggagtatcaagggattttgacagtacagctatacaaaccgtctatgtgtttgatgaatggcaggcaaagtttcttactaacaatactgaatacatagatcttgggtttgatgatgaagaacatgggcagaaagggaggccgcaaggctcagtaaacaagaaaaaacgttttactcttgatgacagtaaagcgacacgtttcagacgctgggcgaaagctaatccggagcttagcctgagtgcattcaaagcgttccttgaaaatactgtcaacacagatctgagcactgaggaaagggaagcaatgttcgaaaagtataataaagccaatcaaaagaaacagaaatag

SEQ ID NO: 291512 - DNA, 210 bp, Morganella morganii
atggattattttttgacgttaccgggcagcgatacttgttctgttctgcataaaaagggatgtccgaaattacaacaggcaaaaagtacagtgtatgttggatactactggggagagcacgctgcggttcagcaggctatcgttgtggcaagaggggcagtggttttatgtccgttatgcataaaccagcatgatgaagagactcagtga

SEQ ID NO: 291513 - DNA, 855 bp, Morganella morganii
ttgaaagagtatactggcgctgttttttttgtagatattcttggtgttggagcattaactcaaggagacattgatattgaaaaaaaagatttcatagctcatagttttaggtatgataacgagttttccaatcatcaattttgtgcaaaattattacttaaatttagaaggaaattaatttcatctactgaaaaagtaaataatgttaaggtagcacagttgtctgattgtgcttttatttggtcagatgatattgatttggtagttaatgtagctcgtgagttgatgtgggatcttaccctcaatgggattctatgtagaggcgggctggctaatggacaaattgttgagccggataaaataaatactaaacttggtatgttcatttgtggtggtgctgtaactgatgcagttagacttgaaggggccggtaagggggctagggtatttatcaaaactgacctggtgtcagagttggaaaaaataccttcatatgcatttaccccaaggaaaagtttaattgatttttctacattagatgagtttaaatggtatttataccctgattacattgattctaaatataagaaaataaataaaaatgaatcttttttaaaattaatagatattatagctacgctgcgtttttctccaaagtattcatggaattcatcgactaaacaaggacgggttcaattggcaagttcaattgatattatttcatcagaaactgaatatcttcttgggaatacagagttaaaaattgggtatgaatatctaatcgatggattaaggaatagaagtcatgaattatatagaaagaatttacttagttataaaaattttttagaatag

SEQ ID NO: 291514 - DNA, 192 bp, Morganella morganii
atggacgaaaagaaacttaaagccttaaaggctgagctggccaaaggcctgaatatgggaaatgagcttttccacagccctttatctgaaatagctctgattagattttttcagttgcctccggtaaagctcaggcggaaggttattcaaactttcatgtatccggtttcagttgtaatcctgaatccataa

SEQ ID NO: 291515 - DNA, 594 bp, Morganella morganii
atgataaacctttttccagtagggaaagtaatctcaatagtctcagttatatatgcagcttcctgctgtctgattctatgggtcatatatgatgaaaacacaacctttgtgacagctctatcaattgcatccggaggtttatttcttcttaacgctattttggtatcaatttttttctttggatggcgaaagctatggcgttttttccctaaactaaatcatatactcttccctgatctgaatggaacttgggatatggttattcattgggaatgggaagataaaaaaggtaaatcccatgcgaaagcaactataagacagagttttcttagaattggaatggatgtagaagctgacgactccgactctcagacattggtagctaagcccaaaaaggatgcagaaacggggcgtccagtactctactacgtttttttaacaacccctaagcacaagacaggctttgatgtacaagatccttataaaggtacagctattctcaagctaaaccttaatgataaggaagcactaaatggaaattacttccccagccgtaaaacaataggtcattacgaactgacacgtattggctaa

SEQ ID NO: 291516 - DNA, 438 bp, Morganella morganii
atgactaaagataacttatataaattactatatgatgtttggaaaaaatctaatcgtgtgtacttttctggtataggagtcattatatgtaataaccctgatagtcttcctatcataaatcttcggagtacaagccccataccgaatgactccacattaaaattattatcaaaaatttccaataaaaatagcgaataccacgacggctttcacatcttagatgaaacaggaaatgttacttatattgcacaatatttttcaccacaaatcatagaaaacatcagttttgacagatcaagatttgtcggtgggcgtttcgttgccgctctttatggttcttgcatcgatgagattaaacttacagggattgtaagcgaagggaatagtctttctatatttgaggctggtaaggaaatttatcatgaggaattgcaatga

SEQ ID NO: 291517 - DNA, 231 bp, Morganella morganii
atggaatcaataccaactcagcgttcagactacgtcgtcatgctggaagaactgcgtaataaacctgcccacatgctgaaagaggtcggtgaccagtggcggacgccagatgcgctgtattgggggaacaacgcgaagttcggcccgttaagtttagaattgtttactggcagtcgaaacagtaaatgttggaattattacatggccgaagaatccccgaatacccaatga

SEQ ID NO: 291518 - DNA, 789 bp, Morganella morganii
gtgagtgataaggattttacacttttttattttgcaactattgaccggccttatatcctcggtaagcacaatttttatgttactgaggctaggaaacgtatttttgcacagtttagtgatattgatattcaagcagcatcccagcaaaaagaacaagattactatgaagaggcaggtaagtatttcaatcccgattctgacgatgaaggtgctatttgggagcaagctatgcatgtaggaatttcgcattctttagctctccgtgatatgaaaaatacggtttcacttgccttgaccgcaggaatgtttcatcagttcgataaagaacttcgcgaaaagtgcatccgtgaattcagtcattggctcgagtatgacgtcataagattaatgatctgggatatcggtttcccaaggttaattgaaattcttgaatgggttggaatggatataaccggtaaggcttatcacgagaaaatagattgctgtcgtcaggttgtcaatgtttataagcatggtgatggtcatgctcatagggtgctttccgacgcacatccggagtattatggcaatatcaatactcttggaggggagcggtttatcttcggtcatgagcaacttgaggtttcagagacacagtttatagagtttgcggatgcaattacagatttctggaatgacatcccaatacgctgtacgaaatctaatatgcgaaaagaacccaagtggatagataaagaatatactcaatatgaaaaaaaagctaaaaatcttcctagcaggagtttttga

SEQ ID NO: 291519 - DNA, 639 bp, Morganella morganii
atgttacagttaaaacgctttgaggcagcagaagttttaatacgttcacgtcaagcgctttcatcattaaccgctgtcgttgaatatatgaaaaatctcaacattgatgcaatcatggaaaaaggtaacgattataaaataacggaatttattaatggattaataacacctttaaatatagatgaaaatatcaaagcatacaaggaaattgacaaaacacttatttatttatatctaggagagaaatctcaaagaaaatttaaaatttatgaatccattatctttgatgcaattgcaaaaataaaaatactagctatacctttagaaaataaatcagaaatgattaagcacggcagtatcgccaaaataataatcgaagatgttcctttatccaaagatagttttgataaatatggtgatagttatgcgctgcattggctaaattatttttatacagaaacactaaatgagcttcttaatgaattaaatggaaaggataatatgattaaagagacggaagccgcaactcgtttggctattgattcacgcactgcgcaaactaatattatttcttccctgaataaacatggacttcccactgaattatttgattcacacccagttcctgacattaattaa

SEQ ID NO: 291520 - DNA, 225 bp, Morganella morganii
atggattattactactcggaaacattaatgattgataaataccctggaattcatttgcttcaggatcatataggaacaaactatggagttccatgggatgacttcggatatatcattacgttcaaagtatattatgtaagagatattgataagataaaaattggcaatataaaaatgctttccaaagcaaatgaaaacacatcactttactttactttactttaa

SEQ ID NO: 291521 - DNA, 540 bp, Morganella morganii
atgatgtctgataatcttaaaaacagcgccggagcaccgcacggcgaatttcgtattgagttacatacccgctatgcagcaggaatatggcacggccggtctgtctccggcgcaaaaaagaagctgacggggatgccgccgctgctttcgatgctctcgcgtatttacagcgattcgctggcggggagtgaacgggcgatatctgcgctggcagatctggaagcgaagctgaatgcggccggagatgctttcaggctggtgcgggatgaactggaggcgatgtttgccatgctaccggaggaaatatggatatctgatgcgatatcctctcagcaactgaccgttgtagtgcattgccaaagtccgtcaggataccgtctggcctgtctgctggttggatttgaccagttggcgctgcggattatacaggcgcatcgttatggtctgatctcgatgaaagaacgaaaagcccggttgcattattgcagccatcagatacggcgagtctttgcggttgccctccggtatcgtccggaataa

SEQ ID NO: 291522 - DNA, 975 bp, Morganella morganii
atgataaacttaaaaaataggaaggttttttttcttccagtaaatactggttataataataatggacatcccaattgcgaattaattgacttttatggtaaaagaagttccgatagaatatactgtagtatcgttggtaatgtagttactccttctggttttggaagtaataaacattgtgtttttctatctaagaacttactttggaaaaagttagctcaagtgattaatgataatggttcaattccaggtattcaaataagttcatcttggaagggatactctggaattactaattttgttgctagtgctgaaagtgatttttctcactataatacggtagtcaaaaatattaatgaaagtgatatagataatatatttagggatttttattttgccgtggatttagccatagatgccggatttaaacatatacaaattcatgcggcgcatggttatataatgagtttgcttattgactctcagttttgtgatagatacttatatgcaattaatagtctcaagaaactaattaattatatcaatagtaaaaatatagaaacttctctgagattttctttgaaaataggggtgcaatatattgataaaaagagaggggacactattgaaaaaatcatgtcaataaactccacatatcacgatatttcttttggtttttataatataaataagaatatgatttaccccaaaacaacatctatgttaatttctagatttaaattcagtttagatttgattaataaatttaatggtaatgaattcataatttctggtaaatcccttagggatatatcagtttttttaccagagaatgtttctgtcggtatctgtagagatttaattgctaatccaaattatcttgatgatctaaataatttttgcaatgattgtggatcatgccattatcattctttaggacaaaaaaaactttattgtactaaatgggattgttaa

SEQ ID NO: 291523 - DNA, 354 bp, Morganella morganii
atgaacattaatgatctaaaaaaagtacagatagagcttgataaagagattggattccctgttagttttaaaaataaaaaattaaagtatgatcaggtaactaaagatttagttggtttgtttggggaaataggggaattttcgaatattgtaaagaaaataaatataaaaaatgaaaaaagagatagttatgagcttgattttgatttagccgaagaacttcttaaggaagagttaattgattgttttatttacatattaagattgtctgctattctggatattgatattgaaatggaagtcttagacaaaataaataaaaatagagtgcgttatgataaacttaaaaaatag

SEQ ID NO: 291524 - DNA, 780 bp, Morganella morganii
gtgtcagttctatcagataaagatattaaaatcagaatttcatcatgtaatttagtagaagatagcgtttctgaaggtataggcccatcttgttacgagttgagaatgggagatgtatactatgatctcaccgaagacaacaaaagaattcagctaaaagatggtgataatgtaataataaagccagggcacttagttgtccttatttcaaaggagaggcttaatattccaaatgatattttaggtagaattattagtaaggggtcactttttagcatcggacttacacccgcgtgtaccaatgcagatcccggatttgtaggtaatataggcatagttacccagaatataagtaataaatatattgaactacctcagcttgaatcaattgcaaaaatagatttctcccaattatcaagccctgcagaaaaaccttatagagggcaacatggatatcatacacagatatggccaataaaagagcatctgcagaaaaatcataatgacgtaaaggatgatgctagagttgaaagtgaaattacagaggcttataaaattaccccaatttcaactgttgaaataataaagaaaacagtgcgttatcagaaaatcaattctaggttaatgattgttcttattttaattaatgctgctcttatcgctggggttaatatgggagctgtggatgtttttatctccttggcgattagtttgtttgcaagtgttataatgcttattgctacaaatttaactgataaggtcttaaaagatgaacattaa

SEQ ID NO: 291525 - DNA, 429 bp, Morganella morganii
atggaagcattatctgatgtgaaaatcattgaaaaactggagttagagcggcgttattggcagttaaaacaaatcccttggttcttaattactgaacatgaaattgatcccatcattagacagaatattgagtggttgtatccaactaaaacggaggggggagttgattcagggctactgtcacaacttccgttgctatatggggctttcagtaaagcaccagagaaaaaggtgattgatatttgtaaacaaattgatactgcttacaacctggaattaggacatacccttcgtgatgtgcgaactctcatagcaaatggattcctgaaatttaatattcacaaagtatttaggactatctcagcagctgaactggttttttgccaattcaatgatatggaggccctgcttcatgtggcaaatcaatga

SEQ ID NO: 291526 - DNA, 2094 bp, Morganella morganii
atgtggcaaatcaatgaagtgctgcaatttgatgggaagctttatcgcattttggctgttaattccggagagattgtatggatttgtctggatttggacacggctcggccagagcgtagaacagagttggaactcatttcttattttgacgaagggcgtctgttccgacacgttgatccttttgcttcaatcaatcttgaagagcctctggttggctcagttgcttttaataagcgcgaacaggggcttttgattattcagcccattattgttgatgagctatgttttgagccaaaaattcgagcccagcgtgtggaacaagtcagaaagtcaggtatggcatcaatagccactatctacaagttattgcgacgttattggcaacgagggcaaaaaccaaattcactattgccggattataaaaatagtggtgctccagggaaaacgcgtgcagcaagtggccaggtaaagattgggcgatccagaaaatttggtgatggtgaagggatgaaagtcacgccagatattgaacgcctattccggctcactattgagaagtatattctcagcgcggatggtttaaaaacaacggttgcctatcggcgtttttccgatctattcgaacagtattatccacaagttgaaaaagcgaacaggcctacaattcgccagttccgatatttttataatcgtgaatataaaaaagcacagcggttggaagccagaacacatccgggggtctacaagaaagatgttcgaccactaaccagcacagctacagccagtgttctggggcctggaagccggtatgaaattgacgctaccattgctgatatctatctggtagatgacgaggatcgcagtaagattatcgggcgaccaacgatttatatcgttattgatgtgttcagccggatgatagcgggtttttatataggttttgataatccgtcttatgtggttgccatgcaggctgtcgttaatgcctgtattgataaagccaatatttgtgctcaacttggtgttgatgtcagcctggatgaatggccttgtattggtttacctgatgtgattttagctgatcgtggggaaatgatgagccatcaggtagatgctttgatttcagggtttaacttacgtatcgagagtgcgccaccaagacgaggtgatgctaaaggtatcgtcgaaagttgttttcgtaccctgcaagcggaattcaaaccttatgttccaggtgtagttgtggggaacagggtcaaaaagcatggcgaacgagattatcgccttgatgcggtcatgccaataagtgatttttcacaaatcatattacggaccattctgttcagaaataactatcatgtcctggataaatacgaccgggatgcggatttaccggcagatcttccatcaataccacgagatttatggaattggggtatgcagcaccgtgttggtggattgcgtcaggttgactccttgcaactacaagtagcccttttgccccgacgtaaagtctcagtatccccttttggtgtgaatatgtggggtctttattacactggaactgaccttcttcggaaagggtggttacaccgaagtactgaggttaatcgacctgaatctctagaagctgcctatgatcccgccagtgcagatactatctatttatttcctcaggcggggaaccgcacctattgggaatgttctttgactgacagaagtcgtcaatttcgggggctgacattttggcaagtttgggatattcaagctgaagaaaaacataacaaagcaaacgcaaaacttatcgaagatgctaagcgacgtgaattggatgcgtttatcaagagtaaaactgctgatgcaataaaacagtccccctctgtaactgagtctgaccagaaacgaatccagaagattagagctaataagaaacgcgcacgagatgctgagcggcaaaatagggctaaatcagtaacggtggaacccggcaaacctttggccgatgtcatgcccctcaatccggctgatgatgattacagtcttccacattttgtaccggaattgtttgatgacggtcagggagatactgaatga

SEQ ID NO: 291527 - DNA, 1659 bp, Morganella morganii
atgagtactgctaaaattaaagcgatttatcgagatacaggtgtttcagcttatacaggtaatccatttattgaagccttgccgccattgcaagagtcggttgatagcgcaaacgcattacgttctggcatgatttttaactcggatgatcttcaaaaaaccagaattgttcgtgctcataatatttgccgaatagcagatgaattctttcagccattgggtgcgcatatgttgctgagtgagagggtttctttgatgatccgtggcggctatgtaggacggaatcctaaaacaggcgatttgcagagacatctgcaaaatggatatgaacgtgtgcaaacaggtgatctttctacattcaggttcgaggatgcaaaatctacagcccaaagtatgttactgattggttgttcggggagcgggaaaacaacctcgctggggcgaattcttcaaacctatccacaggtgatataccacgctgaatttaatttcgaacaggtggtttatctcaaagtggattgctcacataacggttctttgaaagaaatatgtttgaatttttttagatccctggacaaggctcttggtaccaattacgaaaaaacatacggccttaagcgtcgaaatggtattgaaacactattggcgttaatggcgcaaacagctaatgtgcatgcattagggttattggtgattgatgagatacaacatcttagccggtcacgatctggtggttcggaggaaatgctgaatttcttcgtcactatggtcaacacgatcggtgtaccagttatgttaattggtacacccaaagccagagatatatttgaagccgatctacgttctgcccgccgtggtgcagggcttggcgcagttttctgggagccaatgtctcagggctatccggatagacccagtcaagagtggattgcttttaccaataacttatggaagctacagctgttacagaatcgtgatgttttgctaaccgatgaaatccggtcgatttggtacgagctaagccagggtgtcatggacattgtggtgaaacttttcgtgttagcccagttacgggcgttggctcttaacaaagaacggataacggtcggattattacgtcaggtgtacgaggatgaattaaagccagttcatcctatgctggccgcgcttcgttcaggtattcctgaacgaatcgctcagtattctgatctgatggtgccggatatggataagcgtcttatccagttacagcaagatattgccgtcatgaaagaacagacggaggaacatatagcacttcagcagttagtaacagaagatgagcggcggatttatctacttctaaaagatgtttatgactcatctcttctggtggcgacgatccggaaagcttttacggaaagtccgcaattgacgataagccagctactccctgttattacccaatggctttctcagaatacggttaaagatgcagcaatgccgaatcttagccaggaaaagtcgattgccattaaaactgatgcgtgggaacagctaccctttgatgatctccgttacatcaagtcgcaacataaacgggcagttgatgtgcatgcagaattaaagtcaaaggggatattactagatctaaaatctgtattgcccagagcgagctaa

SEQ ID NO: 291528 - DNA, 1524 bp, Morganella morganii
atgcgaaactttcccgtgccatatcctggcgaacttgtttacagcatgatagcacgggctggtattcatcatggaattagcagtcccaaacagctactggatgaggtatttggaaatcgcaaggtgattgctactttggatttaccttgccacttacaagcgatttccagtctgttgaaaaacacaggccgttatagcgtagaagaattagtctatcagcatacattgtttcctctttatgcgccttttgttacagaggctcataaaaaccgggcggtaaagatgatgtcagggggctctcagggggctgttcatcttatgcttggtgtggctgcttcccgtattcaatccagtgatcgatttagatattgtcccaagtgtattaaaaatcagcatcagtattacggggaatatttttggcagcgtaattggtttttccctggccttgcggtttgtccggaacatggaacactttcaattttaacgaatggtagtgggttttaccgtcattatttctttgctatgactccacacagcagctctgcagattgtgacctgtcatcggtaaatgaagagcttctgaggctggctggttatgcaaataaattactgaatatatcgcctggatattcaccagactttgaacagtggacatctttttatcgtgatttggcttcagattttgggctctgtcgcggtaagcatattaatcatggagagatacatgaacgggtgcatgcctgttttcatccttctactttgatgcagttaaatctttataccgattcagctacggagactggttggctaaaggggatctttcgtaaacatcgaaagtcgtttagttatctcgaacacgcaataatctggcaaagttttatggctgaatttgagcctgaggatatcatcgaacgcgtgcgtcaaatcaaacctttcactaggattgtttttgaaaatacagcgtcatcaacgttgtctactgataatgaacatctacgaagtcagagacaaacttggcagaaattagtacttcaacatggcgtaatcaaagcccgcaatcgctcccctggaaaagcgttatatgcttggttatatcgaaatgacaaatcctggttgatggcgtttaattccgaacacaaagcacagcgtaaaaagcctgaactaaaagcagattggcatcgacgggatttggtagcaatacggcaattacgtgagttgattcaagggattgaaccttcttatacagggccgcgtatttctgctaacttccttttatgtaaattgcagcagagtagcaccattgagaaaaatttggataagttaccgctggttcgaatgtttttgcagcgatacacagaaaccataactgaataccagatacggcgattaactaacacatgtgtagagatgatccgacagggtgaaccattgaaaaaatggttggttatgcgtaaggctggtttaagccaggaacggcttaggccagatgttcggatagtactcaatgaattacagctattttaa

SEQ ID NO: 291529 - DNA, 1605 bp, Morganella morganii
gtgacgaaaatcaaaggatttggcgatgattcgcttgtggttcatattggcgattttttccgatataacaatgtccctgactggtctgtgagtctgtggtgtcgtcctgttcaggaaaaaaagtatactcgattagccaatttacccctgctttgtcgaggtaaattgcttaacggtaccaagccacaaagccgtcgtgttgaccgagtaatcacatttaaaccaggttatcagatctctgctactactctatcggtgtttccagatttaagtacttttcaatcagttaaagacaaagaaagtattcagaacgcattctgttttaatggtaaaaacggtgacttggttgttgtgcctcaacttgaattggcgagggggatttttctgattaattcctatctgtgccgtgcctgtttgaatagcaaaaccttaccattagagtttgatgttcgcttcgatccacccaggaatcatgtcgatattcatgttctaaaaaacaatactttccctaaaagtgcgtttaatcaaagtggtacgaaacaattgcttgcctggttgcttacagatccatcagctatggcatcatatcaaagtatttatcgacactatcagttgcatcgtgaatttaaagggaagttagaaagttggcggtttagttttgatccccctgacatgaataattggcaacttcacgttaaaggtcgctatagcaacgataaatcaatgtacttggttgaggaaatcattggtgttgtgtttgatgttgatattccaagtagtattgcatttatcaatccggactttttcaagcgaggtaccaaagatcaatcagccagagcggagtctggaggcgttaactggctgaataatgaagacgagtttgaaattgatgatgatcagacaggttcggatcagaacgagaccttgaccttggaaggtgatttatcctggattcgttttaccaagtcatttgatgtctataagcaagaacaggtgaaagacagtagtaagctggtcatgaatgaacttgccgaaaaggaagcaggtcgagaagtcagtaccgatgagccgcatcagggcggcactttacctgccgcagatgtcggcggcaaacaggatattaccgacagagagcgacagtttgccagccgttttaaaagctttgatcacatgttgcaagtgttagtcagcaagcataaatgctcgattcttcagcaagaaacattgccattaccaaaagtaggtaggagtaaacagcatcaactggaaaatggctcacctcgtgccatcagagccgtacgcgttcgataccaatcgaatgaagctgttttacttgaagttgatacttcggatgggatcaagatgttgtcgaccaaaatgattttcagctcagatgcacgggactggattgagcattttactcagatccgaagaggcattgtttcaaagtcgatttcttggccaaacgacttgctggacactctctttggcgagcaaaatcatgtcggtattcatcaccccaagcaccaaggggcagtggtgggtaatataccagtggagtcgattgaaggttgggcgttcaggttcttgcagtatttcacttaa

SEQ ID NO: 291530 - DNA, 213 bp, Morganella morganii
atgatcaaatgccacctcgcccgcttgatgggagagcgcaaattaagaatagcggatgtcattcgtgaaacaggcttaagccgcaatacagtgacacttctgtacaaagaaaaagcacaaaaagtggacttagaagccatcgacaagctgtgcgtgctatttaattgtccagttggtgagctcctagaacagtcaccagagaataatcaataa

SEQ ID NO: 291531 - DNA, 3126 bp, Morganella morganii
atgagcttcactgaagattcaagagtaaaaataccaacgatcttacacctcatgcggttgggttatgagtacctctccctgaaaggaacattgtgggacaaggatacaaatatcttcccggaattattttcctcagcggtcagtcgtataaatcctgacatgacacctgatgacgttgcccgtttgcttgaagaagtgaaactctctctggataacgaagacttagggagagcttttttcaataagttgaaggctcgatctggctctaggttgatcgatttcgagaacttttcaaacaacagtttccatgtcgttactgagttaacctacaagaacggagacgatgaatttcgtcccgacattatcttgttaattaatggtatgccgctggtttttattgaggtgaaaaagcctaacaaccgagatggtatcatcgcggaaagagagcgcatcaataaacgttttcaaaacccgaaattcaagcgctttgctaacatcactcagttcatgattttttccaacaatatggactacgtcgatggtgatccagagccagtacaaggtacgttttacgcgagcagttcatatgacaagccagtgtttaactattttcgtgaagaagaggtgttagatcttactgcgcttttaaaaccactgactgatgatcaagaactggcagtcctcaaagacaacaacttagaagtgatccgcagcaaccctgagtttttgagcaacaaagaacccagccgtccaaccaaccgaatctgtacctctttactcagcaaagagcgtttatccttcgttctacgctatgcattggtctacgtatcagagagtgatggcctgcaaaaacacatcatgcgctacccacagatgtttgcgaccaaagctattgagagaaagctaaacgaaggggttcgtaaagggattatttggcatacccaaggaagcggtaaaaccgcattaacctattacaacgttggcttcttaacggattacttccaaaaacgagaaatcattccaaagttctatttcatcgtcgatagactagacttgttgcaacaagcacagcgagagttcactgcacgcggtttgattgttcataccataaactcccgcgaagcgttcacgtgtgacatcaaagccacacaagtgattcataaccactcaggcaaagccgaaataaccgtcgtcaacattcagaagtttaaagacgaccctgacgttatttcaacgcaagactataacgtcaccatccaacgcgtttacttcctggatgaggttcatcgtagttataacccaaaaggtagctttctggccaacctgactcagtctgataccaacgctatcaagataggcttaacgggtacgcccttactgggtgaagactacaactcacgagttctttttggcgattacattcacaagtattactacaatgcttccattgccgacggctatacactgcgcttaattcgtgaagagatcgcgaccaattacaaaatgacgcttcagcaagcgctggaagaagctgaagtaaaaatgggcgatgtagaccgcaaagaaatatacgcccatcaaagttttgttgagccaatgctggactatatcatcagcgacttcgaaaagagtcgcggcacgttaaatgacgcaaccataggcggtatgatcatttgcgatagctcagaccaagcaaagaaaatgtttgagctgtttaatgctgtgtacgcctcaatgcccctattcagcagtgacagcgcggaacctcagcgagcaatatcggtagcagaaccgatccctgtttacgttcaaacggcaggcatggaaccagccaagaaagcccacaaagtgagcaatgctgcgctgattttgcatgatgtcggcacaaaacaagaacgcaaagattgggttgaagatttcaaagcaggaaaaatcgacttactgtttgtttacaacatgctactaacaggcttcgatgctaaacgcttgaagaaactctaccttggccgcgtgatccgaaaacataacttgctacaagcactgacacgcgtcaaccgtacatacaaagacttccgttatggctatgtggtggatttcgcagatatccgcaaagagtttgacgcgactaacaaagcttactttgacgaattacagtcagagctgggcgacgaaatcgaaagctactccaagctattcaaatcacaggaagagatcaaacaagagatagaacacattaaagatgtgttgttccgctttgatattgacaacatggagaccttctgtgatcaaatcagccagatacaagatagagaaactgtcttagcacttaaaaatgccctagctgatgctcgaagcctgtataaccttattcgcctgcaaggtgagtacgacttccttgatgaactggattttgccaagctaaacgtgctttaccgcgaaaccagcaatcatttggacttgctcaacctcaagcaagatcttgaacaaggcacagataccacacacctgcttcaccgagccttagaagatgtcatcttcaagttcgttaaaatcggtgaagaagaactggttttggctgaccagttgaaaaacactcttcgccaaacacgcgaagcactggcaaataactttgaccaacaagacccgaaattcatcaacctgaaagatgaactagagcgattatttaagaaaaagaatctcagtgaagtaacacaagatgaaatggtcgccaacatcgatgcactcaacaaaattcaccaacgagtgaaagagttgaaccgacagaataaccaattgcgtcagaagtacctaggtgacactaagtatgcgcgtttacacaagcgtttatacgaacgccaacaagagagacgcgatattacagactctgaaagaaagatttttgaggcactactcggagtcaaagaagacgccgatagtcaggtgctcgacaacacgtccgttctcgataacgaaagctattttgagcggcatctgctaccaaaggttcataaccgctttatcaaacaacagagtattcccttgaatgcggaagcagtacgttatgtaaaccaccttgtcgtagcagaatatttaaaagaatttaatacaggtagccaatcttggtaa

SEQ ID NO: 291532 - DNA, 1635 bp, Morganella morganii
atgatcgaactcgaatttagagaaaaaacaaaagcccttatcgataacctgaaaagcatctgtgcaaccaatggcttaggcaatagtaccggagaatttgagatcatcactcaggtctttttgtataaattcctgaacgataagtttgcctatgaagcaaagaaaatagacgaaaaaatcgctagcgcggcgaaatgggaagaagcgctgattgaaatgagtgaagaagatctagagatgctccagatccagatgggtgctgacactgcccgtcttaaaccacatcatttcatcagccacttgttcaaccagcaggacaagccggggtttgctcagctgtttgatgatactttgatggacatcgccatcaccaataacgatgtgtttgcggtaatgacggacacaggcgaaaaaatacaactgtttacccgcatcagtgagaacgtgaccgtttccaagcgtgatgctttctgtaaagcgatcatcaataaactgattgagttcagttttgagcgtatctttaaccagaagtttgatttctacgccaccatctttgaatacctgatcaaagactacaacagcaactctggcggtaaatacgccgagtactacacccctcatgctgtcgcacgcattatggccgcaatattagtgcctgaagaccagcaaggcaccgtgcgcaatgtgagctgttatgacccatcagcgggctctggcaccctgcttatgaacgtcgcccatgctatcggtgaaacacgttgtagcatctacacgcaggatatttcgaagaagtcatcaaacctacttcgtttgaatctgattttgaacaacttggtacattcaatccctaacgtgattgagggtaatacgctgtggcaccctcaccacaaggaaaatggtgatttacgtaagtttgattacattgtctctaatccaccatttaaactggatttcagtgattttcgtgatgagttggatagcaaagaaaacaaagatcgcttttttgctggcattcccaaaatcaaagccaaagccaaggacaaaatggaaatctaccaattgttcttgcagcatattatttactcattaaaaccaggtggtaaagcagcggttgtgctaccaacagggtttattaccgctcaatctggcattgataaaaagatccgacagtacttggttgataacaagatgctagcgggtgtggtctccatgccatccaatatcttcgcgaccacaggtaccaacgtctccattctgtttattgatgacagtaacaaagacaaagtggtactggttgacgcatccaacctgggtcaaaaggtcaaagaaggaaagaatcagaagacagttctgacaccagaagaagaacagcaaatcattgatgtgttcaacaacaagtggacggaagaagatttctccgttgcagttagctatgacgatatcacagcgaaaaattacagcctcagtgccggacagtacttcgaagttaaaattgaatacgtagacattaccgcagagcagttcgaggaaaagatgcaaggtttttctagttctttagatgacctatttaataagtcacaagaattggagtctgagattaagaagcagttggcggggttaagttatgttaagtaa

SEQ ID NO: 291533 - DNA, 1302 bp, Morganella morganii
atgttaagtaacgattggcaatatctgctcggtgaggagttttgttccaaagttacagatggcactcatgactcccccaaacaagctgaatacgggaaacctctgattacatcaaaacatatcaaagccgatgaaatagattttgataccgcttacctaatcagcgaaaaagacttcaatgagatcaataagagaagtcaagttgaacagtgggatgtaatcattagtatgataggggcctattgtgggttctgttttattgagcgtaacgaagaaatagattacgccgtaaaaaacgtaggattatttaaaacaggttcagaagtaaatgcaaaatggctttattactacctgaactcatcaattggtaagagccatcttgataaagttaagggtggctcaactcagccatacatagcactcggttcactaagaaaactgccaattcttgtaccaaaaaatcatcaactaaaagaagatattgttagagttttagacgctatagactcaaaaatcagagtgaacaaccgcatcaatactgaactagaagcgatggcgaaaacgctttatgactactggtttgtgcagtttgatttcccagatgccaatggaaaaccctataaagcttctggcggtaagatgatttacaacgataccttgaagcgcgaaattcctgtcggctggtctgatggaacattggataatttaggtcagatagttggggggagcacaccttcaactgctgataaaaataacttttcagaacaaggtagtccctggattactccaaatgatctttctgggaacattggaaacaagttcatttctaaaggtgctatgggtgtgacagcggaaggcataaaatcagcatcacttaaaaaataccctgctggaagtgtgctgttaagctcaagagcaccaatagggtatatggcgattgcaagaaatacactgacaacaaatcagggattcaaatcttttgttccatctaaagggttcccaacagagtttgtctatttcactgtaaaaaatagcctaaaggcaataattcaatacgcttctggttcaactttcaaagaagtatccggaactgttatcaaaacagtgaaattagctcttccaccaaatgaacttgttgaagagtttaggaaaaaagtagaagactttttcaaaagacaagacaccttagaacaagaaaacgaacagctaatagcattgcgtgactggctccttccgatgctaatgaacggtcaagtaacggtaaaacccagaactgaagtacaggaggctcagcatggctaa

SEQ ID NO: 291534 - DNA, 1014 bp, Morganella morganii
atggctaaagatctcacagagtctttgcatgacagacaaaacattcttaataaccgttacgctttgcaaaaagcagagcaacacctggcattaggcggcgtgcagtttgacggtgaaacggtatttaccaaacaacaggtaatagaactatttgatatcagcgacgccaccgtagagcgttacttgtcttcgcacggagatgagttaaaagcaaatggttacactcttctaagaggagctaagctgaagcagttcaaggagatagccgttggtaccctcatcagtgagggtaccaaaacgacggtgttaggcatttttacttttcgcgctattttgaacctagggatgctactcactgatagcgagcgcgccaaagaattacgttctcgtgtactcgatattgtaattgatgtacttgcagaacgcgcaggggggcacaccaagttcattaatcagcgcgatcaagactacttgatggcggcgttccaagaggaaaactaccgaaaacagtttaccaacgccttggacaaatacgtagacggcaataagtggaagtatggccgctttactaacctgatctaccaaagcatttttcatgagaatgcagcggagtataaaaaagtactcaagctggccgaaaaggataagatccgtgaaaccatgtactctgaagtactcacgcttattgctagctttgaatcaggcatcgctcacgaactagagcgccagagtaccagtctgggccgtccattgacgcaaaaagaagctgagctgctgtttgtcagttttgagcagcatccactttttagaccgctgataaccgatgccaggactaaaatggccagccgagacctgtgctttagggacgctttacatgaaaaactggaggcttacattaaatccgtaccagaagcagattttgaacgcttccttggcgagaaaagtaagtctcttgaagagcagcttagcgatcctgaaacgcttgaagtgtttaaacgtttgaaggaccgctga

SEQ ID NO: 291535 - DNA, 471 bp, Morganella morganii
atgaccgacgacgctcagacacggtatttttacttcgatgtgacgtacgcagtgagtacccacgattggatcatcgaaaaatcaggcggtttaacgggaacaaaagatatcggtcaacttgaaagcccactagagcatattcaaaacgactggtattaccctgcaatcgaagacaagctgacgcacttagtgttttccatcaacaaaaaccatgccttcaacgatggcaataaacgctcatctctggcactcggagcctactttttagagctcaacggatttgactacatcgtgcagcattttgttcgcgaaatggagaacatcgccgtttgggtcgccgataacgttattgataaagagctactgcataaaatcattagctctattctgtatgaagatgagtactccatatcgctgaaactggaaatttatgaggcagttcaacgagccgaggaaaacagacagcggtaa

SEQ ID NO: 291536 - DNA, 588 bp, Morganella morganii
atgtgtataagagacaggctatatattattcctgaatcatcatataacaacactattgatttatataaatgtatagaattcccttataaatgggaaaaaataagaacactcattgataatatatctgctgttgatactaatttaattaataaaaatgggctatggtacctattaacctctgaaaaaaaaatgggtgtatcatttggtgatgaacttagtctatatgttacagacgacccattaagtggaacattcttacctgttatcgggaatcctgttgttcatgatatttcaaagtcacggaacgccggtgagatattaaataatataagagtttctcaggattgttcaaaacgttatggttaccgcgttaattttatggaaataaatgagctatcggagaataattatagtgaacgttatataaagagcttgaaattaccatttggaacaatagcaatgcatacctataatagcgcagaaaatattgaaatagttgatttaaaaatcataaatatatctccttattttttgtataggaacctttgcagaataattaaaaaactaaaaacaaaaatattaaaatga

SEQ ID NO: 291537 - DNA, 168 bp, Morganella morganii
atggcaataaaaaacggtcaggtttcacaggttgccccgattgataaactgagtgtggtctttgccgttatttttgccgtgatcctgttcggtgagaaaatttccctgattgcagccggtggcgttgcgctgatcaccgttggtgcactgatggtcgcgctgggctga

SEQ ID NO: 291538 - DNA, 189 bp, Morganella morganii
atggtgcgggctgcatccgaaatggtatccggtaccgtggtggcaatggagtatttcgcgccgctgagcgtcaccggggcattaaatgacaacaccagttcggtatcactgtttaccgcgcggatcatcatgctgactggtgctgtgccgttctcgatgctgataagctggccgggtgccacgccgtga

SEQ ID NO: 291539 - DNA, 1227 bp, Morganella morganii
ttggatggtaccctaaaaaacctatctttaggctcagtaccaagaaatttaggaagtatagagaaagattaccgtcaatatcgcgatttagagattgatgctaaaagtcttttaaagcaaattaataactctgtatacttagcacttgatcattttacagtcaaagatgattattcaattgctgaaaaagactttcgtagcaaagcagctatattacatgcaaaaataagaaagttttccaataaaggacgaactatattaaaagaagagacattgcgtttcgacgagataacaaataatacaaataaagctttccatgaaaaaacatctcaatatttatccgatctacaagaaaatagatcttcactcaaaaaaacactcgagaatttagatctcgcttatcagattcaagacattgaaataaatcaaacctacaccccatatatcaccgcattagaaagcttaagagaggaaattgatttagaaggcctcgcgatctcttcagtcaacgaaaatacacgtttgaagaaacaggtggagcaagtgaatgcactcgctcaacttggaataactgtggagataattggtcatgaaatcgaaggtttcgatatgactattgagcgaggtataaatagattgtcattgacaaacctcgatgaatatcagaaaaatgcgctatcaagtattactcaggcacatcaatcattaagcgattcttggcgttttctaagcccattaaaattatcgggagataaggtaagagctttcttgagtgggaaagatatttttgattatgttaatcattttttcaaaagtaaatttgaaaaagatgttattgaattttcttgctctactaaattcttagatatttcactatatgatcaaccagccagaatttatcctgtgtttgttaatttagtaaacaattcacgatattgggttaaagaaactaaagaagaacgtcgtattattagattagatgtgcttgatggtttgatatatgttagtgataatgggcctggagtcgatcctgatgatgtatcagagctttttactatatttttctcaaaaaaacagaggggtgggcgaggggttggtctttatctttgtaaacaaaatttagcagtgggtggtcatagtattttctacgaaacaagaacagataaaaaaatgcttaacggtgctaatttcgtaattaattttaaagggattaaaaatgcctcataa

SEQ ID NO: 291540 - DNA, 333 bp, Morganella morganii
atgaacaaatatcgtgacaaatcagactttgagattaataaggctgtgtttcacgccgccagaataaagcataaatggtttaaatttttaccgcatggcgtggttatttataatatcaaaggtgattgggtaatcttcgacccatgcaacaacccagcggacgcaatgccgattgttattgagaataaattaactttgtcaccaagatacgatagcgacgagtggatttctgaatctattttttatcatgacatttactcagtaaataaaaacccactacgcgccgctatggaagtattcctgatgatgaaagaggcggagaatgaaaaatag

SEQ ID NO: 291541 - DNA, 261 bp, Morganella morganii
atgggcgacatgggcgatatattccgcgcaatgcgtgaagatgccaaagaacggaagcagcagcgattaaaagaaaatacagggaagttatcagggattgatattccatttacacaggacggaagcggaacaattcatttttcaacaccagccggaaaagttctgttttaccccaccacaaataaaattcagcacaagcaaaaggtcacacgcggcaatctggaaaaggctgtcgtactggctaaaagtcttggtgcataa

SEQ ID NO: 291542 - DNA, 540 bp, Morganella morganii
atgtcagatattaattattactttaataatacagacaaaacgcatccgtttactgttgcatctgaagcaaataaagactcgttcccgccggataatgctctacgcactaaaccggtttttaaagaaggtttctggccgtgtgagcaagatggggcgtggattttagttgcggatcatcgtggcacaaaagtgtatgacacggcaaccgcgcaggagtcagagattaaagaacttggcgaattgccggacgacgtaaccactctcgcgccggatgttgagtttcctaagtggaacggcaaaaagtgggtgacagataaagcggcgaaaaaggaaagtgagatagcagcggctgaagccaaaaagcaatatttgctgtcagaagccgccgaagcaatagccccgcttcaggatgctgtcgatctggatatggcgacaccggaagaagaatcagccctgaaagagtggaagaaataccgggtgatgctcaatcgtgttgatacctccaccgccccggatattatctggccggtgaagccttaa

SEQ ID NO: 291543 - DNA, 543 bp, Morganella morganii
atgactgtcattaattactatttcaaccatgaccactcgttacacccgttcaccgggtctgattatgcgaacaaggattccttttccccggtcaatgcgctgcgtatcgaaccggaaacactgccgggattttggccatgtgagcagaatggcgcatgggttcttattccggatcatcgtggtacaaaagtgtatgacacggcaaccgcgcaagagtcagaaattaaagaacttggcgggctgccggacggtgtaaccactactgcaccggatgttgagtttccgaaatggaacggcaaaaagtgggtgacagataaagcagcaaaaaaggaaagcgatatcgcagcggcagaaacccaaaagcaatacctgattgccgaagttaacgccgaaactcagatgctgcaaacaaaactcgcacttggccgtatcaaggatgatgaaaaggcactgttaatcgcctggctggattatctggatctactggaagctgtggacacatccaccgcgccggatatcgactggccgcagaaaccgcagtaa

SEQ ID NO: 291544 - DNA, 819 bp, Morganella morganii
atgaataagcaagaaattatcgataatctcaatctttttaaaacaagattaactgatgaggttttacaggctttctattcaagaggtcgagagtttggaaaagaaagatttaatgcatggatacgtaagtttactcggtttttagacgagaatcttccgagtgaaacatcagtactaaatgataagcttactcattatgcatcaatggcacgccgtggtgaaagtgctgcgcaaagatttttgcgagaggatgggaatactatgcttgcttatattgattcattaattttggatgtggagaatgatgaatacgatattcgtgaaacaaagtatgaagaaaaaaataattttgaagtaattccaaatgataaacctaagaccaaaatattcatcgtccacggtcatgatggtgaagcaaagcaaagtacagctcgttttattgaaaaacttggttttgaagcaatcatccttcatgaacaagctagtaagggtatgacaataatcgaaaaaattgagaattactcaaatgatgtgggttttggaattgtattgtatacaccagatgatatgggtaataccagacgtgaagcagaaaaaggcgatctgaaaagtagagctaggcaaaatgttgtttttgaacacggatttctaatcggtaaaattggacgtaaaaatgtaatcccattagttgaaggagctattgaacttccaaatgatataagtggtattgtttatataaatgacaaggaatggcaaattgacatagccaaagaaatgaaatccgctggatatcatattgattttaataagctattgtag

SEQ ID NO: 291545 - DNA, 990 bp, Morganella morganii
atggataagcggtatcaggtttttgtcagttctacatttactgatttaaaagatgagcgccaaaacgttattcaggcgttgatggaaatggattgtataccagcgggtatggaactttttcctgctacggatgaggaacagtgggaatttatcaaaaaaataataaatgactgtgactattacttacttattattggtggtcgttatggctcgttagctaatgacggcattagttatacagaaaaagagttcgattatgctgtttcacaaggaataaaaatcgttgccctaattcacgaggatcctgaaaatcttgttgtcagtaaatctgagatcgacccgataaaaatcgaaaaactagagaaatttaaagaaaaagtaaaaacgggccggatggtgaaattttggaaaacaacttcagaattacctggcatgatgtccttaagcctgaataaaactatgaaaatgtatcctgctgttggatgggttagagctaatcaggttgcaagtaatgagttactgacagaaataaatcagctcagaaaagaaaatgaggaattaaaaaaagggaatgaaaatgggattgaatatattataacacatgatgaaattgaaaatctcaaacatcaattcgaagttgacataacatattaccatgaaatggatattgggctaagccatggattacatcaaaagatctcttgttcctttttagactttttttccagaatatcactatatatattaaaatccttcccctatgaagatataaattcatcaatttcaaactcaatgttaaaaaggaaaggtattactgatttcagttattcggagatcatagattatgactttgatagtatattattacaattatattcacataatttaatttccctagataaatctataggcggtggtctctccttagaattaactgagaaaggaaaacaattaatgatggatttaagaacagtaaaatttgattcataa

SEQ ID NO: 291546 - DNA, 927 bp, Morganella morganii
atggcaagaaatataatgatggattatccaacccccgcctactggcaggactttgaaagactgacatgcgaattgtgccgtgcgctatggaacgatccaggcgcacagcggcacggaagagcggggcaggctcaaggaggaattgatatatctggtcgtgataataattataatggccagagagttgtggttcagtgtaaaaagagggtatggaaaactgtagtttcaaaggaaataccagttagtactcttacaattcaagaaatcgatggtgaaataaaagaattcattaattcagggaaaatggctgatcgttatattattgcaactactggaccacgggataaactacttcagaatcatattgactccataaatgactctaaagttaatgtttttgaagtaaatatctggttctgggatgattattgtgaatggctaagtgaaaaccctaaaatagaagcagaatattatcacgatatcgttaagtttcgcagtgaatatagcgctgaagatttattttgtgaaatgctctattctgcttttgatcgacctgcctttcatactgaattctattgcgaaaacaatataggcaactttttgcaggcacttgagagtattcaacaagcattaactacaggaaatcttgtaaaccgagaggggcatgtacaaaagcaggttcgtatacccgataaaaataaattacctcttgaatataaggaattgaagaaaaaaattcaaaaattaagggattatactacacaaaaggtacgtacggacgctatcacgcagcaggatgagtggttaatcattagtaatagaaccattatagaagaaatgaatgaatttagaattgaaatcatatgcttattaaacaatattctagaccattatgggtttgagcgtttttcattagaaacctattaa

SEQ ID NO: 291547 - DNA, 345 bp, Morganella morganii
atgtttttaactagttttatttttgagaaaaatcaatacgatgatgaattttatatcttggataagaaaattgaagattatgcagtcttgctgctcggtttttctgggatggaaagttacatagataagaattctggacgactcattaataattattattgggaaagtaaagaagctatggagcaatttatgtttaatctcgaccatcaaaaagctaaatcgacagataagtcatggatagccggttatcagacaatcatagctgaaatcattggcgcacaaaatcacaatctttcacacccaccgtccaaaaattttattgcatacataaaaggtaaaaattga

SEQ ID NO: 291548 - DNA, 1167 bp, Morganella morganii
atgaaaattaatactatttgtgtccattcaggaaataaagatgatgatacatatggtgccttacataccccaatttacttaacaagtaactatcggataccaactgacggaactcctgtggattggagtggcattcattcaaatatttatgccagaaacagaaatgtgaaccagtctgttttagaggataaattaaaggaaattgaaggagccgaggattgtgtcacgctggcaagtggtgttgctgcgttacattctgtgtttgcaacacatttaaaacatggtgaccatgtcatctgctctcaggtctgttacagtgcagttaatattctgtttcgtgacatcttacctgaacaggtaggtattgaagtcagcatggttgatacccgagatattgaaataatcagagcaaatataaaatctaacacaaagttaattcatattgaaactccggggaatccaacaaccggaatcagtgatattgctgaaatatctaagttagcaaaagataataatatattattatctgttgataatacatttgcatcacctttatatcaaaaaccactatctttaggggctgacttagttgtacatagcatgacaaaatatattaatggtcatggtgatgcactgggtggttgtgtattaggcagtcatgaattgatagaagacattaaattaaaagctatggttaactttggtggcatcatcagtccattcaatgcctatttaattaatcgaggcttgttgacacttcctctccgtatgaaacaacattctgaaactgcaatgaaagttgctgaatttttatccacactaccatttgtgaaatttgtttactaccctggattaaaatctcatccacaacatgatattgcctgtaaacaaatgacgggtttttcaggtatgattagttttgcattgcatactactgaagaaaaggttaattatacattccttgataatctatctcttatttcacatgccgtttcactaggtgatggtgaaacattaattgtatataatgataaatcatcagaaaaactgccgtactacccaactgaattccataatggatttttccgtcttagtattggattagaagatgctgatgatttaattaatgattttaataatgcattcattaaatgtaatttaaaataa

SEQ ID NO: 291549 - DNA, 1263 bp, Morganella morganii
atgattaataaatatgactctaatgatttagtttggtcactaggatgttttggtacagctattggtgccggagttttgttttttccaattacagcgggtatagcaggagctataccttttttaattatgattgtaattgcatttccaatagcatacctgtgtcatagtgccttaattaaatttattactacaggaaaccgtgacggagttaatgatataactaatgttgccaaaatatattttggcgaaaatggaggaaaaatagttacattactatatttttgtgttatttgccctttattgtggatgtatggagttgcatttactaatactattattaattttcttgaacatcaagttcagatatcgtctccaccgcgagcaataatatctctcgtaggtgttattttcttaagcattataattcaatatggccgtgatttaattgtaaaggtagtcagttttattgtttacccatttattctatgtctggtaatagtatcactgtcccttattccctattgggatggaggtattttccaaggtggggctgagcaaaatattgattttatagacatactaacaggggtgttttttggtattagtgtgatggttttctcattcaatcactcccctattatttcatcaatgtgtgtagcttataaagaaaaatatcctgatgaaaataatgataatctgatacgtaaaattcagaaaacagaaaagatagcttctatattaatgacatttgtagttatattctttgcaataagttgtgtgctgactctttccaaagatgatttggctctagctaaagaacaaaatgtaactattttaacatacctggctaattcattttcaagttcaaatgaaagtgaatttatcctatcatcaattttaatgtgggcagcgccgataattgcaataatttcaatttttaaatcattttttggtcattatcttggtgctctagaagggttgaatggtttaataaagggaatgtttaaaaataataagactgcaaattacttttctcttattattattatgggatccacatgggctatagcatggatagacccaggcattcttgatatgataaatattgtatcagctcctctgattgctatgcttctttgtattatgcctgtttatggtatatttaaaatagaacgattaaaacagtataaaggactttctacatactgggttggttttatcggattggtaacattgattacaagtgtaattaacatgatttag

SEQ ID NO: 291550 - DNA, 1104 bp, Morganella morganii
atgaaatataaacaaatttatctacaaaaaataataattttcgcattgatactcgggggtaatgcttacttatcaaaatattactttatatcaccttctcatatatttttcttaattgctatactatcctttctaatattgatttttacaaaattcaagaataaaaactttaagataaataaaaaaaaatatcacatagcagtagctataatactatattcttcatatactctattcatatcaaaaacaaatacatcaatactagaatggatgaaagaaaatataggtataattcttattattatttttatcctttctgattccaacaatatctcatataaaaagacgatttttttttcaattttctcacttctcattacatccactgttgatgtaatatatctctacaataaattttcaaatgatttattcttagggtatagaaatattgaattaatgtatgaaataaagaagagtagcattctatacttagatacaaacttcacttcactatctatattatccttaattgttttattaatagaaaacaaaggagtaataaaaaacaataaaatcacatggttattaatactactatccatagtatatctgatttttttatattctcgagcctctattatttcaattattgcatacctaatactacgcaagctatctaataattttttaaccttagcattattaatactatctttaacttgtagtatatttttcatattctttaacaagatacacttagattactcattcgaaagtaaactagagataatcaataatcttagattatatttttccgctattgactttagtgatatcatattaggcggaggtgcaggatattcctcatatgcttttaatattataggtacggatacaggctcccatttattatttgtaactatactggttaactatggtattataggatttttactatatatctatatggcaattacgctctgtataaatagaagcattaggaattatttactattactatttatcttatcgttttctatgttaccaatcgcttttccttctatatttataacaatcggtattttatcaaaaaaagatgaataa

SEQ ID NO: 291551 - DNA, 2940 bp, Morganella morganii
atggccgaggttgtagcaaaatactcagatgtgcttcgaagttggcaagatcattgttttaattttaatatcgccgaccctcaatcagacattcaaggactccgaaagccccaactggccgccatttatacgactttagggcatttggtgactgctccttctacaccagcaacggtagttatgccaacaggtactggtaaaaccgataccatgcttgcgctactcatctctgggaaaatggaaagaaccctgattcttgttccatcagatgcactcagaagtcagttgataaacaaatgtgcaaactttaaaacactacgtagtataggcgcggtatctgaagttgcgctgaatcctgtcgttgtagcaatcagctctggaatgtctaaggaaaaagttctacggctttctgcagcaaatattattatcgcaactccgcaagcgctacgattattcgacggggaagcaattaaagctctaggggatatatgtagccacctatttattgacgaggctcatcacgttccagccaacagttgggataaagtcaaaaatattttcaaaggtaaaccatgtatccaatttacagcaacgccatttcgggaagatggtttagctttagaggggaaaattatttataactatcctcttaaggatgcacaaaacgatggttatttcaaaaacatcgaatttcacccagtacgagaatataatttagacctttcagataaagctatagcggataaagccgtagaacttttgcgaagagatattgacgctggttataatcatctactgctagttcgggcgaaatcacaaaaacgtgcaaaatttctttttagtatttacagcgcgtatacaggcctgagttccatcttgatacacagcaaagtacctaatcaggcgaaaatttttgcagaaatcgtccaaaaaaaatatcgcattatcgtctgtgtagatatgctcggtgaaggttttgatttaccggaacttaaaatcgcggcaattcatgaccagcataaaagcccagcagtcacactacagtttattggtcgactaacaagagtggataacactcttggagatgccaaattcgttgccaatattgctaaccaaaaaactgatcaccagatgtcagaactctacaaagaaagtgcagactgggggaaaattatccgcgacgttagtcaggatagggtcagtttcgaaattgaaaaagaagcttttaatgagcaattctctgatgacacagaatcagattctatctttagcctaaacccaaatcccaaaatcagtgcaatggcttatcgtttacctccccaaaattggcacccctcaaaagctcgagacttcgatggcctcagagagaaactgaaatatatttctatcaatgatgatactgatacaatcatcatggtaacaaaacgcaagacattagtgggatgggctcaaactgaggctattgttaacaccaactgggtcttatatctggcattttataacaaacctgagaacacgcttttcgttcacacctccggagatgaaacacaagcagcccagttcttaaaattaattgctaaagatgctgtgcgtatcaatggtgaacctatcttccgttcacttcacaatatcaaattgatgaaattacaaaacgtaggtttaactcgggctcgaaaggatctccgatttacaatgcatgttggacatgacatcaaccaagtcattactgacatcgaaaaaggtaatgcgaagaaatccaacatatttgctactggattcgaactaggtgaacgcactacagttgggtgctcacacaaaggtaaaatctgggagatgaattcatctcccatcaactattggattaaatggtgcaaacacctctctacaaagctcaatgaccgctcaatcgatccaggcgatgttttgaaaaacgtcatgagagcagagaaaattgaaaataaatggcccactggtctattttactgtgattggcccgaaacaatcgcaattgaaacagagcagaaagtctcactcatttttcaaggcgaaagatataatctactcgatattatactaggcagaccaaacaataatgataacctaactctgagtatccctgtactcactatcgataacaatggagcagagcaacaccttacaaacatctatatcaagctattagcagatggttacaaaacatattgtcctgacctaaaaattgttttctctcaagagataccactggatgaatatctggatagagaagcccttgtgttgctaagcgtcgacgggtcaatgatccacggaaattatcgttacttttcacccaacaacgtaaatgtaaaactccccaaagctttgctcgaaacatgggactggggaacaacaaaaatttatcaggagtcaatgcgcgcagaaaagcgttcagatagcgtacaaggcttcacctaccaaaaaattactgataacttcgaaattgtcttcaatgacgatggtgccggtgaaatcgctgatctcgttgctattcgcgtagataacgacaggatctacattagtttattccattgtaaatactgtcctttgactggaggcaccgcgatacccggttctcgcttgagcgatgtttacgaggtgtgcggccaagcatccaggtcagtaaagtggctatatactggcgagaaactttttgatcgtctgctagatcgttaccaaaaatctctttcaacgggttttgaccgaatacttaaaggaacaccacaacaacttgaaatattacgcaacaagtgccatgatcatgagcttgtattcaatttttacatcgtacaacctgctatctcggccaagaaagtttctgacgaacagttagccgttttaggtacaagctattcatacattaagagcatctccggttcagatataaaggtcatcgtcagcccttga

SEQ ID NO: 291552 - DNA, 870 bp, Morganella morganii
atgtctaacgatgcattaatgatcgcgagttctattttaagtttacagcaggaggcgagtgattttaggaattatatttttccagtattgactactttagtatctgtattacttggctatttagtagctaataattcttttactaaacaagaaattacaaaatcggaaattgaacgagttaatgattttaataaatttcttgtaacaatagatagcggcatgcaaacacttatatctgtaaaaaacacatataggaatagattgaattctgcaccgattgaaagagcattaagtatacctacaattgactgttatttcccacaaacaccagatgttacattggttatttttttggctaaggctaatgaatatagtgactctagtaacttttatgacacttggaataaccttcctcgtgtgaatgctatgctgggtaactttcaatatcttcgggataaaataaaatatcgaaatttagtattggcgcaattacgtgaattttataaattgaatgtacaagggcagagttttattaacccagcctcactaacaagcgagcagattaaagttttaaaaacagtagtagacttaacagaaggcgtcgtgtgtctggttgagggattactaaaagaatattattcatgtttaaggaatatacctaatgcagccaaattggctataaatgaaaaactaacaaaaaaacatgttgaaatattaacctattccaatccgtctccccagtttaaagaggcatttgagcctattccagaagtaaatatttctcaactggctttattgttaggaactacagaggaagttgtcagaaaatcatatataacaggatatgaaggccttgacgttatattttag

SEQ ID NO: 291553 - DNA, 537 bp, Morganella morganii
atggatagtgatgatatcgcaataaaaaatcgcctcatgtttcaagctgatttcttagataaaaacccacatattgatgtatgtggtagttactgtcatgaatttggttctaatttttcattaaatgaaaaaaaattaccaatctctcatgatgaaatactaaattttagtatttatcgctgccctcttattcatccatgtgtaatgttccgaagtgaaattttcaaatccggctatagatacccaacagatactaatctaactgaggatatggcattgtggttcctattattagaatctggatttaaattccataatattcctatagttttattaaactatagattaagtgaagatacaattaatagacgaaaaggcatatcaaaagcaatatcagaaatacgtgttcgattatattacatgtccaaactaaaaaaaacatcaataaaaaacattatattaatattatccagattaccatttcatctattaccaagtttcataataaaattcttttataaaaattttagacagtaa

SEQ ID NO: 291554 - DNA, 1437 bp, Morganella morganii
atggaagctccaaaattatttatctcttatagttggtcaagtcaggctcacgagcaatgggttataaacttagcgacagaattaacggaatccggtgttcatgtcattttagataagtgggatcttaaagaaggaaatgactctgttgcttttatggaaaggatggttacagatccaaaaataaccaaggttgctatcatttgcgatgaggtgtatgcctcaaaagcggatggaagaaatggaggcgttggtactgaaacacaaattatttcgcgtgaggtgtatgaaaatcaagatcaaggtaaatttgtagctgtaattgcagaaaaagatatacaaggaaatccgtatctaccaacatattataaatcaaggatatatatagatttaagtgagccggataaatataatgaaaattttgagcagttattgcggtggatatatgataagcctcttcatgagaggcctgcactgggaaaacgcccgtcatttttagatgaatcaaacggaatttcgcttggaacaacagcggcatataaaagagtgttgtctgctattcgagaaaataaaatatttgcaccaggcgttttagatgaatacctttatttattttcaagtaatcttgaaagattcagaataacaagaaatgatactgagtttgatgatttactaattgataatatagagtcatttattccttatagaaacgaaatgatatcaataataataaatctggctcagtattcatctaccagtgaaaatattgtaaagctacaccgtttttttgaatcactaataccatatatggataaacctgaaaatgtcagtagatggtatgaatcagactttgataattttaaatttattatccatgaactttttttatacacagttgctattttaataaaatatgaaaaattcgctgaagttaatgctttattgacagagcaatattatgttgttaaaagcgcaagaagcggtgagtctaaaatggttgattacagtgtatttagggagtatttaacttcattagaatatagaaataaccgtttggatttaaaaagattatctcttcacgcagatttgcttaaacaaaggagtggtatttcaggaatagattttcggtatttaatgcaggcagatttcgtgttgttcttacgtaatgatataaaacagcctgattattataataggtggtggccatatacattaatatatgctggtcattttcatggggcatttgaaatctttgcaagatcatcatcgaagtcgtactttgaaaaagtaaaaattattttaggtattgatgatatatcagagattaaaaaacttatgactcgctatcaaaataacacagatctcataccacaatggggctatgaaagattaaatcctactaacttacttggatttgaaaagctatctacaatagaatga

SEQ ID NO: 291555 - DNA, 606 bp, Morganella morganii
atggctgagtggaaaggggttccgtttttttttgatatgactgatggcctatcagtagtagtggaaagtatcccgcgggttatagtggaaacaccattttcttgggaaaccgttttgggatcactacttgctgcggctcttccgtcactaatagcatggaaggcattaagcgaaaaccgcaaacttattgagtatcaaaatacattatctaattctagggaaatgattaattcactgagaataacaacggcagtttatttgtcaaaagttgaatatatagctcagtcacttgagcaatattcattgatgataataaatggtgacggtgtaaataaaaataaaattgaaagttctataaatgatgacattaaagacgtaaatcttgaatctaggaaattatctcttctacttaacgaaaatgttgagttgcaaaaggattttttggaaaaaatagttgaattgaatagtaaaataaataatttacaaaaaattagcataaatggttctatagatgttcccatagagaaagataatgttataaaaagtataaataaccttattagagatatgcgtataattttatttaatatagagaagcaatattaa

SEQ ID NO: 291556 - DNA, 312 bp, Morganella morganii
atgtattggttttatatgatgttagctattatttttgaaattattgtaggtatttccgcagggaatgcaaatggatttaaacagttttggtggactacaataactctggtcagtggaatcattgcaacatattttcttagcttatcattacttacttttgatgttggtgtaggatatgcaatatggacatcattttcaggtataggtatttgtgtttttggtgttatttgctttaatcaaagactaaatataaaaaaattaattggcattttaataataataattggtgtgattgggcttcgtatttgttaa

SEQ ID NO: 291557 - DNA, 1029 bp, Morganella morganii
atgatgacattggagaccagagtggagattagtgttttacaccgtcagggcatgtcgatacgcgccatcgcgcgccagctttcatgctcccgcgagaccgttcgcagatatattcgtagcccgctgcccgtagcggatatgcggtataagcctcgagcaccgagaccctgtaagcttgacccgttcaagccttatattcttgaacgtgtcgcggcagccaggccgcaatggatacccgccagtgtgctactgcgcgagatccgacaacgcggttacgatggtggctacagcatgctgacggcattcttgcaacccatgaagcagcctgttaccgaggaagtcacgcgttttgagaccgagccaggcgtacagatgcaggttgatttcaccattatcaggctgggtcataacccgttgctggcctttgtcgccaccctgggctggagccgcgcgactttcgtcaagttctacagcaaccaggactccgctgcctggtgtgatggcattgagtctgcgctcaggttctttggcgggacgccgcatcagttgctgttcgacaacgccaggaccatcattattgagcgggatgtctacggccccggcaagtatcgctggaacccgcagttgatgcacgtcgctgaaaagtatggctttactcccaaggtctgccgcccctatcgcgccaggaccaagggcaaggtggagcggtttaaccactacctcaaaaacagttttgtcatccccctggccgcgaccttccgccaggcaggactgctactggatgtgcccgctgccaacggccgtattggcgaatggctggtcaccgtcgccaacatgcgcgttcatggcaccaccggagtaccacctgaacagcggatgccaagggagcgtgctgcgctactgccgttaccgaaggtgatgctggcattgcccgcgccggtcccggcggccaagtcgcgtccggtgccgaccgagagcctgcaacatcctctggcaacgtaccaggccttactggaggtgcgggtatga

SEQ ID NO: 291558 - DNA, 789 bp, Morganella morganii
atgaaccttcagcatgaccgtatcgcagcgctctgcgaacaactcaagctcgaccgcctgccggcagagtggcccggtgtggcacagacgaccatcgacaacagcggcacgcatgccgacttcctggaagcggttttgcagctccagaatgatggcctgaacgaacggcgtcggcagaccattttgcggttatcaggtctgccggtgataaaaacgctggaacagttcgattatgcctatgccagcggcgtgccacgaagtcagatccaggagttggcggggctggcattcatcgaacgtcaggagaacgttgtattgctcgggccttctggcgtcggcaagacgcaccttgcgactgccattggctacaaggccgcgatggcgggtttaagcattcggttcatcaccgcagccgacatgatgctgcaactgatggcgtcgcaccgtcagggcgatctgaaggggtacctgaaccgcgtggtaggtaaacctaagttgttgatcatcgacgaagttgggtatctgccgttcggtaaaatggaagcgaatctgttctttcaggttgtcgctaaacggtatgaatcaggcagcgtcattctgaccagcaacctgccgtttacccagtggtccggaacgtttggtgatgatgagacgttgacggcggcgatgctggatcggctgcttcatcatgcccacatcgcacaaatcagcggccaaagctatcggctgaaagataagctgaaaagcggtcaacttcagaagaaaactaaagcagtagatctcaattaa

SEQ ID NO: 291559 - DNA, 1212 bp, Morganella morganii
atgactatccttcggtgtacaaacgctccagttaagttaggtcttgcccgctatgcctgtgcagcaatgctggcacgcattgctgatggcggtggagtactagcggtgattttactgtgccagtcatctgaacagtatttcacaataacagggtggatggcggcctgtataactctcccccatatgctggggccgtttattgcccgcagtatagatacagccaatgacgggcgtagagttattgcaactgcttgcctagcttatgctactatcacagcattaatgacagcaacttttggccacatccctttacttttgaccgtactacttcttatcgctgcaggactttgcggccctctactgacaggtggaattagtactttcctacctaccattacaggaccaagccagaaaagccagcgccgagctcagggtctcgatgtggcaacctacggtttcggcggcacacttggcccttctgctgtagctgctatctccacttgggtttcgccttctgcggcattttaccttctggccgttagttctgtccttgccgcattctttatcatgcggctaccggtttcactagtagcaaacaccggcaaggctgcaaaaattaccagtgctatcgcaacaatgggtttgatgatcaagcatacacaactgcgcagaacattgtatctaacaatgactgttgcttttgctgttgctgtcctgcctgttgctgcagtgaacctggcagatgttcttggtgttcctgcaaccacggctgcttttcttactgtggcctatggggcgggtaatctggctggttcagtgtgcctgatggttattccgctgagaggtgaacctgacagactgatgctgaataccggcggactgattgttgcagggctactttccatttttatagtcagcagttttttgcctgtgtttatatgcttcttcattactggaatgcttaatgccgccttcttcgccgccacgcttgcagcacgcagtgaatactctcctccttcctgtcgggggcaggtttttgtctgggttggtgcaatgaagattactgcaggatcgcttggtaccactgcagcaggccaattgatgctactgggggcttatacaccactgattttaagcttgtgtattctctcagcagtgctagttatttctcttgtggctcgcacctggccgtttattaaatctcattactga

SEQ ID NO: 291560 - DNA, 222 bp, Morganella morganii
atgaataccactgataccaccactgctccttccctgctcgacgaaccactcgtggatatgaaagagatcaccaaattagccggattaacggataagtggttttacaagcagatacaggagggcaaatttccaaaaccgattaaactgggacgtagttcccgctggctgagaagtgaagtaagcgcctggctacaggcgcgtattgtggagtcttggagataa

SEQ ID NO: 291561 - DNA, 342 bp, Morganella morganii
atggcattcaatgacactgaagtcgtacaaattaaacaatgtatgaactatttcatggaaaagcgccgtcctccaaagcatatccgggatgagcacgatcttcagtatcgcattgaagatgagagcgtgatcatttttgaagtcaggaaattagcttggagcactggaagcgtggaagaaatgctggctaagataacaatcaacagagtgagcaattcatggtcattgttctggtctactgagaacgatgagtggcgacactacgacggtaagatgataggcagcttttcagacgcaataaaagttattgatgaagatgtgggccgtcgattcttcggttaa

SEQ ID NO: 291562 - DNA, 378 bp, Morganella morganii
atgggtgatgtcactttgcttgatgtgaatgaactggcagatcgttacatagaaattacagagccaaaaccaagcaagagcagcattattgcctacaaaagccgcatggagagtgcaattaataagtttaaggcttttcaggctaatgaggaaattccttataatccgatagaccgccaagaagaggaagataaattgaccgacccagcaccaaccatcgaagcgaagagtgagcagccttcgtcttattcattgcctgtcgttatccgccctgaatccggcacaacagtaactataagcgggattccaacagaccttacaagcgaagaagccgaacgcatctcttcaattttgaaggtttacgttcggcctcaataa

SEQ ID NO: 291563 - DNA, 273 bp, Morganella morganii
atgacactggcgctccggatggggcgcacagtggatgagctgaccagaacgatgagcgccggtgagctgaccatgtggatggcctttgaccgcctcagcccgatcggggacatccgcagtgacatacagacggcccatattgtctcatcactgtacggcgcacagggcggcaaactcagcctgaatgatgcgatgctgaaatggggcgctcaggatgagagaccggccggtgacagtctggaagagtttctcggatctatttctgaacattaa

SEQ ID NO: 291564 - DNA, 756 bp, Morganella morganii
  misc_feature (729)..(738): n is a, c, g, or t
atggtaatttcagcagcttttcaaacaagagcaaggacaattgatcatctagggcgtgagcaaatagctgattgtccaaccgcaatttccgagctttggaaaaatgcatatgatgcttacgctcgtaatgtttctctaaatatatttgatggcgatacacctgtggcaactttagttgatgatgggcatggtatgtcgttagatgacattatcaataagtggcttacagtaggaacagaatccaaggctacaaaaaaagacattccatatgaagatagaaacggaatagatcacattcgagcaaagcaaggccagaaaggcatcgggcgtctttcttgtgcggccttgggctcattaatgcttttagtttccaaaaagaaagataaccctcttgtagcttgcctgctcgattggcgtatatttgaaaatccatatttgatgcttaatgatattaagatacccattatggaatgcagtgataacaatgaattaatcactgtgataccggaaatgtttgatgctttgatgggaaatctatggggcgatggtggtgatatattacgagataaccgtattgaacaagcttggaaaaattattctgaattagaaagaaatgaaaataattatattacaaaagaagctatcgagaatactgtaattaatgctttctttgaggaaaggcattttcaatcttggcctgtgtggaataataaatccactcacggcacnnnnnnnnnngaattcatgacgatttaa

SEQ ID NO: 291565 - DNA, 1221 bp, Morganella morganii
atgaaaaaaattactaatgaaacagaagttaatctcaatagctgtgggtattcattgggcgttaacttaatagctagtggtttttactcaatagatacatcttcatctatgtcgtttattttaaaaaaagggtatagagttttttttatcataagggggacatgcacttttagcttatttgggaagaagcatttttgtcaacaaaatgatatattgattcaatttcaagataggaaactgacgttaaatatcaatgataatattgatctttattacattgatatttcaggagaatttattcatgaggcaataaataatttaatgataaacaatgaacacccaatgattcatggtttggttgactcgagaataaagaatttatttcagtttatattatctcaccacaatattaatatatcaactacagataaatctgatgtattattttcagttgttaaaattatagctatattaattgaatcaaaccaataccaatcatggcaaaaagtattattttctgatcctagaattctttatactggtcactgggtttcatggcccaccagagaaaaatctacagcagaagaattttacacggcaaataaatcatcttatgtagaatataatttttatggctctggaatcaaatgggttggaactattaactttgattgtggtttagctgatatcatcattgatgggaattatgtaacaactattgacacttacaatagtgtaaggattacaaaacaagttttatatataaatactaatttagataagggacatcatattataaaagtattttgtacaggaaataaaaatcaattatcaactaacactgacattactttagaaagttttcatgtatataatgatgagttaattgataacaatacaggtaacaatacatataaaagcataataaatttcatatcattaaatttatcaactgtgaatattaatattatatctgataaatttaatatcagcagaggaagcttattaaaaatatttagagatgaaataaacatgactgtgtccgattatatctccagcatgaaaatcaaaagagctaaatcattcttagtttcaggtaaattatcaataaaagaaatatctgacaccttaggatactgtaattattcatacttcataaaggtatttaaagaaaaagtaggcatatcaccagttgattataaaaaaaggaataagttataa

SEQ ID NO: 291566 - DNA, 588 bp, Morganella morganii
atgaataacctaatatctgtcgtaatcccttgctataatgcatctagttttatagttgattgtcttagctccattataaatcagacatataaaaatattgaaattatcattattgatgatgcatcaacagataataccattaccgtagtctctgaatatataaaaaaaatcaacagtactattcctataaaaatatttagtttacagataaattatggtccagctaaagctagaaacatcggagtagcgaagagctctggtcagtatattgcatttatggacgctgatgatatttcagtattaaatagattagaacttcagttaaatcttattatatctgaagatagtgacctatgtgtctcaccattaaaaaattttggaaacaaaaaaaaacatatttcatacataggtaaaaaccaagctgaattaatgaaaataagtttactaaaatgtcctttccctcagcccagtgttttaggaaaacgctctgttttcattgaaaacaaatataatgaagatatcagagctgaggattatgaccctgtctcttatacacatctgacgctgccgacgatatgcagtgtgtag

SEQ ID NO: 291567 - DNA, 513 bp, Morganella morganii
atgcttctacgtcaatctgtactaaaagaaaataaatattcacatttataccctcatgtagaggattatgaactttggtcaagactaataaaaaataagtacaaactaataaatgtaaatgatattttattaaactatagaatacactcaacacaaataagtgccaccaagtggaaagagcaactgcctttactctcaattataaaaggtgaaaacttcaaaaattttgtttgtaataatgataatatatatacacaattccttcatctatggtctatatcaatcagtgacacacccgagtttataaaacaatatagaatattggctcaatccgaaaaatataaaaaaaataaaagatacataataccttctataatttactttttatctcttaataaattcaatttaattgatttaatcaaaatattagcctgcttcccttatagtctaaaattcaaactgttattactctatataaaaaatataaataagagaaaacatatcaatgaataa

SEQ ID NO: 291568 - DNA, 858 bp, Morganella morganii
  misc_feature (818)..(827): n is a, c, g, or t
atgtataatgcatctgcatttatcagtgactgtatcaactctatcttgaatcagacatatgaaaatattgaaataataattgtagatgatgggtcaacagataattcatatgaccttgtattacaaaaatatgaaaaaaataatactgtaaaattatttaaaaataataaaaatctaggagtatccaaaaccctaaacaaagctatatccttatcctctggatattttattgcccgaatggatgctgatgatttatgtacaccatatagaacacaaaaacaagtagaaatgcttttagaaactaatagcgatatttgtattggtgatgtggaatattttggtcaaggaaataatagagtttggaattcattaaaaaaaaacgatgatataaagaaagctcttttatttaattgtcccattagtcacccaaccgttatgtttaaaaaggaacggatagcattattaaatttttataatgaagacagcagtactgaggattacaatttatgggttaagtgtataaaaaataatttttcattttgtgctatcaatgatatcgctattctatccagaatacatagtggtagtgtaactcaacgcaagaaaaaaataatcctagattcagctcaaactgataggctatttgctcttttaaataatgatatattacccaataaaaaacatgcacccattttatccagaggattatcaggaagtaataaactaacccttaatgaatttaaattatttattaaacttcatgataattgcattgaaaaaatatcacctttaagccaagaactacgtgcatttattannnnnnnnnnattatacataactgggtatctattggtataa

SEQ ID NO: 291569 - DNA, 300 bp, Morganella morganii
  misc_feature (270)..(279): n is a, c, g, or t
atgaaggcaattgacttatttgcgggggctggagggtttagtttatccgcccacaatacaggcgctataaatgttgttgctgctattgaattcgatagcgcggctgcaaatacctacagaaaaaatatgttagaaaggcttgagcataagactgaacttttacaggaagatattttactcgtaggcccaaaaaagttaagaaaaaaaataaaactcaagaaaggtgagcttgatatgaaacttggcgggcctccgtgccaaggtttttcnnnnnnnnnntttttccagtcatcgaattaa

SEQ ID NO: 291570 - DNA, 837 bp, Morganella morganii
atgaacgataagaaatatgatccgacaatgagcggatatctcggtgatattctgagcggaaaagcgaaaatcaacgaacttcgtcctcagcacgagttctttgatgctatcggactggaaaaacagttacgggacaatgaacgtgtcattgttttgctgacactaaaagaagccgcaggaatgctggaagaattgaaaaataacggcagatcctatatccgcgatgcatactcttttaccagttcctatatcggcaatatccgtgagggattttctgtcgctgagttattacgtgaatttaattttaaatttggcattacagcaacagagtatgttgctgtgaatggcagtgtcatgattaaactcagcggctatgccgggctgcgccacagattaaatgccacgacttttcttgcgaataacggtaaaataattggtatgggtattggccggcaaggactcgattctgcgacaattagcggtatgcgttatacctttatcgccgcggcaggattccggtttttacagcttatctttcagaaagattatgacctgtataactttgtcggtgatattaccatggatgttgctaaattaggtgtagcttcgtttgtagcatggggaggtgggtctgcgtttctggctgtaacatcggttttatctattggtgctagtcctttgattgttggcgttattgtgttcggtttaggttttgggattgcttatggcttaaattatatagatgaaaaatatcacattagtgaaaaacttattgaaaaaatgagagaagttaagagtcaacctgaaggtgataaatactggaagggaaatagataa

SEQ ID NO: 291571 - DNA, 438 bp, Morganella morganii
atgaataaaggtaaattaataaaactttcactttctttatttttattttttataatttcttttggtgtttttttattgggagtgctttcggtttatgatttttttaatgcgtccgatgttgtttcattgtcatattcatccacgttgtgtctttctggtataattattagttatttgtttctaagtctattatacaatttaataactcaagtaataataaagaaaccaaaaaaaaatatttcttaccaaacggcagggatattacttgttatttggttttttttatctttccctattacttggatgggaagttattacctaatatctcataattatcaaaaatgtccgccaactgatattttcacgcaatactacgtgacagacctatctctgtgttcggtcccttacaatgaagaaaaaactgatgtaaaaaaatga

SEQ ID NO: 291572 - DNA, 246 bp, Morganella morganii
atgcgcacgctgaccggacggctgaccggactgcgggtctgtcggaacagtaacgatatggtcaaactgctgcaccagcatctcatcttcatgaccctgcacatagatgttaccgacggattcagcggtaaacgcaccggcagtgatattgccctgagttttaccttctatggagatatagcatggagttggcatgataaaattccttatttattaacaggtaacaaatcgttaccggacgagtga

SEQ ID NO: 291573 - DNA, 429 bp, Morganella morganii
atgaaacagtatcttttggctttacttataccgttcacaatgtgcgctagcgcaacagaagaaaccctggtatttgaaatggagtgttcctgggtcaattactcccaagacggcaccacaaaaaaaagcgaggatagccaggcattttctgtctataaatcaaatgcgacacaaatcctcaagatagcgccagctaaaaacagtagccatatgccacctccgacctacaccatgaaggtaaaaggagcgcactcgtctcaactcggagtgccttattacaaagaattctattggatgggccacgatacaaggcttacattacttcgcggaagtgatacaaaagtaataattgaatccatatcatccccaggtatgcctgtaatggaagcctcctgtaccaacccaatatatacaggcgacagaaagtaa

SEQ ID NO: 291574 - DNA, 3447 bp, Morganella morganii
atgaaccgagctatcgatgcttttctcgcttataacgagcgcgagaaggcaattgtagaacctatcgcaaaatggcttactaaccatagggttcagacccatttctttgcacgcgatacacagtatggggagcctattgacgataccgaatacttggatgaagccgcaacagtgattgtatttctcggtagcgagggctggggtaagaaccatctgtggcttgtcgatcgggctctaagcatgaacaaacccgtattccctgtcctaattggcgatgccagttccgatgagcacaacaaagcgcaggggttgtttgttaattttaagtggctcgacttgcgtatgggagatctggaggcgctggaaaagcttttgccattgatattcgaagtgtcggatcagtatgaaccggacatcaataccgaggtcggcctactgatctcgggtcccgacaatcgcaggcaggtggcgctcgactggcttattgatcgagccaagagtatgcgcgcgtcgatctcggtcaagttacgtaaagaactagcgcgtcatagaattaccggggtgaggttatcgtcgccgaatgagttgcgtttcgactcggatgctgaagcgcgcagttggctacgtgtagccctaatccattgtgatcccgagaacgtgcagacgcgtgatatcgccctgcgtgatatcatgtcggatatcgagccagcagaattcgcaagattctggagtcttgcggcagcacaacaagcgaatgtgtcgtatctcctcgcccttgctgagaaggctgcagtggatcagaccactagcgtcagttttgctggtgttgcgatgttgaatccgaattctcccgaagtgctgacactttttagagccgcgttgcgcaaggatgatcattggacaactcgcggtgtgctgcgtgccttgcggattgtacacgttcccgaaattatcagcgatgtctgcctacttgcggctggccacaaccgagcggaagtgccgatgtacgatgtcttctgtgcgctagccacccctgaggctgctgccatcgcggcgcctctgcttgcggaaactcccggaatcaatgtagtcgttgagcgaatcatcgaggccgcatacgatgcaaaccactcggtcgtgcgcaatttttcatggttactcacaacgctcgatgcgacacgctcccgtgctatcctgaacgagcgttccagaaacccccaagttcgcgcaacagcgcgacgcttgctggaaggcatggactctgtatccgctacggcagagaaaccctaccatcttccgggcttcgctgccgatacgatcgatgaacaacacgatcagcttggcatacagactgaggtgcaaacgcttgccgcgatcatgatggcgcgagatgtaacgcccccgctcgcgataggtctgttcggtgaatggggctccggcaagagcttttttatgtcgcagatgcgcaagactgtgacgacgctagctcaacgccagcagcagggcgtatcgccctattgttctagcgtcgttcaaattacattcaatgcgtggcattacgccgagagcaatttatgggccagcctggtcagcgctattttcgaaaagcttgccatccacattttcggaggcacgcctactgaacagcagcaggcccaactgatcgccgaactggcaagtgctaaggcggtcacagaagaggtccgtgcggaagagagacgtgccggcgagcagttgaaggaagaggaggctcggcttgacgagctgcgcaagaagagactcgctgaggaacagaagctcgcgaagttcaacccgaccttcctgatcgatttgctcgaggacagtactctcaaaaaacaggccgaacaggcatttgaacaactggggctgcctgtagtgctcgaccgagttgatgatttcaaacacgcggtggcggacgcaggcaagctatcaagtcaaaccgttgcattgctcaaggtgttgtccaccaagggacgcagtcctctgtatctggcgttgttcggcgcggcgctgatggtgcccgccgctggttatgctgtctataactggttctcgcccgacaacaagctgttcacgatgctcggaactatgttcgcgggcgtcgcgacgttcgcgacagcgggcattgagatcgtccgacgcggcatcaaagaggttaacgtaatcttgaagcctgtcatggaagcaaggaaaaaggctgacgcggcactcgagaagatccggaagaagcctgcggatgcagaactgacacttgcggccaacgtcgagttgttaaaggtgaaagagcaggatgcgcgatgccgcgtggccgacgccgctgcacgcgtggccgacaccgaaaaacgcctgcgtgaactggaggaaagccgcgatctagcccgcttcattgccgaccgccatgattcgacagattatcgcaaacacttgggcctcgtgtccctcgtgcgccaagattttgaagcgctttcggagcggattcgggagcacggaacggcggctgatggcgggcgcaaagtcgaacgcatcgtcctgtacatcgacgatttggaccgctgcccggcctcacaggttgtcaacgtactgcaggccgtgcatctgctgctcgcgtatccgctattcatcgtcgtggtcggcgtcgattcgcgttggcttactaattcgctctccatgcactacaaagaactcggcgcggcgttcaccgaagcacctgaggcagccgctagcccccaacactatctcgaaaagattttccagattccgtattcgctacgtccgatgagtgcggagggctacagtaagttagtgagcgagctcacaacgggaggccagcgcatgcctgtgacgcagctagttacaccggccgtcccgtcgtccggtccggcagacgtggagccgtctaaacccgtatccgccgcgcttacttctgacgcaatcgtggccacgcagcagtcggcattggcgtcgggaccagcagcggtcgaggagcgtgcactgattattcatggttgggaggaatctttcgccgctaacctatacccgttgatcccctccccacgagcagctaagcggctggtcaatgtctatcgcgtgctgaaagcaagcgttagcggtacccaactgcaggtgtttgagggcaccgagacagagcctggccagttccagattccgttgcttttactggctatacagatttgtgatgcccccacggcgacggcttggtttgctgaccttatggcagggcagcggcagcgtaattctacgaaggaggcatttatgcatactgccaatacagcctctcgcgagcggctaatggagcgaatccagcacattttcacggagcccggattcccgaaggatgccaccttgctgatgtactggatcccgctggttagtcgttttacgttcgagacgcgcgccattgtttga

SEQ ID NO: 291575 - DNA, 138 bp, Morganella morganii
atgagcctaagtaaaacaatacctaacaagaagtttaaggtaggcgtaacaaacattcggctttttgggttctattgttttagcttttacgaaggccaattgagttatacgtttgttagccatatgattttacgttag

SEQ ID NO: 291576 - DNA, 450 bp, Morganella morganii
gtgcatattaaatataaagtattaatattatatttttcactttcgctaagcactctgtttttttatcttgaaacagttcatcagtatttttttagattctacccttactctttaaatgttaatttggttataaaaacccaatcttatttatctttttatttgtttatttacttgtttatcttgagtgttttttttatatttaaaacggattttaaatacacatcattatttaaatttaatgtctattttttatttccatatttgatctgtattttttactggcttttaagttcgcatgacagaaatagtgagttttcggtaagtgactggcttgttaattcatatattattcactttgtttttttgataacactattatcttattttattgattatatcctcagggttttagttttcagaaacaaagatgaattaaaaaaaatattctga

SEQ ID NO: 291577 - DNA, 579 bp, Morganella morganii
atgaaagttaacgacgtgtattttaatcgatttaacgttcctattgtttcctctccaaatccttacgctgattctttaattaaagatcccgtaaaagtattcgtagtctctaattataattggtggatggggcataccggtttagttgtcggtgaaggggaggatgctattttatatgaccctgcaggaggatactctggctgtccgacaaaaaaatgctatgataatataaatgaacctcgtgtaggacgaagttccggggagttttttagttacccagagtttgattgggatgattatttgtcgtttcaattatgggatggaaaagacgttcaggttattgaatttacagtaccaagagaacaggcagaaaaattaaaggagattatttttaatcatggtttggctgattggcttacttgctcgagaacagttttaagagttttaaaagaaagcggtggagtttttagttcacttgaggaaagtgctatattaagggaagatccctggaattttcgggaaaaattaattaaattacattatcctaacagtgggggagttatttcaggtgcatattaa

SEQ ID NO: 291578 - DNA, 483 bp, Morganella morganii
atgataacaatcattacaggcaccgtggttgctttctttgtggccatgatggccagacagcttaaaatatcggagtttcgacaactctggatcaacgagatacgaaaggaaatatcagagtacataaccaaggctgatgaatggtcggaaacatatttagattataataatgaattagaacaggataaaaaaaaacagaagcttcataaattgaatagcataaagtacgaagcttttcgtgtataccggagtattcagattcggttcaagcttgacgatgatgaggctaatgcattgttgttgacgctgattaatctactggaccctaagtattccgaaagggaagtctggcgaaaggaggctgataaagttgtcttacaagctcggattttgcttaaaaaagaatgggaaacaactaaaaatccgttaaagcccatagctgcttttatattctgtacctttcggcataaaggtgacaaatga

SEQ ID NO: 291579 - DNA, 1065 bp, Morganella morganii
atgaccagatatatctgtagtcatgcgttaaagcatggttgtgatcaaaacaaaaagcattcgagtgttagtaatgcaatgttaaaactcatgcaaatcatcctgttttttatgttatccgtcgtaagtgtaagcgccgaaagtattaatggtgtaggacttaaaaagctcaatgtgaatgacccaattgataataattcaatggaagcggtggtattttttcctagcactaaacattcaactgttactccaatcggcccttatcagatagcggcatccaaaagcctcccgattgtgaatgatacctatccgttaattttgatatcacatgggaatatgggcagcatgtgggggcatcatgattttgctacatcattagcgcaacaaggatatattgtcgcaacagtaacccatccgggaggcaactttcaagattccagtcggattggtgcaataagctctctttatggacgtcctatgcaaatatccgctgttttaacggcaacactcaaagatcccgttgttggaaatcatattgataaagacagaataggcttcatcggattttctgccggagggactacagggttaattcttgcaggaggtaaaccaacacttacacgccttctggattactgtgcaaacagacctaatgactttcatgtttgcgaatcaaagggggacataaggattgatatccctgaattggtaccatctgcggatcctcgtattcgagccttcgttttattagcacctttaagcgtcatttttgccccgaaggagttgaatctcataaaatccccactactaatttttgtgggagatgaagataaagagttatcccctgaaagtaatgctgtagcattagcgaaaaccacccattctgtactacaggtgatatcaaatgccggacatttcatttttttatcaccatgctcattggatatgaggcgcactatgccgaatttatgcgttgaccctaaaggttcagaccgtgttatgactcataaacgtgttctttcggatataatagtttttttcaaaaaaacgcttgatgtaaattag

SEQ ID NO: 291580 - DNA, 822 bp, Morganella morganii
atgaatatcctgttatttttcctgagccgggaagaataccgcaaacgccggagtatgacaattatccctcccggcagactcattccgtattacttcaggatctgcattcttccgttagttaccttaccttcactgactaattttccggcagtatcgaattgtttaactgtacctgtaagggcaccgttttccatagatatatcaaatgagaaactgaagcggattaaagagctctacgaagaagaccgtctcggtatcgatatattgtgtcacggacttaactctgaaactgcatttatggtcgaaaccacatgtatagacctcatcgggattaaagggttaaccaataaaattaacgggaaaaagagtcccggtaatgatatttataagacgcagggaaggttaaccattgaagaagctgcttcatggtattccggtgagccaactgaggtttcaaaagaagataaaggacttgtattcattttaaacaaactctaccggtttgatatgactgagcaggaattgttcgaagcaacacgtggtgtctggcacaatccgccacgcaatgatgaatctctgaaatatgcttatgctgtttacaacaacatagtaaaagaagtttatgaaattcatggttggattaaagccggtactcaggagtactttacaaggaaaatcggccgtgacagtgctcgctgggaatttatcggcagaaaagcagagcagtctatacgcgataaatatgtcggaaagataatcaactatgacaggagttatggcacaccgttcgttaaagtgggaaacacaccggccggtaaatga

SEQ ID NO: 291581 - DNA, 402 bp, Morganella morganii
atgttcagcattagtcaggcatcagtcggagataaaccgatgcacggattatttgttccgctgttattgttgccggtaatactcaccggctgcgcctacagcaccacgttatccccgccggcagacagcctgaatattcatttttctgctactgtaccggctgatttggaatctctgccgttatccgctatgtatcgctctgaaaagtgcacccgcaaccgaacaagtcgcagcggtaaatcgtatgaagttccgggatttaacagtacaaaatacccgttgtccatcacagcgaccggtgacgtgactacggatattcctgtaaatggtggcgggtattgtgagtggcagcccagtaatactaatctgtgctatcgtaattgttataacgtattgatttaa

SEQ ID NO: 291582 - DNA, 723 bp, Morganella morganii
atgcgcggattatttgttccgctgttattgttgccggtaatactcaccggctgcgcttacaacaccactttatccccgccggcagacagccggaatattcatttttctgctactgtaccggctgatttggaatctctgccgttgtcggccatgtaccgctcaaaaaaatgtacccgtacccgtacccggacgagcggcagcggtaaatcctatgaagttccggggtttaacagtacaaaatacccgctatccgttactgcgagcggtgatgttaccgcagatattccggtaaatggcggtggatattgtgactggcagcttagcaatattaagtttgaagtcagaatgaaagaaccacaaataattgaatcaggcatttcagataattttggattcaaaacagtatttattactgacaataatgctccgcaggcatttaacggaggatatacatctcacaagggtgatttcaatgaatcattattattatttccatttataagtgagtattttcttggtggacataaaaaaactattgaagtcatcggtgaaagcgatatgctgacttatcgtttatctggtacaaacaatattcatcttatggttgtttatgacaaaatgatgtcaaagaaaaaaaagaaggaaacagaacagttatcacttatcctgatggcgaagaagaacgaaaatccaaaagctatcctgactataaaaaactattaa

SEQ ID NO: 291583 - DNA, 144 bp, Morganella morganii
atgataccggcccgggacgtattacttccgggccgctctgttttcaacaacgggttcagcgcaatgatactgtccggtggcagtgatgtgcaggagtccgtgtcttctgatttatggagtcggcgtgataccatctatttctga

SEQ ID NO: 291584 - DNA, 195 bp, Morganella morganii
gtgtctgttatcgttgtgatactaccgtttgcgtttgctgtacttctgtttctcgcactcgttatttactactgttttcacaacatcagccggtcggataacggcgtcatttatatcaggatcctgattggtaccatggcgattgctgctgtggcttatattctggtggtgatgaatcaggtatttttgccgtga

SEQ ID NO: 291585 - DNA, 141 bp, Morganella morganii
atgatgcagagccgcacggtctaccactatcaaagcctgcgtgacgaccacacagtcacgcagcgaataagggaaatagcggaaacccgcatccgctacggcgtgcagcgcatacatatcctactgcgccgggaaggctag

SEQ ID NO: 291586 - DNA, 1179 bp, Morganella morganii
atgaaaaataaaaaaccaaattttgtaataaaaagaaaatcacaaaagggtaaattttttttctctgatatttttactcgtgatgttctatcagatatatgttttatgattacagggaaaaatgattactctattgaatatgatgataatgggtataacaagggccgtttagctaaattattttttggtgatgaagttagttatatatctgtatctgagaatgaagtttcagggaggaattctagcttccaaagtgtatcaagtgcattagttttataccataatgaagagtcaaaaaacaaaaatatttttttctattttattaatcatgaaggaaatgtagaaacaaaatattttaatttcatgtacagattaatggcaacgtctggatttgtttttttaaatgataaatctaagcttggcattgaaataaaaaaattcaataatgtagatgaccttattttgaataaggatttattgagagggaaaaataagtcaaataattcgtcatatataacattaaatgatgagggggtggttcaaatatatgcaaaaacatatggagcaaataaaaaagaatcaacattaatgtgtttagcgttgtctaatcttaattgtaaaaaagttgaattaattcaggtttcggagggtaacttaaccaagttaccaaagcctgacttggccgtcattcaaagagtaattgaagttcttgagattcaatttaataatagtatggaaaaagatgagtttataataaataatagctttagatcaccaacgtatgtctttaatctactaagaaagttaggtaagaaaaaatgtgttttttgcgactgcgagatacctcaaataattcagggggcacatgtctggcctgtttcagaaataaaaaaacttaaattaaatgatgacgaaaaaataaagcatgcattaagtgaaaataatggcatatggttatgtgaaaatcatcataaactttatgatagaaacattcttattataaatgaaagtggtaatattttaataaaaaataatataatcacatcacacaaggaatatatagagaaaataacaataaaaaaatcaattcctattgaaattgtcaatgaggattttatattatatttgattaaaagaaattcttgtgttgatggtatcatcagtgattattcgagatag

SEQ ID NO: 291587 - DNA, 1764 bp, Morganella morganii
ttgagatatttagggaataaagaaacgatagtttcaaatataaaagattttttaaaagaaaaaaacattctaaagaatgattattctttttttgatgccttttgtggaacaggttcagtttcagatgcattaaaaagtaattatagtgaaataattattaatgataatttaaagtggagcactgtatatacttctggacgattactggcaggtaagtgtaattttgagcgattgaattttgacccatttgcattttttaatgaaaataatgagataactaaaggttttttttataaaaattactcaccgggtgggtctgggcgtatgtatttttcagctgagaatgctggtaaaatagattatattagagagaaggtggagttttggtttttaaatgatttaattagcaatgatgaatataattatttattggctagtctaatagaatccatatcaaaagtttcaaacacagcgggagtttatggagcatatttaaagcattgggattctagagctttgaaaaaattagagtatgtaccagttgatagtaattatgctgatttcaataaactgactgtatttaatgaaaaaatagaggagttggtgggcgatgttgaatgtgatgttctatatttagatcctccatatacacaaaatcaatacgggactcaatatcatttgcttgagacgttaattttaaatgattcaccaagtataagtaaaataacaggttccagacctacggcatcaatgagatcagattggtcaaaggatttaaaatgtcacatccttttagatgagattttaagtaaaacaaaagctaaacatatactatttagttacagttctgatgggtttatgtcaaaagactttataacatctgttatggttagatatggaaaaaaagatagtttcgaatgtagaaatattgcatataagaaatataaaaatcacaaatcaaaaggtaaaaaggaacaccttgattttattaaggaaagtttaccaagtgaaattgatagtttttatgatatttttggtggtgggtttaatgtaggtattaatgtgaattctaataaggttatatacaatgaatataatttctttgttaaggatttgattaatgtgatatatgattccgatacttatgggtttataatgaatgtccggaaaattataaacaaatatggattggagccagaaaataaaggtagctacttgagagctagagatgattataatagtaaaagtattgataagagagatccggtattattgtacgccataatcttatatggttttcagcaacaaatacgatttaatggaagtcatgagtttaataatccaacaggaatgcgctggtttaataataaagttttagaaaaacttatctcattttcaagaagagttaaagaaattaatgtttctttatacagttgtgattataaatcgttgattaatgacattaatgatggggattttgtttatttagatcctccttataggttgactacaggagcttacaatgatggaaagagaggattcaacggatggagcctaagtgatgaatcagagctgttttatttttgcaataatttgaatagtaaaaaaataaaattcatgctttcttatgtattggagcatggtggtaaatataatcatgaattaaaaaaattcgtagaagataatggttacttgttaattgagttacctattgttttaggtaaaaacagaaaagaggtgatagttattaattatgaaaaataa

SEQ ID NO: 291588 - DNA, 165 bp, Morganella morganii
atggttggtgccgaaggtcagatcaatcggggaggttatattaccgaaggtcagttcactgctggtattttgcggggagccgctgcctatattccccaaaacagcgatcatactgtcagtagcataaccgatatcatccagaataatattgatttttgtcgatga

SEQ ID NO: 291589 - DNA, 369 bp, Morganella morganii
atgtcagataaagatgcacttgttttttttggagaaaaacttataaaaagtgttagagatcaagctgtttttgagtttgaagctacgctgtctggtaaaattaaatctgaaagagctatcagattgtatagtgaaataagtggttttgataaacaccagatcgatattttaagaaaattcgtttttacttctatagataatgtcatatataacactcttaatatgcttgagcaaaatgaagataatatgagattactaatatcccaagatggagataacgaaaaaaacgttgttgaaattagtgatggattatccggtgagctatttacagaaaatggttggatagagaaatttagtaaatataaataa

SEQ ID NO: 291590 - DNA, 348 bp, Morganella morganii
atgaaagatgatatttttatgaaaaaaaatgagatatatgtgaagatgttatctctttcattaccttatattaggaatgttcagtcattaagtgataaagagaaagctagtgatagttcgtgttactttgaggcggaattagtacacaatttgatgcacactttacttacatctgatttctcagagcatgatttatggtttttgaataatcaagcgaaattttattttgaaagatgcaatgaagatatatcgccaaactacattcaacatgttgaatatattaaacttttatttggcattgtcccgactgatctaaaggttaaattattatgggatgggccaaggtaa

SEQ ID NO: 291591 - DNA, 324 bp, Morganella morganii
atgaacaaatatcgtgacaaatcagactatgagattaataaggctgtggctgtctctctgtcggctgaatttcagttcgatgatatccgtgaaaagctatacacggatatttttcgcaacaccgagattgattattgcaacaacccagcggacgcaatgcctattattattgagaatggcatcagccttatttcagactggaacgagattggcgtgtggggtgcgacctatcagccgtggtatacatcagaaaataaaaacccactacgcgccgctatggaggtattcctgatgatgaaggatgcggagaatgaaaaagtatga

SEQ ID NO: 291592 - DNA, 123 bp, Morganella morganii
atggagaaaaaaacaccaaagagaatcggaaatactgattatgcagctgaagaatttgcgtcactaataatcaagattgcgattgcttttgcagtaataacatttttaattaaatatatttag

SEQ ID NO: 291593 - DNA, 1539 bp, Morganella morganii
atgaaaaaatataaatatccggcaatcatgatagcactcataattatgagctatctggtcaatacattcatttataaacgggattctaccgcacctcatttagccacattagctttatttttgtgcacattcatcctgttaaacaataaaaaatggttctcagtcgtcaccggatttatcatcacgctgatattctcccttgaagtagcctactttgctgaatttcatgaaaaaatctccacaggtgttatcgatgcaggaatggaaacaaacagccttgaagcacccgctatactcggacattatattttttcaattttactgccggcaatagtcatcagcctgctgattaccggttttttcaggaaaaagacactggcattaccccgctggtttaaaatatcaccacttgttgtctgcgtatttttacttatatcactgaccagagaagtgattactgattaccgcagcctggaactgggattcagggaagatcctcatgaactgggcagatacctgcgggataaattccccgttgtgaccggaaatatactgtatattgtcagtgcagttgtcagtgatgataaatatgctgcggagtatcctgaccgtacgctcaataatgccgttatcaccgcaaataagccggaaaacaaagtgattgtatttgttatcggtgagtcatcctcaccttcccgctatcatatttacggatatcccggtgcgaccaccccagagatggaaagaatatttaccggttcaggcgcctgtattacagaaaaagttcattcatccgcaccgattacccgaaactcaatttcactgtcgctgtcattttatacccctgagaatgaagacaatttattccgggaaaagtcaattattgaaatggcacaggaccaggggtacaaaacctactggctgggcgcacaacccgaatttggtgttcatggttccaaatatggttatatcgccaacagaagtgataccgtcacgattaacgaaaataatgatatggcactgccgggtttattaaaacaggcactggcagaaccggatgaatataaattcattattgtccatttgctgggcagccataaaccttatacaaattatacagaaaccgaaaaaaaccagctcagtgacgactatgaccggaccatccgctataccgacagggtcaccgggcatctttatgatgaaattattgcggcggcagataacaactatatctttatatatacatccgatcatggtgagttagtcggcaaagggcatggtttcaccaaaggatctgagcagtttatgataccgttcctgtataaatcaggaaatccgtcttttgactgccggtttattgaaaaataccggaatcaggatggttggctcagcggactgatgaataaatacattctgtccgaactgctcggatattcattgaaacaggaaattgttgaatctgaaaagcagcatgaccgtgtcatctcaacagatgactatccggttctgttttcttcctattttggtgaaaataaatag

SEQ ID NO: 291594 - DNA, 177 bp, Morganella morganii; identical to SEQ ID NO: 282566

SEQ ID NO: 291595 - DNA, 303 bp, Morganella morganii
atggatgaacaggaactggaaatgttgcggcgtaattgtgcgctgcggcggcccaactgggatacctacgaactgaacgaatacatcacgatgctcaccagaatagatgaccggtcgctgaaatcagagattgaggaactgggtaagaaaatatgccaaaatgcagcgagaaactgcctgtggcggagtgctgctttagcggtgatttggagtgttggaatactcttgatggcacgatttaaagttgagcatataaatctgtctggaagcgtatttgacctgatacactatgatgcggaatag

SEQ ID NO: 291596 - DNA, 861 bp, Morganella morganii
atgaagtatgaacagcgtatagtagtatttattgatattttgggatttaagtcactacttaatgatacaattgataaaaatgggaatgataacgaagagaaaattgatgcaattatatcggcatatgaagcaattagaaatatatgggacttgaatgaaagtaatgcaggcttaaatattaactctgttagaacaaaagaggtgtcaatattctcagactgcctagttatttcttttgtgatcgaacagccaggagaagtttttaatactttacttgaaattaaaatgctaatcatgatattggtttcaaaaaaaattttatgtagaggggctgtttcaatgggtaagtttatccacacaaataactatttgtttggacccgcattagtagaggcgtatacgctggagtcaaaagcagcgatgtacccaagggttatattagattatacggttattgaggcgggtctgaaaaataaaaatgagaaccatgacctcgctgaggaaaaagaatacgtacagtcgttacttgaacaggactctgacggaatgttttatatagattatttttttaaagcccaggctgaattgaatgatcctgaatatgactttcctatttatattgaaaatttagctgatgtgatcagaaaaggattaatggggtctagtcatcacagtaaagcagatataagagtaaaatattcttggatgagagagcgattcaataaaatggttgatattgtaaatagtgaggaatacatcgaaaggttaaatgctttaggtgagcatgatcttgcttatttttataaaaaccttaagaaaattagtcctaataaatataaaaatatgattgctaactcttag

SEQ ID NO: 291597 - DNA, 390 bp, Morganella morganii
atgccttttcttgatgtcagtgacattttgtcagatccggattttgttgatactaccctggtgtgccgccggaacaggcagggcagggacgatgacggattcagcacaaatataccggcggaagatatcccgttttccggtgtcgttaccgttgaccgctcactggaagcccggcgaatggaggcggggcagaccatcggcggtgctatcctcatcgtgacacgtttccggcttactcagggcaatgaagattacgacgcggatgtggtgacctatcaggggcggcggtaccgcgtcacctttgttgacccgtacacggcctacggtgccgggttcgtccaggctcactgtgagctggtggattttaacggaggacagcccgttgagtaa

SEQ ID NO: 291598 - DNA, 1089 bp, Morganella morganii
atgaagtgtataagatttacagataatgaatcgatttatctcgatttcataagagtggtggcatctcaattagtattgattggacatgcaataagctactttgatatatttaggtttttgcattatccaaatgtaccgtggatgcaaaatatagcggtagttatattctttatactgtctggtatagtgatcacttatagtacatcatataaatataatgttggtaggtattcattttctttatatttcattgaccgattttcaaggatattctgtgctttcattcctgcaattatttttgtttttataatagatactataagtatagaaatgtcgggtgttgattacatttatcaccaagcgtttaacataaagacatttattggtaatgttttcatgctgcaagattatccgatgcccccgttcaatgaaataacatcatttggctctgctcgtcctttttggactatagctatcgagtggtggatttatctgacatttggtattttgtttttttattatcgcgatgggttaaaggtcaatatcaaaataaccttatttttatttatttgctcaattgttcctctatataatttattcgggggaagaggaaatgcgttaacattatattggatatttggcatgttgatttctatgctatacccacgttataaaaaacttaagatatcacaagtatataaatggttagtgttgttgattgcatcattttttatggtagcaagagaatatgttacatctgaagcatatgatacagcatttgcactatcattatcattattcattttgatttccattgatttggttaatcttttaactttaaagaattggttcatcaatattataaagtgcatggctaagtattcatttacattatatcttattcactatagtatactggatcttttaagcactcactacaaaggtgtatcaccatacttattatttattttaggttttttattttgtaactttctggcgattttgattggatggattactgagggttattttacaaaaatatgtaaaaataaaatgtatgattttgttaaaaataaccatttcaagtaa

SEQ ID NO: 291599 - DNA, 540 bp, Morganella morganii
atgggaaaaattaattattactacaatcaggatcataaaatgcatccgtatacaggcttttcgtatgcaaacgaaggctctctccctccgctgaatgcgctgcgtattgaacctgattttaaagagggtttctgtccgtgcgagaaagatggcgcgtggattaacgttcctgactatcgcggcgtgacagcctataacaaagagacagcacggcctgtaaagattgatgatgttggcgaactgccggacaatctcaccaccattgcgcctgatgtggaatttccgaagtgggacggcaaacggtgggtaactgataaagtagcaaaaacggaaaacgatattgcggaagctgaggtgaaaaagcagagcttactgtcagaggctaccgttatcattgatccccttcaggatgctgttgagctgggcatggcaactccggaagaggaatcagccctgaaagagtggaagagataccgcattctgctcagtcgtgttgacacatccaccttcccgaatattaagtggcctattaggccatag

SEQ ID NO: 291600 - DNA, 1074 bp, Morganella morganii
atgcgcagaatttacacaattgactatttaagggggattcttgccctttccgttgtattatatcatttttcaggatggacatatggtggaggacaagacgtatcaacgttgctaggtaagcttggtatctatgcggtgtgcgcattttttacagtgagcggaatatcaatatacctctcatacagtaattgtatatggaataaaagaactataattggttttggtgccagacgattttttagattggctccagcatattgggtagctatgtttttggttatattatcccaagttatagccagtagtaattataaaccgatgtggtttgaatattttaataatattacattgctatttgggtattttgatattacggggtatttggttacagggggatggtctattggtgtagaagtggttttttatttgttatttccttttactgttattttatttagaaataaaattggaatgtatgcggttattgcaattagcatttcgttatgctgtctgttttcgttttttataattaataaggatatgagtggtggtgatgtttggagatactatataaatccatttaatcaatacattctatttgttggtggtatgttgatagccaaatatcactatatagtaaagaggggtatgtctaataatttaatattattaggtgcatcaataatgactttgcttttctgtttctatcctgtggaaggtcattggatagagattgttactggatggaatagaattttattaattagcattgttctaatgattgttttatttgttgcttctgttgactttcctccgaaaaatatttttggtaagatttttgaatttttaggtgatatctcgtactccttgtacttgctacatggtgtattgtatgaaatttcaaagtatatattccataagtttttcttaaaatactatgatatcaatatagtattattttctttttttctggttttgcctatagtgattttatgttcatttttttgttataaaaatattgaaattagatttatacggtgggcaaaaaaaatgacaaccattgatagattttag

SEQ ID NO: 291601 - DNA, 609 bp, Morganella morganii
atgttatatattgatgataacggattagtaaaatcaaaccgcattaccattaaacgattcagtaaaatcgagcgcgacccgatggataaagtgaacggtattattgttcaccagactggtacgcctgctgaaacacatgtctttaacagttacagtcatgccggcagtaatggcgctcacttcttaatagataaagaaggcgtgatttatcagacggcttcgttgtttaaaacaacgtggcatgtgggacaaatgagatcccgctgcctgattacaaagaaatgtgagccttctgagttaaagaagatggctgatttagaaatcgggaaaaaatttaaagatatatctgatacagagaaatccagagtattccctgaacgttatcccggcaatatcgatagtatcgggattgaaatagttggtaacgcgtatagccaggaaggaaaaaaaacatatgaatatgaaaatgttaactcaaaacaaaatgcatctcttaagtggcttatcgctgagttaatcgaaacattagatatttcctctgacgaaatataccggcatcctgatgtgggacgaaagaataaaacagaagcgagtacagcatcatggtaa

SEQ ID NO: 291602 - DNA, 1128 bp, Morganella morganii
atgagaaaattattaatgaataaagttgcgggattaccgttattattgttgcttgtggcatattcttttacggctaaagccggagtaatcggaaatggtacacacaatgtatctcccggatggaattatctggggcgcgttactcaggatgtatcatttgttatgaccggatttaatgcgccgacttgtagaattataagaaacagcgcatcttactcatcctggtctattctttcggtttactcttctttgagcacatcttctgatggtgttgcatatggttttgcttcttctgcatcaaaagagatcatcgttgttttcagaggcggacaggttacaggacaaaatctggataataattgtaacgttactaatctttctccggggacatgggatgattcaggtcgttattcggtatcgccttctatgggggaatggaataacgcgattttcgggggcgggatagtccagacattcggaaattatgattatggcagatatatgaaagataatgctgtaacctcaggctatttagatacagatatttatatttatgtagcgccaaatgcagtcgtggggcaaacttatctggctcagcctatctattatactatgtcaccggataacaaacattcgcaggccactcgccagattatcggaaaattaaacctgaaagtggttcaggctcgttcctgtacggtgagtacagataatatgattacttttccgccggttgatataacaggtatccagaacggttatgctcttgccaataaaaccggtaatttttcaatcaactgcaatgataactcgaatacacctgtcactgtggaatttcaggggccaaaaggccggtatactgataccctggctttaacgatgactgacggcagcaatgcaccggctgaaatccgtggttttgtcgggccaaatatacctctcagtaagcaatgtaacggacggcttgacggatatccgggggttgtatattttgtacccggtagcggtttggaaaaacagcaaatagcgccgggaagctataattataattgggtgttatgttcaaacggaggcgataaaaccggacgggcgagcagttcagcaaaattaatattaagctgggaataa

SEQ ID NO: 291603 - DNA, 2649 bp, Morganella morganii
atggattcctgtgtgctgaggtgtgaaaaaataatgaaagagtctgtggttataaataaaaaattatcgaaatcctttttctttcgctatcatccgctggtttgggcattatttattacaaccacacctgcggtggcggatgattatttcgatcccggtttcctgaatatttcaggagaaagcgataatattgatttatctgtattttcacaaccgggtggtgttgcggaaggtgaatatacggtatctgtttttatcaatcagcaggatgtgggtcagtactcacttaattttgtcaaaaacgcaaaaggtcaggtggcacctgaaattacgccggctcagctggaatcttttggcgtgaatgttacacaggttcccgcattgaaagaccttcctgcggatgtaccggtaactgatttgagtgcgttaatcccgaaagcggaaacacggctggatctggcacgtttacgccttgatattagtattcctcaggttgccatgaagtcagcggttatgcgaaacagtgatccttcattatggaatgatggtattccggctctgatggcaaactataatctgagcgcaggacgcacgaccagcagctatggtgataatcataaagcgcataataataacctgtttgcctctgtccgggctggtgctaacgcaggtccgtggcgtttgcgcagcacgattactcatacccgtttagaccaaagcggggacagggatcgtgctgcaaccagtaacaacagaacctattttagcaatacttatttagcccgggatatcttatctctgcgttcatcattacagataggtgaaaccagtaccgggagtgatgtttttgattctgtttcgtttaagggtatgaagctgacctctaatgagcaaatgttacccggtcagttacgcggctatgccccggcgatcagtggtgtggcaaatagtaatgcccgcattaccgtaagacagaatggtaacattatttacgaaacatatgtcgcgccgggtgcattctatattaatgatattcagcaggcgggactatcaggagattatgatgttaccgtgacagaggctgatggtactgaacgccagtttgtggtcccctattcgtcattaccggtaatgttacgtcccgggagctggaaatatgaagtggcagccgggcgctatgacggcaatattaccaccagttcacggcgttccgattttataatggggacggttatctatggtctgcataatgatgtgacattattcggcggtacattgctggcaaaggattatcaggcgcttaatgccggtagtggtatttctctggggaatttaggggctgtttctgtcgatgtgacacactcaacagtcaaactcggcgaaggcactaatcaggacgatgaacgaaaatcaggtcagtcataccggatccggtattcaaaaagtatgatgacaacgggtacttcggttgacctgaccgctctgcgttactcaacagagaatttctataattttagtgaattcaacagccagggctatattcttgaagacggatccgcaccgtggtctttacaacgccgccgcagtagcttccagacacagctgagtcagcatataggtgattacggttcactgcattttcgtgcaaaccgggatgattactggggaagtgatcgtaaactcaccggattgtctttcggttacagcaccagcatcaaaggtatcagttatggcgtgaactataacattgacagaattaaggataagaataataactggccggaaaaccgccagttatcactgaatgtcagtgtcccgttcagtttgttcggttacggagagaatctgcaagcaatgtatgcttcttattctgtaacgcatgataataacggaaggactctgaataatacaggtctgagcggcagtctgatggatggaaaattatcctatggcgtctcacagagctggggaaatcaggatcagacagcaagcacgagcctgaacgctggttatcagggaaataaagggaatattagtgccggttacagctacagtaatgatattcaggctgtaaatatgaatgccagtggcggcattttaatccattccggtggtattacactgggccgttcgatgggtgactctgttgcattagtcagcgcgccgggggctgccgggaccagtgtcaacaccggaaattctgcgatagatagtaatggttacgcgttggtgccttatctcgcggactataacagaaacactatcggactcgaccccagcacacttccggatgatgtcgatttaacgcaatcaagtgttaatgtctatccgaccaaaggtgccgttgtgaaagcagactttgcgacccggattggttatcaggtgctgataacgctcagagttggtgataaatatgttccgtttggcgcgatcgccacacttattgatgataacgcagaggagaatatcagcggtattgtcggtgatgcgggtcaggtttacctgaccgggatgccggaaaaagggcaattgcaggtaagctggggaacgacaaaagaacagcaatgcagggcagcttttgatttgagtcatctggctaaaactgaggacatgccaattcgtcagatatcgtatgaatgcgttaactga

SEQ ID NO: 291604 - DNA, 753 bp, Morganella morganii
atgggactcagtaatttttttaatataaaaaatatattattttttttcggactgagttttacagtacaagtcactgctgccggaaatagcattcttgaaaatacaggaatttcactcagttcaacgagagttatttatcctggtgataaaggaaatggtataacttatacactaactaacaattcgccatatccatatttgttgcagtcaaagataattccgtgggataaggatagtcaaagtaatcataagggtactactgaaaacacaccatttattgtattgccaccattggttcgatttgaacccgaatctccgttaaccctgagaattcggttaacaaaaaatatattacccaaagatagagagtctgtttttctgttaacactgaatgcaattccggctcagcaaaataatgatacagaacaaaatagtctggtgatgagtacacaaaataatttgaaattattttaccggccgtcagatttaccaccattaactactgaacaaattggaagtaaacttgaaataaagagaagtaatggtgagttgattattaaaaacccaacacccttttacgttacattaaactctctttctcagggaatggatgaaattgatttaggtaatgtaagaatgatagagcccttttcagaaaaagcatgggtgttaaaatccggaggaaccggagggatttctttacagctaattactgatgacggaagtgtaagtgaaataataaatcatccctga

SEQ ID NO: 291605 - DNA, 363 bp, Morganella morganii
atgacaaatgcacaggtttctgtcggaattcgtaatgtgatcaaattgttttatcgccctgaaggattgaagcctgcattcagtgaagcggcagaaaagctggtcttccgtcaaaacggaaacctggttcaggtgagtaatccgacaccctattatttaacactggcggcactttcctttgaccagaaaccggtcaatgtacgggatatgaatccgatgattgcgcctttctctgcaaatacatatccggtcgccggtgcagtatcggaggtacaatggtcggttattactgatttcggtgatatcagtcaggcctttaaggcggtagttacagcgggagtatttacgaatgggactcagtaa

SEQ ID NO: 291606 - DNA, 1008 bp, Morganella morganii
atgaattatacaaaacacctctttttctgcctgtgtgcagggctattttctgttcaggccggagcctacgatattgcctttatgcacagtgtcacgattgacagtgcggcacaacaaaaacctgttggtacaacacttgactcctggcaggaattaatcacgacatcaatgaattgcaataccaatgtaattcctgatacctatcgcttcagtaatatcggttacacgacaaccggtgtgacacttactgacggcggaaaaacctacccggtgtttaagacgtacattgacggtatcggcgtggcgctggcgattcgcgaaaaaggcacatcaacctggtatccggtcacagctgaccagacaaaaatctcactcagtaatcccggcagtaatacgtcatttgacataaaaggtatttatgtaaagactcaaaaaacagtagtaccgacaaacgttatacaggaaatcagcctggtaaaaaccgaatgcctgttttacagttcatccgcaggtatgccggcagaattatctgtgcgcagctatggtgccaagcagaaagccgaaacctgtaatgtcaccaataaaacccagtctgttgatctcggcagccatgaactgatggcggtcagaaaattaaaagtgggtgagaatttcggccatgcccgtgccgggcttaccgtgaaatgcgatgccggaatgaatgtctattttacactcggcgatcatctgcattccgggaatattaataccgataccctgttccttgaaaatcacaataccaacccgggattcggggtgcagatatttgaaccggaaaaatcagagccttatatgttaggcggtgataaaaaaaccggctcagcacatcaatatccgttttataagaccagcaataataatgcagaaaccatcacaaaatatctggattttaaatatgtaaaactgtcggatgatgtaaaagcaacggaagggaatgcgcaggcgacaatgacgcttatctataaataa

SEQ ID NO: 291607 - DNA, 1164 bp, Morganella morganii
atgacactgactatccgtcaattatctactctgctgctgtgtatccctcttatcactgctcttgtctggtttttacttcccggtaagtctgccattactcattatgacactgcaaccgtacaatttggagatattgaagatattgtattaacgatcggtaaattagatgcatctgaacggattaatgtgggcgcccaggttactggtcaggtgaaactgctggcagttaaagtcggtgattccgttactaaaggccaactgatcgcggatattgatgatttgcagcagcgtaataatttgcatatagcagaagcacgttacagtgaaaacatagcaacccgggcctcgaaagaggctcagctcaaactggccgaatccagatataaacgtcagcgtaatatgctgctggaaaatgcggcatcccgggatgaatttgaatacgcagaggcgcaactcatctcagcccgaaccgaaattaaactacttcagtcacagatttttcaggctcagacagatgttgaaaaagcaaagcaggaactgagctacaccagggtcactgcaccaatagacggtactgtcattgcagtaaccaccaaacagggtcagaccgtcaatgctgcccaaagcgccccgactatcgtcaaaattgcaaaattggatgtgatgactatccggataaaaatatctgaggctgacattacccgtgtatcccccggtcagaaggcatggtttaccattttatctgaacccgaccgccgttatgacgctgtcctgaaaatggtggaacctgccgccgattcaataccggaagaagagaattcaggaaacaacagcgcaggcggaaatgcatctgtttatttcagcggcctgcttgatgtgcctaatccgggcaatcacctgaagctggccatgacggcacaggtatctctgcttgccgaagaaaaaaagcatgttttgctaatcccggtaacgactgtgactttggaaccagacggcagtaaaaccgtgcaggtgctgaataaagagggaattccggaaaaacggacaataaccaccggtagttcagatagtgcaaatactcagattttaagtggattacaggaaggggagcaggttgttattcctgagaacaatctcttacagacaggagatcctgactattga

SEQ ID NO: 291608 - DNA, 1926 bp, Morganella morganii
ttgagcacactgattgaagtacagaatgttacccgccgctataccaatggcgggcaaacgctgaccgtactgaacacagtatcactgtctatttccgccggagaatttgtcgccatcacaggggcttccgggtcaggaaagtcgacactgatgaatatcatgggctgccttgatacccctgataatggccattaccttcttgatggccgggatacggctcgtatgtctcctgatgaactggccgcattgcgcagggaacatatcggatttgtttttcagcgctaccatctgatgaacgatatgacggctgcggctaatgtggaagttcctgcaatttatgccggtatccggcgtcatgagcgccgggaaaaagcgctgaacctgctgatgcggctggggctgacaggacgtgaacaccataaacccggtgagttatcaggcggacagcagcaacgggtttgtatcgccagagcgctgatgaatggcggtgaaattattttggctgatgaaccgaccggtgcacttgattcggtatccggccgggaagtactggctacattatcggagctgaatcagcgtggccataccatcattatggtaacgcatgaccctcaggtagcgaagcatgcggggcggattatcgaactgcaggatggtgctattttatcggacagcggaccggctacctctgccggcacgccgttcttaccgaaagcaatacctccggccggcttctggcagcgtacgaccgaccgtatcagggcgtctttcctgatggcactgaagtcaatgaactcgcaccgtctgcgcacagcactgactatgtccggtattattttcggtattgctgccgtcgtcaccgtagttgctctgggcgaaggtgcgaaacaaaaaacactggaaaatatccggagcctgggcgcaaatttgatcactattttccccggtcaggatttttacatcagcggggaagaacgggggagattagttccggcagattacaggatgctgaccaaactgcctgatgtggacagtgtatcaccggaaattgatgaccagcagaaagttcaggtcaaaggaaaatcactggacgccaatgtaaacggtgtcgggtcaaactatttccaaatgaataattttccccttatccgggggcggattttccgggacagtgacagacctttgcaggaaggtattatcgaccagaaaagtgaaagcatattatttggtgacagtaaagaatcccctctgggaaaaatcattattgtcggccaggttccgatcaaaatcgtaggcgtggtaaacaacacccgggattatgattccgtcaatatctgggttccatatcgtacaatgatgtaccgggtaacaggaaagctttcattcaccagaattattgtgcatatcagagaaagctcggatagtaatacagctgcaaataatgtccgtaatgcgctgaccagacagcacggtaaaaaagattttataatgtggaatcaggataagtaccgccgttcggcacaaaacacatcatttattcttaatctgatgatcttatcaatcgcagctgttgcattgatgattggcagccttggcgtaatgaatattatgctggtttctgtgactgaacgtactcatgaaataggtatcagaatggctgtcggcgcacgccggcgggatattatgcaacaatttatgctggaagcagtgcttatctgcctgggcggcggtgtactcggtattgcattatcgctgataaccagcatgctgttttcacaacccggcaatacactggtggctgtttactcctgggaagtggcaggcattgcattcgtttgctcaacaattatcggcatgatttttggctggcttccggccggtaaagcggcccggatgaaccctgttgcagcattagccggtgaatag

SEQ ID NO: 291609 - DNA, 1413 bp, Morganella morganii
atgaataaatcatttttgtatcttagtgtgttactggcttccggttgcggtacattgattaaaagtgaatatatcccaccggctatcacctaccctgcccactggaaacaggcagaagcagatgctgcaggggagactgcgatatttgactggcacagttttgccgggcagcagctggaacaatggttaaccctggttgaagcgaaaaacagcagtgttgctcttgcgattctgcaggtttatcaggcggagttacgggcagaacaggccggactggcacttgccccgtcattttctgtttctgcctcaaccggattgacagcagacaaagcgttatccggctcttatgaccggagccggaatgatgacgcacgcgcaatggcgagagtcagttacgaagcggatttatggggaaaactggcccgtcagcaggatgttgctgaatggcagcggcaggcatcagaggaagatctggcgtcagcccggctgatattactccgcagggcggctgaaaattactggactcttgccctgctcggccagcagattgaagtcagtaaattaagcctggattatacaaaggaaatactccggcagacacaggtccgttaccggtcagggagtatttccggactggacgtcatcagtgcacagcaaagtgttctgagtcaggaaaatgcgctgcggacactgcatcaactccggcagcaagcgcttaacgaacaatctgtattgctcggtgcccctcccggtcagacagtggttattccttcacgtttgtcagatacaccacttccgcaggtgcggccggatattcctgtttcagtactgagccgccggccggatatccgctctgctgaactcggtctgcgcagtgcactggcagaagtcgatatccgccgggcagattattatccttcattcagcctgacgggaaatctgggcggaagcagtcatcagttgctggaatttttgcgtaacccgcttgcatctctgagcgcagttctgacactgtcccctcttgattttcgcaaaaaagatcttgatatccgtctggcacgcaataattacgagcaacagactgtaaagttccggcaggaactgtataacgcaatggcttctctggataatgcattgacccggcggcaacttctgattacagaggaagttcatctgcgggagactctggaactggcaaaaaaatccgaacaaataaatgcagtccgctaccgcaacggggccgttatgatcaccgactggctcagtgctcaggagaaccgccgccgggcagagctgaatatagcgcaaaaccgatataatcaactaagtacaatgatggttatctggctggaaacaggcggagatccggcaaataaaacaatcaacaaactgacatcaacacccgataattaa

SEQ ID NO: 291610 - DNA, 297 bp, Morganella morganii
atgaaagttacaaatatcaatggcagtggtaataataaatgcaaatgcgatagctggattaagcattgggaaacatttagcggtaaaaaagcggataaatgttgtgtgaaagggtgttcatctgcagcgacagatggcgcgcatgttcagaaatccggcagtactgatggatgttggtacatcgtacctttttgccacgcacataatacatctgctgaaggtacaattcttgagttaaatgcaggtatcgattttgaaccggcaaacgtatctgaaacatgtggtaagagtaaataa

SEQ ID NO: 291611 - DNA, 843 bp, Morganella morganii
atgatcaatattgagtcgtgttgcagtgatccggaactgattttccggggtgagagagtgaataaaaaagtcgttgattttttatccggaataataaaaagaaaatcaaaaaaaaaggaaggtgataatatttcggaatattattaccttcggtgtcattatgataatgaatatcatcatgggaatatacctctctctgttcctgatgtaaaaaagagagattgtcacgttccggatgattatgatattactctgatgtattcatcacctgataaaataaaagacactgtgtttaagaatggtatcagtcaatatattgtctgtaaaaatacgattgctgaaccatctgatgtgcctgctcagtgttatgctccggataataccactcaggataatacgatagcgccggaagaagcaggaaacatgccggcagaaaaagaatattatcccggtactgattgtggtgacacaaacagcattccggagccggagattgcggtaacgttgccggaacagcctgtttttatgaactatcctctgtcaggagtaagcccggaaagaggaaatcatccgttgcggcattatgaaccggaaaaagcggctcaggagaaaacatctcagacagttcatcattccgggaaaaatcagttgtctccggaaatcagaaaatctgattattattgctcttatcatttcagacagaaatatcagccaccggaaccggtttatatttacagagataatccgggggcgtttaaattagaaacatattcagaatccctgaggcgacgtctgaaatcagcagtaaatataaatgaaattgattatattgatataatataa

SEQ ID NO: 291612 - DNA, 180 bp, Morganella morganii
atgatgcaaaaaacggcaaaggatgttactgacctgactgtgactgataacccggctgatatcaagtcgggctcaggtgatgacgggaagcggattcccggtcagggcaggatattgttgaacctgaggaaactgttgagtgaattgaaattaataaaagtgatgctgaatttaaactaa

SEQ ID NO: 291613 - DNA, 1203 bp, Morganella morganii
atggacaatatttcactgagtaaaggaatgttaaataagagcaacaggttactgcctgaacagacagtcaatgaaattacttttcacggaagaaccggtgactattttattatctggctgaagaatattattttatgtattttaacgctcggcatttatcttccctgggcgattgttaaccggcggcgctactttatgaatgccacggaaattaatcatgcccgttttgaattccatgcaaagccaacggatattctgcctggttttgtgctgaccggtctgggactgatcgtgttctgtgttttatccccggagtccctgacactgtcattgttactgatgactgtcattatattgctgataccttacatgcttatccggctgtggcattttaatgtgcgtaatacatcctatcagggatgccatttttcataccggtgtgattatctgcggctctactgggtgacgatgattctgccggtgttactgcttattgcggtggttataatcagtaatgtgtccactcagttatatatcgaatcgtcgacaggtacgaatgtggataatgtattccgtctgctgatggttatgtgtattgtgccgtttaccggtctgtttttaatctggacaatacagggtaaacagctttctgaattgctgattaataacctttcctatgacaaagccgcattttcagtccggttggtgtacaagcggctgatgcagataagcctggttgcggtccttattttattgccgttcatgcttgccggactttctcagtttgagggcgtgatgattgcaatggtgatcccgccgcaactatggcctgatgaaatccggatcatggtgatgacgagaattgcactgatttatctgctgattttctgcggtgctctgatggccgggatctatttccgtgttgcctgcggaaagtatgtggtgaatgcaatgatgctcggtaatctgcgtttccggtgcgatgtgactttcctgtcttatctgtggctgatactgaccaatattctgctggtgctttttactctgggactcggcagtgcgtatgcagatatccgtcatgcccgttacatggcgcagcatatccggatcgtcggtgatatgaacaatatcttcggcgggcacaacggagaagggcaggctgaccgccgtcaatatgagagtgtgattgtttccgcagactga

SEQ ID NO: 291614 - DNA, 3675 bp, Morganella morganii
atgaatactgcaaaactaaaaaaatatgcccctcaagcaagacgtgagtttatcaccgctgtttcaaaacaatttaatcagctaggtatatacagcgacaaacagatatcagaggtaaaacaagaaggttcagtattactaattgaaggtaaaacctttgagtctagcgtaaaaactgccagagagcgattggtcaaaaaggttcaggcaatgggctataaccagctcgtggaacaggtagcttatacttggttcaaccgcctatgtgctattcgctatatggaaattcatgactatctaggccacggttttcgtgttttgtcgcacccagacaaccctaaaggctttgaaattatcgaccatgcgcaagatgctgcggatgaactcggattagatagagctcgcattattgaactcaagcttgcgggcaacaaagacgaagagctttatcgtgaactgctgttgggccagtgccataagcttcatgaagcgatgcctttcttatttgacgcattggacgatgaaacagaacttttgctaccagacaacctaactcgtacagattcaattctgcgtggattggtagacggtatccctgaagaggactggcaacaggtagaagtgattggctggctttaccagttctacatttctgaaaagaaagatcaagtaatgggcaaggtggtcaagagtgaagacatccctgccgccacccagctatttacacccaactggattgtgaagtacctagtacaaaactcagtcggtcgtcaatggctgcaaacctacccaaactctgccattaaaacgcggatggaatactacattgagcctgctgaacaatctgacgaagttaaccagcagctaaaagctattacgcctgaatccatcgagcctgaaaccatcaaagtactcgatcccgcttgcggctcgggccacatactgattgaagcctataacgtgctaaaagccatctacgaagagcgaggtttccgctctcgtgatattccaaagatgattttggagaacaacctctacggcctagacatagatgatcgtgcagcacagctatcgggctttgcgctgatgatgatggctagagatgatgataagcgtatttttacccgtaatgtgcgactcaatgtactgtcattgcaagaaagtaaccatattgacctgccgaccttatggaaagcactcaacctgtcgggaagctggcaaagcggcacatcgcaaggactgttctctgacgaagagcaagatttaagctcgttcaatgcggacaaccgttaccaactgctgaagcgaacgttggcaagatttactcaggcgaaaacctttggttctttgattgatgttccaagcgatgaccatgaacagctaaaagaactaatgggcactcttgtcgaattgcaagagtcaggcgactcaatgcaaaagccagcagcgaagcaattgattgaaattgttcatcaggcattggttctatcgattcgttacgatgctgtgattgctaatcctccctatatgggagcaaaaggaatgaatgcagaccttaaagattttgctaaggaaaactatccaaatagtaaatctgatttgtttgctatttttatggaacgagcatttaaattgctttctcaatatggatttaatgctcaaataaacatgcagtcatggatgtttttgtcaagttatgagcagctaagaagcaatttattggaagaccacacatttattactatggctcacttaggggcccgtgcctttagtcatattagtggtgaggtggtacaaacaactgcttggataattcaaaaagagcacataaaactatatcagcctagtttctatagactgattgaaggtaacgagcaagaaaagcaaaattcgttacttgacagggataataaattctctgcaataactcaagatgaatttaagaaaattcctactagccccatagcttattgggttagcgaaccaatgcgagatgcatttgttgaaggaatgctattgggtgatttagcgccagttgcagttggcttacaaacaggaagcaacgaaaactttgttaggctttggcacgaagttgcagttaataaatttgggctgaatgctaaaaatagagaggatgcattagaaagttctaaaaaatggtttccatacaataaaggtggtgaatttagaaaatggtatggtaataatgataatgttgttaattggcacaatgatggacacgagataaaaagttttgttgatggcactggaaaacagcgttcaagaccccaaaatatagaaaagtactttaaaccttctgtaacatggtcttttgttagctcaacctattttggtgttcgatattcggaaccaggtgcaatttttgatgtaggtggctcgtcttcctttcccaaagtagatgatattttttggttagcaggttttctttgttcaaatgcagcttttgaatttatgaagataatgaatccaacattgaactttcaagttggaaacgttgcctcacttcctattattgaaaaaaaaataaaaaccattaaagatgagctatcgagtacatctcgtgaattgatagatattcacaagaatgactgggatatgtttgagacttcttataattttaaaggtaatcccttggtcatgaaaaaaaccaaggatattaaatctgctcttcaatttttactttcagagggtaaaaaaaccataaaaaacaccatatctctagaggaaagaaataatcaattaataattgatgcgtataatctatcctctgaagtgagctctgaaattactgaagagcaggttacattgctcattaatcctacttatagatattcgacaggcagtgctcaaacaaggctagaaagattaatatccgatactatatcagagctcgtgagttattctgtagggtgcatgatggggcgctactctttagatcgtagtggcttaatttttgctcattctaacaatgacaagtttaatgttttggagcgcgatggaagttattctacatactcagctgacgaagacggtattatcccattaactgaacaggaatggttcaaagacgatactacaaaccgttttcgtgagtttgttcaggttgtttggggtgaggaacatttacaagaaaacctgaattttgtcgctgagtcattatgcctaaacgccttaaaacccaagaaatcagaatcagcgttggagacgattcgccgttatttatcgactcagttctataaagaccacctgaagacttacaaaaaacggcctatttattggctatttagctctggcaaacagaaggcttttgagtgcctggtttacctgcaccgttacaacgagggcacgctttctcgtatgcgtaccgagtatgtcaccccgttactaagcaaatacgatgcttatgcagagcagcttgagaagcagattgaaacggcagactcaacagttgaagcaaaccgcttcaagaaagagttggatgccttaatcaagaaacaggtcgaactacgcgagtttgatgacaagctaaaacactacgctgatatgcgtatttcactggatctggatgatggcgtgaaagtgaattacggcaagtttggtgatctgttggctgatgttaaggccattaccggttcggccccggaggttaactaa

SEQ ID NO: 291615 - DNA, 891 bp, Morganella morganii
atggataaactgaaatgtatgcgggcttttgtaatgacggtggagtctggcagctttgccgccgccgcagagcgccttgcactctccccacagcgtgttgcaaaggccgtcgcgcaactggaagatgagctgaccttaaatctgctgctgcgtaccacccgcacacattcgctcaccgagttcgggcaaatttattatgcccgctgtcgggatatccttcacgaggtggaaaacgcagactctatcgccgcacaaatgaaatctaagccggaaggtaagctgcgtattagtgcccctatcacgtttggcagcaccagcctgttgccgatgatttgccgctttttgaaagattaccctgccataaacattgcactggagctttccgatagccttgaacggctggaggacaatactagcgacgtggcgtttcgcattggtgaaattgttgacccggatcgaattgccaaaaaactgatgccttatccgctcatcgtctgtgcatctcctgcctatcttgccagccacgggataccgcagcacccggaagcgctggaacaacatgagtgcttgctctatagatgggctggggcgacgcaacgcaatacttggccattcagacgtgatggtaaggattttagtcttgaggtcgctggtagattgcaggtgaacaatagccaggcgttattaacggcggcgctgaatgggcaggggattatgatgggggcagagtcgctagtatgcagccatcttgccagcggagagctactggcgttactgacggcctatacaccgccgccgcgtccgatgcatcttctctattcggttgaaccagagcgcagagctaagatacaggtttttattgatgctgccgttcgctggtttgcgcactaa

SEQ ID NO: 291616 - DNA, 663 bp, Morganella morganii
atgaaaaaactaaccatcattggcgccggttttgtagggcgtgctatcgcagaagtgtttatcaaagcgggttacgacgtaatgatcagtaattcccgtggggcggcatcgctgagcagcattgtctccggtattccgcagtgtaaagcgggtgatatttctgaggcgattgccttctctgacgtgatattgattgccatccctttcacccagatctccacattgcccgcagcggcactggcgggaaaaatcatcattgatgccaataattactacccccagcgcgacgggcatatcttagagctggataatcggcagaccaccacgagccagatagtggctagacatttaccagaggctagagtcatcaaagcattcaacgcgattctggccgtcgatgtggtcaaacacgcagggcaaacaccgccaatgcgtgctcttccggtggctggcgatgataccgaggcaaaacaacgagtaatgatgatgcagagagatgctggctttgaggcagtcgatgcaggctctctctccgagagctggcgcttcgagcgggctaagccctgctattgcatcccgatggataaagatacgctaatttcggctctcgccgccgcacaaagagatgttgaagccgaagagggtagttggcgtcagagctag

SEQ ID NO: 291617 - DNA, 4452 bp, Morganella morganii
atgaataatacagagcaggtgagaatcgaaacgccatcattgccgaaaggaggtggtgcgattaccggaatgaccggcgcaccgggaaatatcgggccggatggtacagcgaccttttctgttccgctgccggttagtcgcgggagaggctatttccctgaaccggtcctgagttacaacagccggaatggcaatgatatatttggtcttggctggacaaccagcatgtcagcggtcagccgcagagtggtaaaaggtgttccccgctacactaatgaagatgaatttgccggtcctgataatgaagtcattgttcctgttttggatagtaatggcagcccggtttcatccacggagagcaaactgcttggtacagacctgggaacgaaataccgggtaacggagtatcgtccccgtctggaaacaacatgtgatcggctgcaatactggcaaacggaaagtaaagttcggggagagccggctgagttttgggtcatatttgccgcagacgggcaggtacatctgttcggatatgaggatcaggcccgtatatataaaccggataacccgcaacacattgcccgctggttaattaatgcgtcggtatcccctgagggagagcagatttattatcgttacagtaatgaggataatgaagggtgttctgaagatgaaatccgttttcatccgaaacaatcataccgctatcctgaaaaaatctgttacggcaataaaaagagcgggcgccattttccttgtgtgaataatagtgctgatgataaccagtggttgttttttctggtatttgattatggtcagcgcagctgtaggctggcagacatccccggctggcagattccggccgggcagcattggctgttgcggcaggatatcttttcctcttatgaatatggatttgaaatccgtatccggcgtctgtgtcgccaggttctgctttttcacaacgttgctgatttggccgccgataaggatcaaaactgtgctccggagctggtatcacggtttgttctgacctatgacgagtccccggtcatcacaacactgattgccgtacgtcgctccggttttaatgacccgacggataaaaacgggataaccgtattaccaccgcttgaatttaactggacgaaaccggaaaaatggtcagaacatcaatgggaaacattggatcatatcgggaaactcaattctcaccagccctatcagttcctggatttatggggagaaggcagtaaaggcatattgtataaaaatcgcggggcatggtggtaccgtgccccggtaagaaataaaaacagcagtgatattaatgctgtcacctggagcaaaccgcaacttttgccggatattccggcattggataaacacaatctgctgattgatctggatggtgacggccgcctggagtgggttgttattcaccggggagcaaacggttattatccgcaggataaagataatgcggaacaatggctgcgtttctcttctctcagtggtttgccgacagaattccattatccggcagcacaattaattgattttacgggcaagggattgtgtgacctggtggttatcggtccgaaaagtgtccggctgtatccgtcagatcgtaaaggctggaagggcggtatgattattaagcagcccgatgatgtaacactgccgattttcggagggaatgaacgttcttttaccggattcagtgacttaccgggttccggtcagcaacacctgatccggattaatatggatggtgtttattattggccgaataaaggcaatggctattttggccaccctgtttatattccgggctttactccgggagagcattttgaccctgcaaatctttatctggcggatattgatggtaacggttcggcagatattatttatgcgcattctgatcacctctatatttatattaatcagagcggtaatcgtttttcagagccggttaaattacccttacccaaaggcgttcgctatgatcatacttgtgaactgcaatttgcggatattcagggaaacggcgtggattgtatgatcctgaccaggccgctgccggagttgcggcattggctgtttgaattctcaactaaaaaaccgtggctcctcagtgaaataaataacaatatgggcgtaaattacacgctgagttaccggagttcggcgcaactgtggctggacgaaaaagcagcatcagatcatcaggaaacgccggtctgttatcttcctttcccggttcactgtgtatggaaaacgcaaaccaaagatgaaattaccggcaatacactgaccagtactgtacgttaccgtcatggtgcatgggatggtactgagcgggaattccggggttttggttatgttgaaataacggattctctgctgacagaaagtgaagaaggcaaaccggaaacagcgatgccgacgcaaacccgcagctggtttgcgaccggcattgaaccactggataaacggtttccgggggaatattggaatgaggataaggcagcatttccggggtttgcacccagatttacgcaaaactacggtgataatgaaaccgaatgtgaagcagagagtaaagaagcggcgaattattggctgcgtcgcggattaaagggacaattactcaggcaggaagtttacggtattgataaatcggaactatcagcagttccttatgaagtcactgaacagcggattgctgtccgtctgattgaaacacgggggagttatccggtaatacgcccgtcagttattgaacatcgccgctatctgtatgaacggttcattgctgatcctaaatgtacacaaacggtgatcctcagcagtgatcagtatggttcaccactgaaagaggtcagcatcagttacccgcggcggctactggggagtgttaatccttacctggttcttgacagtctgcctgaagagacatggcagcatagtgatgatccacagcaaaagaaactgcattttgtattacagcaaaatagttattacgaccttgataaaccggaagaagatatctaccagctggcgatagcaaatacacagcggcaggatatggctgaatctgacagggatgttctgccgccgcaaggttattctctggagaatataccatggagaaataaaccaccctgtgatgagtgtatatttatattttcaggacaaacccgggtggcgtactggaatgataaagaagagagcggattatttttacctgattttcctgttcgggtggcttataaggaaaacgctgaatttgataaagaacatcgtgataggatagaaaattatttcccggggtggaatataaatgatttattatcatccggcggatatctgaatacagagtatgcatttccggaagggaatgaaaataaggatgaaaacaacatctattcagcgcagcgggatataatgaaatacggaactcaggaacaattttataaaccgatgtcttactgtgctacaaacctgacaaaacccaatgaacttgagtgggataaatatttttgtgtggtttctaaatatacggattcagcagagggaataactatacctgaatataattttaaatatctttatcccgttaaaataacagatgttaatgataatatatccactgtgacgtataacggagccggtcaggttatcagcatccgtttttccggtacagagcatgggaagaaaaccggttattctgatgatgaattgataatacccgattctattgaggatgcacttaatcttactacgcgtttaccggtgtctgaattgtttctgtatgaaccaaacagctggatgctaaaagtttcccccgaatttatgacgccggagtatgacgatgttatctcaaggctgaaaaatggtcatattattactgaggatggttatttcagtgcattttcccgggaccgtatatctgaagaaaaccgctgcttaataaaagcgatgatgataccggataaaaacagattaccaccacatatattacagttacaaactgatcgttatgataatgacaacgcacagcaaatacggcagaaagtgactttttttgatggcctttcccgtcagttgcaaatatctgtcagggtagaagccaataatacagctatgaaaaataaaaaaatagggcaccctctgaaaataaatgactccgattctcgctgggcagtaaccggccgtaaagagtataataataaaggctatattattcgtgagtatcagccttattttataaatgattggcgatatgcccgtgattatgtcgtacaaaatgatcagtggtcagatactcattattatgacccactgggacgtcttatcagcgttgaaacagcaaaaggttattttcgtaacagcatatatacaccatggtttattgtacaggaggatgaaaatgatacagagtaa

SEQ ID NO: 291618 - DNA, 174 bp, Morganella morganii
atggatgaggccaccagcgcactggataaagagagtgaatcttacgtcaatcaggcgatccgccaattaccgattacgcggattatcattgctcaccgcgagtcgacgattgagtcagcggaccgcattatttctcttggcgggaaaacaataaataaagccacgaaaatataa

SEQ ID NO: 291619 - DNA, 306 bp, Morganella morganii
atgatagacatcaaagaacaagattttagtatgattagccaatctgccggagaggtaattcggttattgcggaaagataaaaatttatccggccatgaatttggtagtttaatcggcctgagtcagcagcaggtttctcgttatgaacgaggctattctcatttaacattaaatctgctgatggaaatgttagctgtactcaacatttcgctggatgagtttttatacaaactttatgtttttagtggtttttcagatgggaaagataatttttcactatttgaaaacaaaagaatatcttcctga

SEQ ID NO: 291620 - DNA, 546 bp, Morganella morganii
atgaagtttaaaactcaattactttctgttgcattaatcgcaggtatgtctggtgttagtttaagtgcactggctgctccggcatcagaagttacattacagggaattctgactaataccacctgtgatgtcaccatcaatggtggtaagtcagtacttaacgtaggtgtgtttaatactaaagttggtggtgcagatgccagcttcccggctgcaaacgcaattacgcctcagcaggttgatatgccggtttccctgactggttgtaccagtggcgaaacaggtgatttaattattcagggaatcacctctgtagggaataatgaggaaaatgtttttgtttctcaggatacaaacaccacaggctttatggttcaggacggtaataaccagatcgtgactaatggccatggtcctgtagttacaatcggcgctggtgacactgatgcttcatataccttcaaagtggggatggcaacaacaaatacgtcaccaacagccggtgcatacagcgcaccaattttggtcgcttatattgttaactaa

SEQ ID NO: 291621 - DNA, 726 bp, Morganella morganii
atgaagaaaattaatattattcggtttattgcggcaagtataatactggtttctgtgtcatctgtagcagggatagttattgataatacccgtatcatttttcaggcagcggatgactctgccgggaaaagtatcggaataaccagtacaacaaattcattgataccttatctggtaaaagcacagattttaaaaacaataaaaggtgacgatgcagatacaccgtttttggtgacaccctcactttttcgactggagccgggagccactaatcaggtcagaattatgaagaaaccaataaatctgccgcatgacagggaatctgtattttattttcgtactatcgctgttccgtcaggtgaaaaaaatgatagtactcaggaaagtaatattggcggtatgctacaggtttcaacaggtaatattatcaaattattttaccggccagctaatcttggtatgacgcagcaacaagcaatgcggtcattgcagttttcatctgaccggaacggattaaaaattactaatccttctccttattatatctcgctggatgcattgaaaataggtgacactaagattgcaatgagcatcaaaaatggtaacaccatgattgcaccattcagcagtaatacattttctgatgtattgcataaggggcgtgctgagtggaaagccataaatgactatggtgcgacggaggtgttttatggctttgtcaggtaa

SEQ ID NO: 291622 - DNA, 552 bp, Morganella morganii
atggctttgtcaggtaactcattaatagtattgtctttggttttattaggtacatcattgacagcccgtgcggaaatgacggaaataagtgctgttgttactggtgattcagggtgcagcatgactattccatctgtgctgaactttacaccacagcgtacttccgcctttcagggagcgataaaaacacatgaaattaaaccattacaggctgtatttacctgcactgataaatcagggcaactgactccgaaaataacattacagggtaatacaccttataacaatgattcagtttttctggatggtgcacccaatagcgcagggtttatgttacggctcagtgataatacatcactcggtttgagtgacttctatgatacagagaagtcaattaaacgcggaaagcaaattttgcttaatcccttggatgaaaaaaataattaccggacagaagaagtgtttttagtcgggcttgtcggccctgtgagtggtgtagccacccccggacgattttcagcagcgttaacttttaatctgatatttcagtaa

SEQ ID NO: 291623 - DNA, 546 bp, Morganella morganii
  misc_feature (509)..(518): n is a, c, g, or t
atggcattaattgaaaaaatgactaaggatattcaacaaaaaggagggctgatcgtttcttgtcagcctgtcgataatagccctatggataagccagaaattgtggcagcaatggcccgggctgctgtaaatgcaggtgccgtagcagtacgaattgaggggatagataatttaaaagcaacccgcccccttattgatgtaccaattatcggtattgtcaaacgtgatttaccggatagtccggtcaggatcacgccttggttaagtgatgcagaagcattagcgacagaaggtgccgatattatcgcttttgatggtacggatcgtgtacgtccagttccaattaatgagttactggcttgcatacaccaccttaataaattagcgatggcagattgctccacatttaatgagggaatgcattgccggaaattaggaacagaatttattggttcaacaatgtcgggctacacaggtggcgaaataccgaaattacctgatttacaatnnnnnnnnnnatttacaattagtcactgcattggctga

SEQ ID NO: 291624 - DNA, 345 bp, Morganella morganii
atgacactccccgttttcaggccgttaatcatatccgccacttttgtattatgcagtgtatttgccgttaattgtcgtgctgagactgatttgccctgcccgatgatctacaagattaaagctgaggagcggggagatcgtgtttgtttcagcagccggctgttacctgactgccctgcattgtgtcacccgtcaaaaagtgtgaaagaaatggtgaagttttattgtatcggctctgacaaaccgttacccgataacgaacccaatgccgttttggatgtcactgttccggtgagttgtgaagcgacacttcctgtatttgcagtaccggacaccacaccataa

SEQ ID NO: 291625 - DNA, 462 bp, Morganella morganii
atgggagaacctataagtgcaataataaataactccattaaatacagcaaatcagtacgtgatgttgagtcattctcttgggtcgattttgataaaaataatccgcaacatttgaatcaaaaaattttagaagttataaataccatagaaactgatattacattcaaacttgaaagtgctttagctcattatcatcaattgtgtaaatcaatacatggtgaggattcgagtggcataaatctttcaaagtttgtcgattatgggacggtgaatccaaaagaaatgtcattgcaagaatatggtttttcacgtgctgcagcttcggagttgctgaggaagtatcgacatttaatcgaatttgataataaagaccaattgattgaaataaaaactaaagctctggttaaagctttagataataatggtttggtcaaaaaggaaattgagtggcttagtctctga

SEQ ID NO: 291626 - DNA, 756 bp, Morganella morganii
atgcttaaacagcatttagaccccatagaaaaacgaggtgtccttgaaacacttcgccgcatcatatcccgcatgaatgaaattttccgctatgcagcaacagaagaactcatagaattcaattcggctgacaaccttgggcaacggttcagtaagcctaaaaaacagaatatgccagcattaccccctttcgaactcccccgcttccttacagtgctaaacaatgcctcagtccgtatggagacaagattgctgattgaatggcaattgctaacttgggttcgtccaagggaagctgttcgtgcgagatggtcagatattgatatggaaacctgcgtgtggaacattcctgctgagtttatgaaaatgaagaaaccccataaggttccactaagcaaaggagctttgcgggtattggattcaatgaaagccatcagcgggcacagagagtgggttttccccagcatcaaagctccactaaaccacatgtatgaacaaacagctaatgccgctattattcgcatgggctttgggggtgagcttgtggctcacggaatgagatctattgcacgaacggttgctgaagagagtagcaaattcagaacagaagttctggaagcggctctcgcacactcaaagaaggatgaaataattgccgcctataatcgtgcagaatacttagcggaacgagtggttctcatgcagtggtggagcgattacgtcattgctcaaaaatttaaaacattagccgcataa

SEQ ID NO: 291627 - DNA, 2835 bp, Morganella morganii
atgattgaaaaatatagtgtggatgaggttaaaggccataattttatatcagacccttattttaaagattgggatgatgataactgggataaaggcgaaccgggccattacacacagaaagaagatgatgatggaaaaacctatctgtatataaggggtacaggtagtatttcacaatctgttattttaccgaaaaaaagttccgggaaaccttcgttgcctcctttttactcattgtcttttgattacgaggttagaaacaaagcctctgtgtcactaattctgacatatctgagcggggaaagtgagcgggataaaaaagaaattaggttaccggataaaaatgggtggtctcagcatgaattactactggatttatccggggacgataccgaaataaagcttgaattttatgccgggaaatcagccgggaataaagggattaacctgactgccgttgatatgcagttacatattggcggattcagtccggaatccattgtatttgatcatgataatattccggcagataaaccatatctgcgacttaactatggacgtaagcatattcttaatatcaggccgtctgatgacagtgcatggcgtgatcttggctgtatgctgaagtggaaaaatgataacccggtatctaactatccgatccgttttgagcctgaactggaaacagtgcaatcgttaaaaaaagagggaagtgagtgggttatttcctgtttaacacaaaaggtcagtgatattccggagacattcgacataatgctggcgtcagaatacagttcagtaccttttatttttaacgctgaaataggcgatttcctctataaattgacggaaccgaaaatcagcggagttgctgttattgctcagaatataccgactgacatcagtatccgtgttgtttgtgactatgatgacgaatatccggatttaccgggagttccggatgttgatatttgctggaaaactgatgacggggaatttacccgtacgaccaaaacggatactgatggtatggcggttcttgaatttttaccggaaaaaagcgggaactataaacttgttgcgttaataaccgataaagcaggacgcgaaagccgccatccgtttgatattattgtttatgagcgttctccgtggctggatgatgcccgggttgctataaacaatgccgatgtcgatctatcaggagaagccgtatatctgatgaatggagagattacggattttcacctgagctgtgatagaaaccacgctgtttttggccgggttaagctcgaaagtaaagaaggaaataccggtatcagtataactccggcggaagaacgtgaaattccgccggaaggcctgtcatggaatatcaatatttccggcactgacagcagaaaactgacaaccatattaaccagtgaccaattctatattcagcaggaaattcatgtaattgcattacagccggataccggaaaagaaattcaggcactgaagattaatggtgaagaaataaatgaaaagacaccattaattattgctgcgcatgagagtatgacactaaattgtacggtcaataaattgttgtcccgcttacaggcggaactgagcagcaatgataacacattactgacagcagaaccggctctcgggcaattacaggcactgaaagacaatgcagcggaatgggtaatacacaatgcttccccgcagggaggattctttaatctggatctgaatattccgccattgacaattccgctgacgctttccggccgtacactcccgcaggaaatcgcctcaggcattgagctcattacgctgaataatataccggtaacaaccccgggaaatttatttcttgcgccggggcggacctgtacactgacagtgaaacctcatcctttactgaaagatatgcctgtttcattagttgcagaaaccagcaatggggtttctgttatcagtaatccgccgtttggtcagaaaatcagtctggcagaaaacggaacctcatggcagatatctgctgactccgcctctgcacgcggaaaattctcattgcaaattcagagtcagtggggcggagcgccggttcatctggatggcgtggtattgtctgcggatttacaggatgaaggctctatccgtgtcactgatggtgacatgggcaaaaaatacgatattgattttaatattggttttgcttttctggcttttgaactctattcactggatctgaaacttctgccggataatttaatcagcggacaaaccgtttcctgggaactgacggaaggagaccatcaccgggatgctgtttcgtttgatccggagataccgatagtattagatttaccgggtactgattgggaattcaattataccgaagaagaaagtactcaattctatttattattaagcagtcagggtaagttcagttataaaattccgtgccatattttcagtgatgataaatatctggaaaaaagtcaatgtgtttttatgttgaatgattcagttattgtccctggtatgaataataacgatcttgaatataaggagaaggtatcacttaaactgaaattatcacaggaggtatctgcgtttctgaatggaatggtattagtattagttgttcataaagctaatgatgagggtgatagtctgattataacctcagatgaattaattactgttgataaaaataaacctgaccttgaatggaccgttgaaactgatgtggcagtcggtaaccattttacactggaaatcgttttggtgaatttaaaaaatatccgtgccgttatgaggtttacctcagtgtaa

SEQ ID NO: 291628 - DNA, 4587 bp, Morganella morganii
atgcctcgtaatgtaaaaaagatttttaatcgtctcgcagagaaaaagcgggatgcatatgttgactacttcactaattatgtagtgggtaaaaatgaaaatacagccatgctgggaattaccgatgctgatgacctgtatgattactttttaacagatgtaaaaacgggtgctgattttgaaaccagcactgtttcggatgcactggccagtattcaacaatatattaataatattattaatcaaaaagagcccggctactcaggtgaatttagtgaagatattcagcagtggtggtccggttatctcagtcatatttcactgtggaaagcatatcagaaaatagaagattatccggaagactataatttgcctgattatgttactgataaaacaaaattgttcagtaactttgccgcagaccttggaaatgatagtttgaacgatgcgggaatacaaacggctttccttaaatatctgcgtagttatgaagcggttaatgctatcagtattatctccggatatgttgattatcccggagaacgcaatgatgatgatacatttaaagggcatggttttcttaattccgactatttttttatcggtcaaaacaattcatcaccagtcggtttctactggcgcgaagcgaatataaaagcggataaatcctctgattatatttctccccgtgcatggcaggaatggcaaccgttggtcatcactgaagatgcaaaagatattttgcaaatgcggattgtcaaagtaagtggttgtctttttattgtgtacctgaccggtaaggaagaaacgattccggatgaagaaaagccaatagaaggaagccgggctgaaagtaaaaaacaatatagggttaaacttaagctaagccgtatgggactggatggaaagtgggatattcctgaacagttatgtgaaaaaacctacacaaataaacccggaacaaaaactgaagataaatcgaatccgtttaaattaatatccgttgcatttactcaggatgaacagcaggatgattacctggttattgcatggctggataaggataataaggataataaggataatattgttttttccgatgttttaaatgtactcagacaaaaattaaccgtcgacagctcggtaattcttgggaacgggtgggcggagagtttagcgtcccgattttttagcgcaaaaaaaggaaaagaaaatatctgtcaacaccgtatttttggtactaaaaatgatatcagaaaaattcggggtactgacaatgatccgaatttatcgctggaggcattctattctctcagaaataatcaacatcagttacgggtcaggggtgtttgtcatcgttccgctaaaatacccaatcttatttcacttaatctccaggcagagatcagtgaatgggataatgggcgtattattgtcagcggagaccgaaataatattactgtcagagcagagtcaatcaacgaggccgaatatttagaattatccctgtctggtaaaccagtccttacgtttaataaagcggactttacgaaaaatagtaacggctggttttctgcagagcaaacattatcactcagtatggagcaatgtgaccagatagcaataaaagattataaagaaatacgcagcggtgctggttttacctataaaatagcggtaacgggaactaaatattcactggcacatattaaaaaccgggtcagtaccgtcatgcaacctgttgttgtccctgctgagctatctattattgatgataaagtcctcgatggtctgaaaaaagatgactggaagggggatttgatctatcagaagggcagtcatacgcggtggtgtaccttcagctggagtaatagtacaaagaatgaagataatcatgttcgcttcaaattcgggttaacaaaagaaggtgtaaaaggcgaatttacagttacaatcagtaaattatcggaagaaatccctgttattaaaaccttttcagaacatcagcagtttttggattttaatcagtctggtgcaaaactgaagaatatacgtcttaattctgttcaggttcgtgatcttatctaccgtgctaaaattgcagtcagacatatttttgactgggacgcacaaattgcacaagaaccgggatatgaaaagggcgaaaaagagaaactcgatttatacagtgctaacagcaggtatttatgggaattgtttttttatttaccttatctggtggcaagtcgtttttcacaaaaccgtctttattatcaggcccgtcagtggctgcattatattttttcaccttatgacgggcaccgtttatcagtaaaagatgacagtgaattgttgcctcctccttattggaactgccgtgtattaacgcagactgacttgaaatatcaaaataacgataatgcattacctgatccttacgcgatatccgaagatgctccttctcattatcgtaaatcagtctatttaatgtatatcgataccctgatttccgaggcggatttaaattaccgccagctcagtcgtgatagtattacccgggcctggggactttatcatcaggctaagggaatgctgggccatatacctaaggagcgcagtttaccaaaatggcagccgtgtaccgtgaatgaactgctggataataaaacctattttgtacaggaaaatacctttcctgagttattatcagagatatacccggaaaatatgccaaaacagctcagcggctttttctggtacggtagcctgggcaatgagcgattccgtctgccggttcaggatagtttactgagcaggcagtcagtcctgaatcaacgtttatttaatttacgtcattatctggatattgaaggcaatatgatgaaattgccattatatgctgctgcgtttgatccgtttgatctgctgcgttcccggttgggcggaaccgccgaactgacgtatttacagtccgggtcattaaatattccgtcatattgtttccgcacaatggtggaaaaagcaaaagaacaagcggcggcactgattacattaggggataaacgtctcagttattacgagcaaaaagaacgctaccacactgagaatatgcaattaaatgatgctgttgcccttgcgcaggccagtgctgatattcagctctcgttacagaaacaacaacaagccactaagctctctctggaggcggcccggacgatggctgagaacaaacaaaaatattacgaaaaactgtccgccggcggtgcgagtacaagagaatgtcaggccagaaatctgttggtgagtgcatccgtctctcagagcgttgcctcgggggcccttattgcagcaggtatcgtgtctgcatttccgcgtgtattcggcctggcgcaggataccggtgaccatggtaaaggagcgtttctcgcggtagtggggggagcgtctctcggtgcagaccttatgcgcggtactgcggagtatgttcagatggatgagcaataccgccgccgtcaggaagaatgggttttttctgcagagcaggcaaaaaatgaagtcgcagtactggataaacaaatcgaagctcagaccgtagccatgaccgcagctgataacagtgttaaatatacaaggcttcttcagactcaggccaaaaatctgtataactatttcagccaaaccaggcaggttaacgaaagtttgtatgaaaaaatggttaatatcattgggttattacatgaccagttgtgttctttggtcagaacattttgtgcattaacagaagcatcctggcgttatgaaacggatgattataaacgacagacgtttattcctgctgatctgtggagtggtgataatttaggtattttggtcggagttaaattacagaaagcactgcttgaaatggaaatggcgtatacacagaataatacacgccgcctgaatatcacaaaaacgatttcactgaaatcgcttgtcagtaatcatctggttaaaacagatgaaactccgctggcaacatgggatgaagtaaaagcagcgttaaaagaaggaaaaaaactatccttcgggttatcccatcaattttttgatacggattttccggggcattacgcacgaaaaattcattcattatcagtgacatttccgacgctgttgccgccatatcaaaatatgcgggttctgctggaacaaacatcgaatacattattggtctcaccggatattaatgcagttgaatccctctatacctcaacagaagaaataaacagtgaatcaattatccgtaatttacgggtaaaccagaaaattatactttcccgtggcaacgatgatagcggcgagtttccggaaaatgtctttaccggagggcaataccatagttttgagcacagcggggctatttcacactggttattgtcagttcctcgtccgaaacacagcactgaacttattgataatcttaatgacattatcattaaacttgattacacggcgaaaagtggcaatgaaacctttgaaacagcagtaaataagttactggatgataacgaatcagtaagaacagagagtaatgggcatgattga

SEQ ID NO: 291629 - DNA, 2517 bp, Morganella morganii
atgcttaatataccgttacaatggttagttccttctgtattactcggttccgatcggctgctaaattatgcaattgataccccttcaccagcagtgactaatgctgaaattagaaagcaactttatcgcttggctatgcgagactatcagggatatttgtctggtaagttaaggcaggaagatatcgatttagctctttgccagtggatagatatagaacaatccattgatatcctacctgtattgaacaaactgcgacagcaatttattcgttggtgtggagaccgctttgaagtagaaaaccatcagcttgaatcttggcttgctttattgagccaaattgatcctgcttggataatcagcgctggatattctgagtctattgataatggtatgttatcagtggatcagattattagtttgataaaaacacagtgtccgaatgcactaccaaaacgatttgatggtgaagctgtagcggataatcatgtacatcttggagggcatggtaataataacctttcaatggctgcttttgcgttatacttaaataagaaaccatgtgaagttacacgtgaaagatggccttatcgtgaagagcatagcctatttaatagtggggcatgtgatattaccgcactgcccgttcttttccaccgtctgtttggtttaatcataggtgaagaatcaaatgatagcaccaatgaaacatacttagcttatgattggcgttcattgttgactcataaagttactcctcatgccactacgttaaaccttttcccggctaactcccctttcttacgtttattacgcgctgctaccaatgaaaatggaccagctagttggttattaatcacgaccgctattttgctattaatgcgaaaagaagattcagaacatcgtaaattcttagctaagacatttatacaaacagcatcggttttacgtaactatatgattgtatctggtgttggactaggtgattttgttaaatactttgggtttaaatatcgaaagccatttatgggaatggattaccgcaagcatagtcaaatttatgatctttatgatcatcatttacgcgaatttcgaatagctgaaaatagttataaatatttttcaagtgcagccagagcttttattgagaaaaagaaagatacccacgttcattttgtttatcactttaccagaggatttaataacaaagatgagtctcggcgttatacggcagctcgtaaaaatatagcgaaacaattcaaaaaactgaggatattcttaagctcagttacttttgattcttacccaattattagtgaagatttcactaagctgcaacgagttgacctacgtgcaatgttgcgtggatttgatgttgcaggaaatgaaaatgagctaccaatagaagttttttcacccgcgttacgtttactgagaagcgccagtcaccactataaatttcctagagaaaaacgcttgcggcagccatttataactttacatgcgggtgaagattacgggcacatattgagtggattaagagccattgatgaagcagtgacattttgtgattacaaacctggagatagaattggtcatggtctagctttaggggtagatgttgataaatggatagagcgacaacagcatattttcctaccgttacaggagcatcttgacaacctagtttggtgttatcaaaaaggaatagaattgatagccgattatccgcaatttcaaccagctgttatggttattagggaaaaaatttatcatttttgttatgagttgcatgggaaagaattctcacctcaaacactctatcaggcatggaagctgcgccgtaattgtcctttaaccatagataaacaaagtgacgctcttggcacagaattaatattcttagttcctgatttagtgcagatacaaaatgctgataatgaaagtgatacaggaacagtaagtgcttcttatgacctctggttgaaatacttagaaagaaagcgtcatgataaagatcatgaaaaagttgtttctattagttactctcaaaatattggaagaaattcacctaactttcaagctgggatacttgaagattcactgtcaacaggtgagcttgaactaatccatggaatacaagacttgatgttagaacaattcagtcaggcgcagtgggttttagaggcttgtcctacatcaaatgtttacatcggtcgattaaaaaattatcaggaacatcctatttttcggtggtcaccgccaaaacgtgatgatcttaagcctggaaaaagagcaaatcgatttggaattcgtcgaggcccagtaaaagtatgtattaataccgatgatgctggattaatgccaacaacgcttgaaaatgagcatcgggtgataaaagaatgttcaattcactgctatggagctagtgatcaggatgctagtttatggattaactctattcgacgtaatggcgtagaaatttttcggtcaaaccatttggattgggtcaattag

SEQ ID NO: 291630 - DNA, 756 bp, Morganella morganii
atgctcaaaggtcaccgcagtgatgcggtgctccgcgtcatagtgataatgctggcaaaccgcactgtcacggacccggcgctgcgccatacggccgaaaccgtcatacgtgtagtcgtattcctcactggtggtgacctggttattaaacgccacctgccgctgatgccccagcaggttcgccgcctcatcatacagaaacagctcttcactgaacccgttcagacgccgggtcagctgccccagcggatcataacggtaggtttcataatgccagtgaccctgagtggccggggaatcggtctgtccgtaactgacgctgcgctccgtcaggttattgtgtttgtcccacgtataacgcttatcaatggttgccgccgtgacccgcgtactgtttgccagccgtgctatctgcgcggtgatgcgtccgctgctgtcatactctgtccgctggtcaagcccgccggagagccggttggtttcccggtgcagccggtcacggctgtattccgccagtaccgtctgttttccctgctcccgccagttcatctgctgaaggtggccggagccgtaatacagataactcagcgcctgcccgtccggcagttctgtgctgctgaggttaccgttatcatcatagctgtggcggtataccccggcactgttctgctcggacaacatctgcccgttcaggtcatactcaaatttcaggatatcctgccacggcacatcctccccgctgagctgcgccgctga

SEQ ID NO: 291631 - DNA, 1416 bp, Morganella morganii
  misc_feature (964)..(972): n is a, c, g, or t
atgagtagttctatatttaaggatgttggtagttataaaatggatggattccatctaacaatcaatacagataactctataaaaacatttactccggaggagaatcaaactcttgtccatgagtatacacatttcttgcaaagtatttcgactgtatatggttggtatcgtattagtaatctggcgattattacacaacatttagtttatggcatatatcaaaaagatgatggggttgttaggcgatttcctttttttaatccttccggaaaagatggggagttaattgaaagtgctatgtctcttaatactatgctcgaaggaagtaacggtgaagagaatcacattaaaaaaataaatcaatcccccgaattttatgttgtaaaagacgtgaaagctgaatgctttagcaagcatcctgattttgatgaagatataatggagctacctgcgggggcaacattatcaaaaaacattagagttacatatctttttgacccaactggtcagaggaaagacaatcctaataaaattgatgttatgcttggtgcggtttgcatttatgaatttatggcatatgcgatagaaaaacatgttgcagaaaaaaatgttgatctaccacagataccatattacgtcgcaagagatgttgccagattcattttagagtgtgatgttgatgatagaatcatcgcttcattatgtgagtttgctctacaaagtcgaagcccaggtgaaacatactacaatttactgatagggcttaaaaaacaaaagattgattacaatcttttgaatcccgatatcatgacgcagtgttttaaggcagattatattgtcaaggaagacggtggcgatgtaagttatagtccaatcgaattattaaacaagtatgctgatgaaacattagaagaatataaagtgttattctcaaaccttaatgattataaaggggtttctgatnnnnnnnnnggagtatcgtcggcagcgtcagatgtgtataagagacagcatataaacaatgtggttaaagagcatagaggaaaagacttatttatgatttcgaagcttctctatctaacgccagaagaggcagtgacaaacattattgaaaaaatgagactcattggtatcccaccaatttttaataattcaggttatatcggccatgctatatctgataaaaaccatgaccgttattatctatttattcccatgctaagtgagtttgttgactttactgtaaaaggtaattttcgatgtaatctcattagtacttgcgaaaagtactcaccagaggtagtaaacgataattgtcattcaaacgtatatctcaaggggaaggataatattctatgtggtgtcgggcagatcataaaaatgtggaagcttaacgattataaatttgaacaatga

SEQ ID NO: 291632 - DNA, 819 bp, Morganella morganii
gtgcagttctgctggaacggcctgcggctgacaggggagaagagcagcaaatccgcacatctgaccctgcattacgtctataacagcggcagctataacccgctggcacggatagaaagctttgaccatccggaaaaacagtcaacggatatcagctattaccacatcgcccttaacggcttaccggaagaagtgacggacagtcagggacgtattatctggcacggtgactacagcctgtggggaaaattaaaacgggaacagcacccggctccgggattccggggtcagcagaacctgcgttttcaggggcaatatttcgacagagaaaccggactgcactataataccttccggtactacgctccggatacaggacgctttacccagcaggacccgatagggctgctgggcgggttaaatctgtatcagtatgcaccgaatccggtgggttgggttgatccttggggttgggcttgttggggaacatcaaagaagaattattggaaagatgtagctaaaaaagagttagaaaagccgtcgggtatgtattctgcaagaaatatttcagaaatggctctgggtaatgcaccgaaaatacgagcaaaagtgaaagtcaccaaaacgggagctattgaaacaagagacataccttatgaacttcatcatacaaacattcctcaaagagtaggtgggccaaatgttcataataaaaataatctaacagaagttgatccttggcaacatgcacatgtagatccttataggcatcccggcattgaactaattgaagtaataaaaggtgtaaactcatggtga

SEQ ID NO: 291633 - DNA, 459 bp, Morganella morganii
atgaataaagaatttattatttatacatctgctttgtcttctgtcgcattaaaaaaatatcatgcaggcattggtcatgaggaagctgatctttttgttaagaaatctttcaaaatatacagtgagttaggattgccttttcctagtgtagaatggttggacagactgccatcctcagtaatgaagtggatgacaaattacctaaaagataagtttatttccatggataataatccaaaatgggtttctgaacctagttggaggtttattgatgaagagccaatggtatttattaatcaggttacttttttaaataatgaaattatggaaaataaattgtctacaggagatgtcctgtatacgtttgcagggagaaagtatatagatgaaggttgggagttaaaaattaagctgatcaaacaagatcactgtacaccaggaacaacatatatcgattga

SEQ ID NO: 291634 - DNA, 420 bp, Morganella morganii
atggctgatattgcatctattgccgctgggttaaacgcggtcaagcttgcctttagcatcgcaaaagacctgaaagaagctaccgtagcatttaatgaagcagaatttcgcttaaaacttagcgaattatatttgaatctgagtgacgccagaatgaacctggctgaagcacagcaagaaataaatgctctccaagaagaggttgcgtctctcagggttcaattgaacaccgtagatgaattagtattccgggatggattctactaccgggtaacaaaagcagatgggaaaccaaatggcccattttgtccaaaatgttatgagggcacccctaaaaaattgtcttctgttatggccgcgacaggaatacactcccattttggccgtcagtattgtcatgcctgccagagtcatttctga

SEQ ID NO: 291635 - DNA, 333 bp, Morganella morganii
atggtcaaacccggccagatcgctgagggtcagggcgctgttgtccgcgatccccacggccagatcagccccgagtttttgggtgctgtccagcgtgacggcggcactgtcggtcaggctgagccgtccgctgccgctgacattattggcaaaaatgccctgataccccgccagttgcagggtatcgccggccgccgccagattgacgctgctgtctttgccgaggttgttttcggcggccacacgcagcaggctgccaccgctgacctgccagttaccgaggaagccgctgttatcggcggtcatctccgccttgctgccgccggtgactga

SEQ ID NO: 291636 - DNA, 552 bp, Morganella morganii
gtgcagcgtgctgtcctgctgtccggcgcggactgtgctgtccgttccggcggtcagggtggctttgctcagtgcggcagtgttaccgccggtcaggttgagcgtggtgtttttcagactgacattcccggtaaatgcagtgccggttttgccaccgaaatcaaaggtatctgccgcattatgacgactgatgttcagggtgccgctgccggtcagggcatggtcaaatccggccagatcgctgagagtcagggcgctgttgtccgcgatccccacggccagatccgccccgagtttttgggtgctgtccagcgtgacggcggcactgtcggtcaggctgagccgtccgctgccgctgacattattggcaaatattccctgataacccgccagttgcagggtatcgccgcccgcagccagattgacgctgctgtctttgccgaggttgttttcggcagccacacgcagcaggctgtcaccgctgacccgccagctaccgaggaagccgctgttatcggcggtcatatccgctctgctgccgccggtgactga

SEQ ID NO: 291637 - DNA, 447 bp, Morganella morganii
atgaaaaatattaatataactaagaacccagcaggaaagttgacattagaactaatttctttttcaataataatatttactattgctgcaacctttaaatatataactaaaaactatagtcctgataactttactgattattttccagttcctcgtgatgatttgcttctttatatatcgattgtgggtggttttttcatatccactctatttaaagtaacagggaagtctataaaatcgctcaatgacaccatactttttctttcggcatctattattctctatcaaacatatactatttctgatgcgaatattatttctaaacttgaaagaatgataagtatcgagacactggcaattttcaaagcaactgttttgacttgtacgtttgctaaatttttcatttcttcgtttgaatttatttcagataaaatatctgaagtttaa

SEQ ID NO: 291638 - DNA, 123 bp, Morganella morganii
atggactggttcttagttcggaatcaggatggtacctttttagcagttacggattatcatactgtagatattaaatatttggcaccaaccttaaccttcacaataaatccatttaaattttag

SEQ ID NO: 291639 - DNA, 537 bp, Morganella morganii
atggatacctctcaccttatagctttgctttctgcagtttttaataaagcgtttagtcaacttaatatactaagagaacattaccataatcgtaaaaataaagaggatcaactccttgatgccatacttcgctaccgatatatattagtgaatgcttttgcatcttttatcaaaccaaatagcgtagttcaggctaacttagctctcgatacgttacctgccacccttcgagatataactattttctctaatttttcaagcacttacaaaagaaatgtgggatggattaatacttctgcagcgagtgatagtagcaagggcgacgtgaaagagatagctgatgacacaatagaagatatgccaagtattaaatttttaaaatctattttgagtcaccctatttttaccggtttaggtataaatatagacaactgtatcgatgtagaatccgctccaattacttatacatctggtaaaccaaaagcccgtagttcatccaataataatgaagaactaaccattgtaacggtatattaa

SEQ ID NO: 291640 - DNA, 186 bp, Morganella morganii
ttgagtactatcatcacaattgcgatggctgttttctggattgtctgggcatttttatttcaatacttctatatcaactactgcatgaatgcgctggaagaagattttgccaaggaaaaaatgctggcagatgtccggagtaactactcaaataacagtacggatgatgatgaaaataaaaattaa

SEQ ID NO: 291641 - DNA, 315 bp, Morganella morganii
atgaatatcgaagaatttgtgagtgaagataaccatatgtgcaatttaggcgatgatcttttttacaatattttcgaactgggagcaatttatgatttacccaataacgaaattaataaagaaatcatttactggctcagtcagtaccttgtcggaaacttgagagagcccttggactcgatctctgagcttgatattttcgagcagttttatgtttacgagacatggttctcgctaattaaatgtcccgttgaaatgagaaatctttcaaagcgaataattcaatatcagattgggctgaaaactcttttgtaa

SEQ ID NO: 291642 - DNA, 1125 bp, Morganella morganii
atggggaagctaaacctcattccggaatattcttatggtctttcggagactgataactgcctcatccaaggtgataatcttcatattttgcaatatttgacaaaacatatttctggaaaagtgaaatgtgtttatcttgatccgccctacaacaatggtgaaagttatcttcattattatgataacatgggccatgatcagtggattgaaaatatttcaaaacggctattgatcatccgggaacttttgtcctcaagtggaagtttgtggatatcaatcgatgattcagagcttcactatctcaaagttgctgcagataaaatattcggtagagaaaattttgtttccactattatttgggaaaaaagaacaacaagagaaaatagaaaagcattttctcgtaatcatgaatatattcttgtatatgctaagaaagcttctctgtggaataaggttaggaatactcttccgttgaccaaagaagcgacagatcgttataaaaatccagaccaagatcctcgtggaccttggcaatctgttacagctaatgtacaagctggacatgcgactccacagcaattctatacaattatctcgccaagcggaaaaactcacaatcctcctaaaggtaggtgttgggtctatccagaatatcgtatgattcaagaaattagtgcaaacaatatttggtttggaaaagatgggaatggcgtgccacggatcaaaaaatttcttgcagatcgtaaagaaggcttagttccagaaactttgtggcgtgcagaaactgtggggacaactagtgatgcgaaaaaacatctgctagagcttttctctgagatatcattgtttgatactccaaaaccagagcagttaattgctcaaattctaaaaattagcacaaatccaggtgatttagtattggatgcttatcttggttctggcactacatgtgccgtttctcataaaatgaatagaaaatatataggtattgaaataggctctcatataagaactcactgtgcatcaagacttgtgaaggtcgttaatggtgagcagggcggtattactgattccatcagttggattggtggtggtggttttaaattttataaatttgaaaaatga

SEQ ID NO: 291643 - DNA, 894 bp, Morganella morganii
atggaactttttgcgattacagacagcgaaataccgactagaataattaaaattgacatagatgctcccgcacaaacggtagtagaaaatctatttagaactcagaggagtgagtttataaatgaagatatcgaagaaatagagttttgtgcatcttataatgttcaggatggtgagatattttccatcaatccatttgatgacgaaataggcattattaatgcaatcgaacggcctgatgctgttccggtttgggaccccgatgatgtgtcagttcattatttcaaagcgttatttacgggtgagccagcttcgaatggtaatcctactcaggtttggcttcaatgtttcgacaggcgacaaataattaataatgaaaaatcctttttccaagtagtaacacagcctggaaatagattctcagtgtccactcgtcctggtttttcgcttagtgatcgattaactgctatccttgtgggtgataaattattgttcaagagtttctttatgctccggcgattttttaacatggaagagtattttaatgaagctactagagaggatttagataactttatcggtaatgatatatttcatgtggaaaatgctgaagattttatgacgtttgcagattctgcaattaaaaagaaagtatctttgataataagttctggaattctaaacgatcagcctattgaaaatctaattgagtgtgcccagaagattggatatcaattaggtataactaatgtgaatggtgataataaaatcactatgccaaactctaaaagagaagtgaagcaactattatatttccttgatcagggctacttcaattcaataatcacaaatgagctaatgctgacgaattcgaagcgaccaataagaatttga

SEQ ID NO: 291644 - DNA, 414 bp, Morganella morganii
atggaaaaatctaatcatgacgatcagcatcgtgatcgatttaggaaagataaaaatctaaggttgttacgccatttttgtatcagtgtgcgtttgaatcaggcagagcttgagcttttaaacaacagaaggggcaagcataaaaaaggggagtggttaagattaacctttttaaatcataccccaaccaacatcccgttactaaatgttgaagcttggaaaatgttgtcagacatatcgcaaaagctaaatcgcattgcggcccacatagatggtaagagcaaagacagcaagctaactcatacagagcttttcgcagtgaagcggctactcgtagagcttcgcaataaccttctaagaactgatttttggagtgcccctcgtgaagggtatgcggaagatcaagaggggtaa

SEQ ID NO: 291645 - DNA, 1182 bp, Morganella morganii
gtgaagggtatgcggaagatcaagaggggtaagaactttgctggtgtggtccaatatgcattgaagccaggttcacatcataaaagtgatccaatcgttattggcgggaacatgttaagtggctctgctcttggactgatttccgaattcaatggcacaaaacagcttcggccagatgttcagaaaccagtttggcacaactcgcttcgcttacccaacggtgaatcactaacgaatgaacagtggtcgagtatcgcagatgactatatggaacgaatggggttcagtgatacccatctccgttgctatgtcttacatgacgacgacggtcagcacatacacattatcgccagcagaatcgacatggccgatgggaagctttacttaggtaggaatgaaaacctcatcagcacccggattatcagtgaaattgaaatcgatcataacctgacagttaccaagactgctcctgcgattgcaccaaagcaaccgaagcggaaaaaaatctctcgcaacgaacagatgctatcggctcggactggtgttccctcccctaaggaagctctccaacatatcattgataaaagtttgacagatacacctgaccttttaacttttatcaagagacttgaagaagcagaggtcggctggacagctaacattgcttctaccggtaagatgaacggcttctctttcgaatacacaggcatagctttcaaagcttcgcaattgggcaagagctactcttgggcaaatctcagtaatcggcttaactacaaccccgaccacttagaagctcagcgaagcgacatatcgataaaagaccaacctgctgctcctgctcctgctcctgctcctgctcctgctcctgctcctgctcctgctcctgcaaaagatgttgcaacaacggatattccaagggaaagcataagtgaaaaaattgtcgaactggaactacggctcagagaagacaaacggaatgaaatcgtagaaaagattcttcaaaaaaatgccgtcaaaaggcaaaagcatctcaggctcatcggctggattccatttatcagaaggttcatagagcttctgcgaagctatggtaagagcattcttcataagacccctacaaacttctcagaagtctattcaacacatcatctaaaacctgcaagaaaaattcgtttatag

SEQ ID NO: 291646 - DNA, 1056 bp, Morganella morganii
ttgaatgaagtatatcaagaaatatatgaatgtataagaccactatgtgagtatgaacgaagttcaatagatggtatatcgaaagataatgttaatgcgatagttgagatcgtagaatcttatccactagcttcttgtttatcaacctctaataagaatagtatattcaatgagttacagaaggaatgttatttacgattgaatgaaaagggattagattcaccccaatttactactacattacgatactttgggggagtatatttttcttattatcaagcattcattctcgatatgattttatatctttcagatcgctcgaatgatgaaagtaaagacttcattaaagcaattgcattaagctctgccagtagtgttgttaatactgtaggtaaacaattcgcacaacccattagacctcgaaataaagatggttcaattaagaaaaatctaaactcactgataggtagagatcgtaatcttgatactattaagattgcaatatcttggattcataagtataaactaaatgttaattctacttatacttcaaatgctttaaggatggattatcaagaggcattagatatttatgggaaaaatttttctgtagtttatgctgatcctccttatacccgtgatcattacagccgtttttatcatgtattggaaaccatgagcttaagagatgagccagtaatcacaacaagtactcgacacggtataaaagagttaagtagaggtttttacagagaagagaggcatcaatctccattttgtatacgatcattagctccaaaggctttcgaaaatcttttcaaatccacgagttcatgtaatacaccactagtattatcttattcacctcatgaggaaggggatggtactcatccgagggtcgtatcaacaaagaacctaattgaattagcatcgacatattatccatctgttgaagtgattccagttgaaggaatcactcataataaattcaataaaaaggacttaatgttggaagaaagaaatattgccgaaatattccttaaatgtacattttag

SEQ ID NO: 291647 - DNA, 1131 bp, Morganella morganii
atggtaaaccatagcttttatgtacaaaatccggaaaccaatgatggctcatatttaattgataaaatacttgagcaatgtaatgaagctatcgctggtggtgctgcattcgcatttatgagttcaggaggagtaaatctcttaataaaagacagcagatttttatcttttttagaaaatcatgactttcatttaattgttggtgtcgatgcaataacagatgataaagccgttgatgaagttaaaaaggtaatgcttacttataaaaatcttaaagttgatttttttataacaaacaataaacgatcaattttccatccgaaatttgtttggtttcaaaaggaaaaggagtcaattcatattgttggctctgggaacttaacatcaggtggtttacggtggaatgttgaagcatatagtattttaaccgacacaacaagtaatgaaagctcacttatagaatggaaaaattttttagaagaaaataaaaatcatatatacaaatatgataatgaaaaagttatttcagccctaagccataatactaaattaaaacaagccttacttaaattaaaaaaaggagatgataatcttaacgagatagaaaagagctcattatctcaattgccaattgaagaagatttagttcccccctacgaattaaagaataaaatattaatagcagaaatccccagaaacggagaccggttacagcaagttaatttcgacaaaaagaattttattaatttttttggtgcaagtgatgatcagggtgaaaatgtctatgtgtatttcttccacatcacacatcaaggtttattacaagcaccagaggttaggcctgctgttgttgtaaagagccataattttcgatttgagttgaatgccgttaaaggaatgatttatcctaaggaaggaaaaccaattggattatatttaaaagtagcctctaaatccttcttatatatggtatatttaccgacagataaagattatccaaagttacaagaaatcctaaacgataaagcaggagaatcaaaatctagtatgcgccgtatagtatttacagcgcaagatatattagaaaaaatcccaaaatcaccaatttggaataaatatgaaataacctaa

SEQ ID NO: 291648 - DNA, 141 bp, Morganella morganii
atggttgttaaattaagtgtttttttgaagtggtggaataaaaggagtgagttgttcaggattgtttttataacggcaattccttgtgcctatgtagcttcttatataatatcagatatttttaatatgctgagaaattaa

SEQ ID NO: 291649 - DNA, 267 bp, Morganella morganii
atggatatgcatatttttttcagttcaatgattgattacattaaacccttcagttttatacttatttgtatagttatagcatatatgacgtttaaatcagcaaattcagaaaatacaaatttttggaaaagggttttaaagatattcctcatagctgaattagtcttaatcttatgggcagtctctgcatcgcttattaatagctataagcaacaaaacaatctcaataataatatattgtcaactacccctcaaaaaaataattaa

SEQ ID NO: 291650 - DNA, 1011 bp, Morganella morganii
atgtatttcacaaccacccgttatcaccaggaaaaaaatggtgcaacttttgtcgatattatctgcgatgaagcacacgatgcgggcctggatgtaaaattcaaaggcaacatcgacattaaaaaactggaaaaactgattgctgagaaaggcgcggaaaatatcgcttatatctgtctggcggtaaccgtaaacctggcaggtggtcagccggtctctatggcaaacatgcgtgaagtccgccagttatgtgataagcacggcatcaaagtgttctacgatgcgacccgctgtgtggaaaacgcctacttcatcaaagagcaggaagaaggcttcgaagatgtctccattaaagacatcgttcacgaaatgttcagctacgctgacggttgtaccatgagtggtaaaaaagactgtctggtgaacatcggtggtttcctgtgtatgaacgacgacgagatgttctctgctgcacgtgaactggttgtggtttatgaagggatgccttcttacggcggtctggccggtcgtgatatggaagcgatggctatcggtttacgcgaagcgatgcagttcgaatatatcgagcaccgcgtcaagcaggttcgttacctgggcgaaaaactgaaagcagccggtgtaccgattgttgagccggtcggcggccacgcagtattcctcgatgcacgccgtttctgcccgcatctgacccaggatgagttcccggcacagagcctggcagccagcatctacatggaaaccggtgtacgttctatggagcgcggtattatctccgcaggccgtaacaaagaaaccggcgaccatcaccgtccgaagctggaaaccgttcgtctgactattcctcgtcgtgtatacacctatgcacacatggatctggttgctgacggtattatcaaactgttcaaacacaaagaagacattaaagggctgaagttcgtatacgagccgaagcagttacgtttcttcactgcacgctttgattacgtgtaa

SEQ ID NO: 291651 - DNA, 657 bp, Morganella morganii
atgaaagagcgcggaataattttcagctcagagatggtacgcgccattctcgatggacggaagacgcagacgcggcgaatcatgaagcctcagccaactccatgtgattacgtagatgaacgcgggaaggctcgcggcggccatcagtggcccagtaacatatttcggacaatgcttcatgtcgagggtgagctacagaacggcgacggcggatggaaggggttggtgggagatgcctgtccatttggcgacgttgaagatcggatttgggtgcgtgaaacatggcaatgtgggttatgcacagagtcaacttttgcgtacaaatctacacataaacccactgatcttgaggagggctggaacgaaaaaattaagtggcgcccatcatcacaaatgccacgctgggcttctcgcatactgctggaaataaccggcgttcgggttgagcggttgcaggatatcagccaggcagatgctattgcagaaggcgcaccgcccagccacccatctattgatgctgtatctcgtgaatatggcttccctgattttccacgctcgtggttcgggcaaacatggtggcatatctatggaaaggaaaattggcaggctaacccatgggtgtgggttatcgaatttaagcagattcaggaggggtga

SEQ ID NO: 291652 - DNA, 1893 bp, Morganella morganii
atgacatttaataattcagtgctgattgcactgttttccgcttctttcagcgcttatgccacggaaccaccaccaccttatcagtcagaagttgaagttcctgatattaataccattctcagcagtgccactgatggctggccgaccgcaaaagataagtgggataataaatatcagtcaattatcaccggtaaccaatatattaatggtcagacattaaccagaacctggttcccggaacaatttctttatgttgagaataattcttacagcctgaataacaccattgattccttccagaccacattccggagcggcagtgtcgctatcggaaatatagtcaaaggcggaattaccaatccgtccgatccttccaaagtctatcgcggatttatgtcgatgatggaagactccatagcgtataacactattgttgaagataacggcagcctcagcctggggaatgacgccaaagcgtataacaccacagtgaataccggcggcagaatggttgtcggtacacggggctatgcacaggcaattttgatcgacggcggttatctggagcaatccgttaccagcacctcaaataccaaagatgtgattgtcgtgaatggcggacagcatattatctacggcggtacggcaaccaacagccatatcggcagcggcagctatcagatgagcagcggcaacacgatagataccgtgctgtatgacggtgcagttcagcagatttatgccgggaaagatggtgtgactgaccgcaataccatcgttaaccacggtgcattacagtttgtgacccacggtaatacagaagatacccgtgtttacggtacccagattattaccggtgttgacggggaatgggaaaacggcgagtggacatccgacgattctttccggattgatgatcagacagccaaaaatgccaccatttatgccggcggtgtgcagcgtattcagactggcgaagccattgatacccaggtttacggacagcagattgtcagcggcaaaaaaggcggctggagcggcggacaatgggttgagcaggatgcctggattggcaaagatcaggttgccaccggctcagtgatccaccagggcggtgaacagattgttgaatactatgccgatgcggttggtacgctggttaacggcggtacacagctggtcaaggagtttggtcatattcaggatactaccgttgagaacggaggttcatcctttatcgcttacggtgcctactccaccggtgacctgaatgttaatgacggttcagtaacgatggaaggcggtagtcttcacagctggaccggagctctggacggcaaaggcgcttatgttacccgtcttaatctggccggtgacaatgcgtttatgtatctgaagcataatgacaccaccagcgaatccgaagcaacgattgaaacactggctaacaacggtaccgtggtattcggcagcagcgacggcactgacgccggtaaatacagccggttacagatttcagatctgaccggttccggcacctttgtgatgaacaccaatattaacggtggtaccggtgatttcctgaatatcagcaacagtatcagcggtgagtttaatgtcagagtaatggattccggtcaggagctgaaaagccgcggcggtgtgaatcctcatcatctgatctttgccaacggcagtgacagcaacagctttgcactggtgaacggcagtgttgacctgggtgcttataaatattacctggtacagggtgatgagcaggacagcgataactggtatttatcaccgaaagcaaccgatccggcaccaaatccggatccggagccgggccctgatccgaagcctgaaatctccgaaagcgggaaaaacgggtaa

SEQ ID NO: 291653 - DNA, 732 bp, Morganella morganii
  misc_feature (708)..(717): n is a, c, g, or t
atggcaggcatagcatcgttaggcgtcggcgcaaatatggaccttaatcagcaaatggacatgctggaaacgttaactgcccaaaaaacagcgtgtgaagcacagattagtgctttcggaaagttacagtcttcactggaaaaattaaaatccgcctctgaagcactgaaaaaatacggtgatatcagtaccaccaaagtcagtgaagaaaataaatactttggtgtgtccaccacaggtaaagcacagccgggtcagtatgatgtcagcatcgagcgactggctaaaaaccagaccttatccggaaaaggtgttgctgacggtaagacatcaatgggtaacagcaacgctgaacgaactgtttccattaaaatcggtgacggcagtgatgcgaaaaagaattttgatataaaactgagcagcgataaaacatcgccgattgaagtcgctgatgccataaataaagcggataaaggcgtctctgctagtgtggtaaaagataaacagggtgaataccacctggtgttaatcagtaaaacccaggggaccaattctgctatcagtatttctgttaccggcgatgatgatctggataaagccatcggcggaaaatcagaaaaacaaaccgacggtaccgttaaatttatcagtaacggcggcatgaagcagacgaccgcaccggaaaacgcactgttcactgtaaatggnnnnnnnnnnggaatcacagactaa

SEQ ID NO: 291654 - DNA, 477 bp, Morganella morganii
atggaattaggttggaaatggcacagtgttaatgataaccatatggccgaaattactttatatcaaatagatagtaaagatgttcaaggatatgtaggtgttattggttatcaggcattatctaatatgggagattcaagaagtcgagggatagaatatctttggaaatcaaagcttacccctaatcatagtatttcactgggtggcatgggcttatatggcaaggagcaaaagtggtcttctcggattgcagtcagatttaatggaccattttactttaatgagcaaaataatttagaacaagggcattatactgttgttgatgcatcaatatcatggcaccctacaaagcaatatgaacttggtgtctatgcgaaaaatattggtgatgctttatatcgaacgtatgcatttggtaataaagcacagctaggtaacccgagagagatcggggttcagggaagtattaacttttag

SEQ ID NO: 291655 - DNA, 255 bp, Morganella morganii
atgagcagagaatacccgcagtttaaactgaggatgccgccagaaatgcgggataagctgaagcaacgcgcatccataaatggacgctctgttaactctgaacttctgcagataattgaagatgcattaaataatccacctcatgcgcttggttaccaaaatgatgctgaacgcatggctgaccagcaagcagaagaactgaaaaaatcagtattcaatacgctagtacaattatataaaaaggacgataaatga

SEQ ID NO: 291656 - DNA, 2385 bp, Morganella morganii
atggcgacgataattgacgcgctggttgtgacgctgaagcttgataaaggcaagttcagtaatgatgcgaagaaagcgacgacagaaagcgaccggctggctgcggcaattgacgacctgaccgccgcaataaaaggccagggggacgagaccaaaaaagctaagaagaaacaggatgattttactaagtccgtcaacaacggcattaaagctgttggtgctttcttcacgactattctggtttcgtccggcctgtcaaagctgatttctgaggttggacgaaccaacgaccagctttacttcctgagtaaaaatctcggcatgagtgccactgaaattaaaaagtggcagaacatggcggagatgtccggcggttctgcggatggtatggcggcgagcatgtccaacctcagcaaatcgctgtgggatttggtcactatcggggattcctcggtgctgccgtacttcaatgcgctgaatgtcggcgtggtggattctggcggcaagctgcgcgacctggatgctatcctgctggatgtggccgacagtctttccggcatgtcacggccgcaggcgtacaacattgcgaaaaacatgggctttgatgaagggacgattaataccctgctgcaaggccgtgacgcaatgcaggagatgctggacacgcagcgaggactggttatctccagcgaggaagaactggagatcagccggcagcttaacaaacagaatgcacaggtgcgtcagggctgggaggggctgaaaaccctgctggcaaactacctgatgccgtcactgctgaaattctcggagttggtcactggtgtgctaatgttcctcaataagaacagggacacggctgtaatggtatttaaaggcatcgggattgtgctgggtgttctgcttatcccgatggtgataaaagctgccacggcgtttttaggcatgttcgctgctatcggactggttcctcttgcactgttcgctctcggtgccggtttatggctgctgtatgacgacttcaaaaaatggaaggcaggcggagagtcactgctgggtgattattggaagaagtgggatgaaaccattactccaatagtgaagatgctggacgatttcaaggattggtttaaagacacaacaatcggcaagtggttcacggatcaagatggcaatcttgaaacatggaaagtggcgctcggtgctttcgggttgtggtttgccggtaagtgggttgtcgggattaccggcggattgctgaaaataggtgccggatttcttgcgctgttcgggtggccggggctgctggtcgctgggctggtgacagctctcggtatctggcaaatgaaactgaacgagctggatttatccccgctgatggttgctgcggcagaggcaaagattaaagttgatgaccttacgaaaagccttgatatgttgaggaacgctgaaaccggcggcgataaagctcaggcgcttatccgtgcaggaagtgacattattcccggtgggaatttccttaaaatgggtattgatgcaaagctgccagagaaaataagaaataagattgaaaaagatggcataaagaattctgtcacagacctgtggggaagcacgaaggattacttggtttcagcaggcaaggtgcaggagagaaacaaacaaaaatctgatgatggtaaagtggcctcgatccataaagaaagggggttaaggtataacagtccgctgaatcttgcgtatgccaatcagcaaggagctgataacactggcggatgggctaaatttgacactgaatataacggaattagagccagtgcaaagcaacttaaaatgtattacgacggcacttcgcgtgcggctgggtacaaaaagctgcaaacagtctcagacattatccatcagtgggcaccaaaagggcatggtaagaatgatcctgtcgcatactccaataccgttgcgtctcgcatgggagttggggtcaaggataagattgacctaaataacccggcggtgatgctttctctgatgaaggaaatgtcaaaagttgagaataatgggaaattcccttattccgatcagttggcaatgtctgcaatacaggggactggtgacccatatgcgaatgccgcaaacaatataaacaaattcaatgagtttgtttctaaaccaatcgccccaaatgcggcggcgggtactcggcaaataatggataattcgcaaatgctacaatctggcagtaaaacagtgaataacaacgttgaggcaaacattgaaaacatcaatgttcacacatcggcatccacacttagcggaaatgtgagtgatgggttggatgtgacagtgagagatcatatgttccaactgatcacaccaatgagctaa

SEQ ID NO: 291657 - DNA, 402 bp, Morganella morganii
atgaacagaaaaagctttagcctcgtaaaaatatttggttccgttccagtacatccggaagtctttggacagttggacaaaaagcttaaatggctgggtgtctgcgaagagggcaatagtttttgtgtcagttgcggaacaacaacaccatctgttccccgctcccatcatccggaatgtctttcttattgtgatatggattcataccctgaatatgaaaatgagataggtgtttgtcctggctgtggttccgaagatggcctgtcgataaacagtaattgtgatctcggcatatcagaaataagttgttgtgactgccatttcattttccagaaagaaatgagtgaagaagatttaatgtccttattcaataaaagatataaacaacgcctcgctaaatag

SEQ ID NO: 291658 - DNA, 171 bp, Morganella morganii
atgaaaatagcatttcttttggctgagcgtcgtgaaataaagcgcgagcttgagcggctaccatgggatgactttatcggcagaatgcggctcgtatcacagctgatgagagtggatgctttgttaactgaaatgggcgttgggtttgacgatcacgggctatcacgataa

SEQ ID NO: 291659 - DNA, 189 bp, Morganella morganii
atgacttgtagcaacaaaaaatgcacagatggtattgagctcatcacatgctgctcaggcagagaatgcgggtgcatgggtcagccagtagcggcaacaaactgcaaagagtgtaacaaagagaacagaccgccgacagataagcgtgttcttgagttgctgaattgcgtcgagtggcttggcgactga

SEQ ID NO: 291660 - DNA, 384 bp, Morganella morganii
atggcaggacacccacatgctgaccttatggctaaggcagcagagatagcaaagacggatcagtattggcagcggcactttgaggaaaaatttcacagtacggataagtggaatccaatgtcagatgtgttctttcaaacacacagagaatatcggctaaagccccgcttcatcgacattaacgggcatcaggttccggagccggtgcaggagccactggagtacggaacggattactgtgttgtggttctcgatggtattgattatcaacgctggtgcgatgatgaagacgatgaaaatctacttaaacaaggactcatccacttaaccaaagaagcagcagaagcccacatagccgccctgctctctttcacacagaaataa

SEQ ID NO: 291661 - DNA, 942 bp, Morganella morganii
atggcaaaagaactggtcgttatcgaaccagcgacagcgctcgacctttttacagcaccggataaggttcaggtactgctgtctggtatccgggagaaagcactcgcagagcaggcattactcgatactgatttatcgaaagccaagaatcgcgatgctatcaaatcactggcctacaaagttacgcagtcaaaaacatacatcgacaaagccggaaaggcagttgttgatgaactgaaagagctgccgaaaaaagtggatgccagtcgcaagcagtgccgggatgaactcgacgcactgagcgaagaaatccgccagccggtaacagcctgggaagatgcggaaaaagcgcgtgtggctgcggaagaactggttaagcaaattgagcgtgaccacgaagaagcattgcagatgaatgagctgcacaacctgcgcaaagccgaagaagaacgcaaacgcattgagcatgaaaacgaaatcaagcgtcaggcagcagagcaggcacgaatcgaagccgaacaaaaagcacagcgtgaccgtgaggcggctgaactgaaagccaaacaggaacgtgaagctgcggaattaaaagcacgacaggaagtcgaggccgcagccaagcgtgaacgcgaggccagagaggcgcaggaacgcgcagaacgtgaaaagcaggaagcaatcgcgagggctgagcgtgaaaagctggccgcagttgaagcggagcggcgaaaggcagaggaagccgaacgcgcacgattggcggagattgagcgccagaagcaggaagaattaaagcgccaggctgatactgcgcacagagataaagtaaataaccaggcgatgcaggatttaatcgctacaggcatcccagaagattgtgcaaaggcatgcatcattgccatagccaaaggatcggtatcatcagtaaaaattaattactga

SEQ ID NO: 291662 - DNA, 318 bp, Morganella morganii
atgaacaaatatcgtgacaaatcagattttgagattaataaggctgtggctgaatataaatatggcactgacgctgttgtagagaagttcggtataatatatatcagtgatagtgatgcgatggtgagcttcagcccctgcaacaatccatatgattccatgccggttattattgataatggtatatcaagcatgttcaacggtgacgaatggatttgcagcgcaagtaacggtgaatttctttctgtaaatgaaaacctataccgcgccgctatggaagtatttctgatgatgaaggatgcggagaatgaaagctga

SEQ ID NO: 291663 - DNA, 171 bp, Morganella morganii; identical to SEQ ID NO: 291658

SEQ ID NO: 291664 - DNA, 942 bp, Morganella morganii; identical to SEQ ID NO: 291661

SEQ ID NO: 291665 - DNA, 267 bp, Morganella morganii
atgtcagatgtgttctttcaaacacacagagaatatcggctaaagccccgcttcatcgacattaacgggcatcaggttccggagccggtgcaggagccactggagtacggaacggattactgtgttgtggttctcgatggtattgattatcaacgctggtgcgatgatgaagacgatgaaaatctacttaaacaaggactcatccacttaaccaaagaagcagcagaagcccacatagccgccctgctctctttcacacagaaataa

SEQ ID NO: 291666 - DNA, 174 bp, Morganella morganii
atgaaagtgacagtaaaagtaaccgatggcgagctttttgaaatgggcgtgacgaaagaagagcttagagcagcggtaattcatgatttggacgctgggcgtgactatgcaggatttaatgtcgaggttcacgttgttgactggaacgaccccgaagtatttgcagattcatag

SEQ ID NO: 291667 - DNA, 360 bp, Morganella morganii
atgaacaaatatcgtgacaaatcagactttgagattaataaggctgtggctgttgcacgtggctataaagttatgtcgtgcgaagaatcagtcatggcatacattgatagcgggtataagccattcgatccatgcaacaacccgtcggacgcaatgccgattattattgagaatggtatatccctgataaaagaggatgaccactatattgcagcatcgaccgatgttggaattgaaggatatattggcgcgcatgaattaatgctatatggcttaggttggttgagtaaggacaaaaacccatgccgcgccgctatggaagtattcctgatgatgaaggatgtggagaatgaaagctga

SEQ ID NO: 291668 - DNA, 285 bp, Morganella morganii
atgctctcgataggcatgtctaaggctgatgtgcgcggtattcttggagacccgagaagaacagatgtaaaccaagagcgtgagcgttggatatattggagtcaggtctattatgggtttaccccagtagataacgaacaattggccaatgaccggctaacagtcaccttcaatgatggtaaggtggttaagtggggtcagctggcttttgctgatgatatgcttgaggcatcgcagaaatcagcagaggccatcatgagagcatcacagccaagtcaaaaataa

SEQ ID NO: 291669 - DNA, 417 bp, Morganella morganii
atggaaaaatacgattttttaggatacgcgaaaaatttaatcaaaaacgatacttctgaggttgctatcagggtagctatcagtcgttcttattattcgtgtttttaccactctatagacctcataaagcctgattacatcagtagtgacgaatggaaatcgttgaaattcggcgatcataaaaagttaatccattctttacaccattattctggctgccatggatatgtccccaagaaactagctgcaaaggtagccaataaacttaactatcttaagactatgcgacaagatgcagattacgatttaaagtcgccccagactgtattacaagctaatcaggtcattaacgagtcagataaacttatagaactgatcaatagtttggaagtgtcttcagaaaaagcacaagcataa

SEQ ID NO: 291670 - DNA, 741 bp, Morganella morganii
atgttgcagcctcaatcgaaaggtaacgaaatcttagatgctcttactggctccatcctcaagggtgagctagatctgctccctattcaggtggcaggaattaagcgtgagataagtaagatcgataatgtggcatttaaaatgcacttgcgtggaattcttgctcttttgcagggcaaagatgtacatgaggcaatggaattgtgtgaaaaggcgatatcattagataccagtgaatccctatattggagcaattacatcgttgttttgagaaaccttggttacttgaaaaaacataatgaatttgtgaaagattcattttatctcattgaatactttccaaaaagggtgagttatgaacttctttccttgggaatgttaagcttggattttgagataattcaaaaaaccatgcagtttttggacaaggtcgatattaaaatggaagacattggtatcgacgggtctaaaggggggacgattatgttgatgtgcgagaatactgagcaagtaactaagcttaccccgatggtctcgcatttatttgatgtgttaaatgagcaatataacggacagatcgctttcctcttgagaacagatgatggcactatggggtatatatttaaggtcaaacttagtttgagcgatgtagagcgcttgaacgatgagttatttgacagattatatgacaatgatttattgcatgatgattgtttcgtccacatagaagcaaaggaatag

SEQ ID NO: 291671 - DNA, 192 bp, Morganella morganii
atgcgcatgtccgacaaatattccagccctacagcatacgcctgggggcttataacctctgcctttggcattttatctctggatcagtgggccattgttgccgggatcatctgtaccgtcggtacgttcctggttaactggtattacaaacggaaggaattccagttgaaagccggagaacatcatgaataa

SEQ ID NO: 291672 - DNA, 708 bp, Morganella morganii
atgggaagcgaagatttatttaaaaaaagacgaaaacccaagaaaaataaagaattagccagaagaagtggaaataaaactcctctagctaaaatattgattgtctgtgaggggctgaaaactgaacctacatattttgaagagcttatattttattataaattaaatacagcaagtgtaattgacgttacaggagattgtggctccagtcccatgtgcgtagtgcgtaaagctaaagaactacaagcagatatgaatcaaattggtgcaccttacgatgaaatttttatagttatagataaagatgcgcatacagattatagttctgcactggactcgattaaatgtgcaaaaccatcaaaaacctgggtagccgtaaattctgtgccttgttttgagttttggcttttattacattatacttacacaacaaaagcttataaaaacttacccaaaaacagctcaggaaatcaagttctaaaggaattaaagagatatattaaaggatatgaaaaaggagcaaaaggtatattcttaaaaacgctgaatagcctaaatttaaaggatttaaacgaagtaattactaaagcgaagcagtgcgaacaagcagcgaccagtagtggaacagataaccctactactatggtttataaacttgttgaaagattattgagtttgaatgaattaaaaaaatctaatacgcggtag

SEQ ID NO: 291673 - DNA, 1263 bp, Morganella morganii
atgctcattgaatttagcgttgagaatcatctctcgattaaaaaaagacaaacactctctcttattgccaataaaagtaatgagttagagcagaatgtttacagctataaaggaatcacaaatctcgatttactgaagtctgctgtagtttatggggcaaatgcttcaggaaaatccaatctgctcttagcgttcagaaccatgcaagatatagtcattagttcttcttcgagtcagattgacaaagagttacctgttgttccatttaaattatcgtctgagaccatcgatcaaccaactgagtttgagatcattttcatttcagagggggttcgctaccagtatggattttcagcaactgaacatcagattattgatgaatggttattcgcctatccaaaaggaagagctcaaaaatggtttctcagagcatgggatgttgataaatcagagtttagctgggagtttggatcgttcttggcaggcgaaaaacaggtgtggcaaaaatccacaagaaaaaatgcactatttttatcaacagcagtacaactaaatagtgaacaaatgaaacctgtattctcttggtttcaaaagaaaatgaaattatctggtgtttccggatgggccaacacgtattctgcaaaacgttgtactgacgaatttaaatccaaaattttagattttctcaaagccgctgacattgggattgatgatgtcgttgtaaaaaaagaaaaattcgatccagacgatcttcctgatgatatgcctgatgacctgagaaaggctgttatctccagtatgaaagacaaagaagtatatgaaatttctacaattcatttcgataatcaaggtaaaccagtaaacttcaaccttggtgaggagtcccacggaacacaaaaactctttgctttgtctggcccatggttagatgcattggaaaaaggctatatcgttttaatcgatgagttacatgatgctcttcaccctaaactcgtttcatacttagttagtctatttaatagttcgtctattaataaaaacggagcccaactaatcttcacaactcatgaaacatcaatcatgaatcagaatattttcagaagggatcaaatttggttttgtgagaaaaataaagagagtgaaacgagtatttaccctctcactgattatagcccaagaaaaggtagagaaaatcttgaggcatcctacctcgatggtagatatggagctttaccctatattaaaaaactaggggatttatga

SEQ ID NO: 291674 - DNA, 828 bp, Morganella morganii
atgaaggtcgaatacaaagatattgagagtgcatgtagaaaagatcagtcgccaaatttaagctatgagcgacagaaaaatctttatcgtattcttaattccgctactgatgagaaggttcaaatattacttcttcctgagttatcgatacctgtttcttggttgccatttatggctgcacattcaagaagaaagcaagttgctttaatatttggtcttgagcactgggtggtgaatgatcgtgcgaataatattttggttgagatgttaccttatacttcccattttaagcataagttcagtatgttgacattcagagttaaaaatcactatgcaccaagtgaaattaagatgctgacatcattgaggctgggtgtttcgtctcctgttcctgatgagcaaaaatatcatttaataaaatggaaaaatatatcgttttcaacgtataactgttttgagttagcaaacattgaacatcgggcacttttccgctcaaagcttgatatattatttgctagcgtatggaacaaagatattaattattatcaacatatcactgaatcagccgctagagatttacactgctatgttgcgcaatcaaatacatcacattatggtggttcgtgtgttcttcagcctactagtagtacaatttccaataaaatatatgttaaaggtggagagaatcattgtattttaacagctacgttaaatatctatgcgttacgtgaggctcaatatcgctcatttaggatagattcggattatatcaaagataatcctccaggatttgattatgacgaacttttagctcggggtggaaaatga

SEQ ID NO: 291675 - DNA, 192 bp, Morganella morganii
atgatggagcacatcataaaagccagcagccgtgaaggtgacctggtagccgatttctttatgggatccggggcgacactgaaagccgcactgaagcacaatcgccgcgttctgggtgtggagatggaaacggagcggtttgagcagacgaagactgaaatagtattgccaggtcttgaaagtttcacgtga

SEQ ID NO: 291676 - DNA, 480 bp, Morganella morganii
gtggtcatggtgaaatttgccggaatagacatcggcctgtactgttttcatggattcagacatgttttttaccgtctgcgccacttccaccagcgggataccctcttcagccaggcggcgggagaactgcaccgcgctccacgggtcaaacccgagttcacgcagatcatcaccttcgcaccatgccagaatgtcggctttgatgatgtcatgatcaataacctcaccgtcagtcagttccagatgcccggcagccgcccatttccggtacagctccgcaatatggttcggtgcggtttctatccggtcttccggcagccagaatttgcacttaacatgcacctgtccgcgcggatcttcataaaccttaattgctgcggccacgtcgattttatttgccaggtcaacgccgacccaggcagggtaatttttcagttcatcatccggcgcattctccgggcagttgtcccattttcctga

SEQ ID NO: 291677 - DNA, 378 bp, Morganella morganii
atgaactggaaagaggcggtaattgccgcgatgtttgttgttgccgcgtggtgggtatatgacacctaccgggataaccagcaactgaaggtgaataacacaacgttgtccggacagctgtcagcacagcggacgataaataccatcacgctttcagccgttgccatcagacaccgcgccgcactcgacaacatcaaagccaaagaaacagagggaacggagaatgtcaaagttaaaaccgttatcagaacggagtttaaagacagtgagtgcgctgttactcctgtttcccctggtgttattgggaagttgcagcaatacgaaagagatattcgtgcccgcgccggtggtgccgatcccgccacaactgacggctga

SEQ ID NO: 291678 - DNA, 993 bp, Morganella morganii
  misc_feature (964)..(973): n is a, c, g, or t
atgttacgtggtgtcattattaatggacaacaacaagtacttaaaaaagttccttattattccgttaaaacgcattatatccctacagaaaaaagtgacgcttttctagtattacgagctcaacttgctaacattgtttatgatccagaaaattggcctttatttgctattcaagttatcaagaccaaagaacaaccagatcatatttttattagccttgataacttattccttgatggaatgagtatgcagatatttttcagtgagctaaaaacgctatatatggagccaaatcaccaatttatccctctagatattacttttcgagattatattgattgtgatgcctatccgattaacacacaaaatgattgggaatattggttaacgcgtttaccacaattaccaccagccccacaattgccactaataaaagatccagcacagattgtgcaacctcgcttctcgcgtttacaaacatcattatctacttctgtttggcaagcactacaacaagttgctcaacaaaataatgttacgccagcagcacttttgattgctgcttattgcgccacattatccgcatggagtaaaagccctgagttaacaattaatttgacattatttaatcggcatcctgtacatcctcaaataaatgaagtacttggtgattttacctcattacaattactcgattggtatacctgtgatctttggtcaaacagtatctcaatgatgcaaaaacgtttacataaagatatgcaacatcgtagtgtttcagccattaaagtaatgcgtgaaatggcaattcaacgacagatgtctcatatagagatacctgtcgtttttacctgtgcattgggctataaacatgatgaaggttttctttctcatcattcatggctaaaacctgtttggggaatatcacaaacaccacaaacatggctagatcatcaagtatatnnnnnnnnnnagacggtgaattatatttaa

SEQ ID NO: 291679 - DNA, 1956 bp, Morganella morganii
atgcgagctgaaaccgtacagcataatgacccgtactgcactgactgcgctaatttaaaatgctggattgagtgtgtactggtcgatgaatttaataaacccctggctggtatcggttacacattaacggtccggggagccggtgtcagaaaaggacgtaccgataagcaagggtatctgcggcaggacaatttaccgcgcacactggcaagtctgaccctcgatgctcagtcactcactgacgaaatggaggaccgcccgctgcggacgctgcggggggaatcccgttccaccgtgaaaccggctgcagaatctgccaaccggggctaccgctatgttgtcatcggtgaactgtgtgataaagccccggatatcccgcagtgggaccgggttcgtttcgggctgccccattaccattttccggatgaaaacgcctttaacggacagactttcttcagtaccgactggaatcgctgtcatgtcattgaggtgtgtccgttcagagcctggtctttaattctccgtcatacccctgactacgatatggtgaatgcctataatatgggacttctgtccctgcttgtgtataaagatgaggttatgatcgatcctgatgaaactgaggatatgcgggagtatatccggacaccggataccaccacctcatttttttatcggcagtgctttaatttatcgcaggcaccggtacttaaagacagtttcaattacccggccatcgtcaccgatgtgccgttccgggaacgttacagcccggcgatatttctggatgcttcgcagtcaaagggttatgaaaaaggtgaccatgatacaaaaatgttttttgtggaaaatgcgtcacaaattatcgtggcatggcgcggcacggcaagtaagcggagtttgcttacggatgcaacctatcagcctatcccctgtccggcagaattagttcccggcggtgaatcaaaagttcaccggggttttctggaggcgtatcaatgcatcgggaaatatttcggtaaaaaaattgacaaactaagagatatcgtgaaggagaaaaaattatttatcaccggtcacagcctgggcggcactatgggattactacaggcagctgaactgagagataacaatccgctcctgtacacctacggaatgccgcgagtcctgactatcagtggtgcaaaatccctgtcatccctgcatcattaccggcatgtcaatgatgccgatacggtgaccagcgttcctttcgataccaatatggacaactggcttttcgatatcggcggcagtctgggcacggcgctgggtgcactgtggacatcctttacgctgtcaaccatcccgttgcagaaaagtctgcctgatttcggggaagtgtattgccatcacggtcatccggtcagttttttcagggcccggcagattggcgaggaaaaaattcgcagcaaaagcgggcgggaaaacgactataccggcacgaaacgctggcgcatgaacggcgaatatcagttctacctggtccctgacatacaggcacagataaataaagacctgcagaaagaacaggctgaactgatgcggttatcaggggcggataagcgcatgctggaagatgtcttccggccgttgaataacccccggttagacacactgattaccatgccgcttgaccattttatgggcagtcagtatcaggttattatcaataaccggctgctgaatatgctggcaccggcaaaaacaccggcattaaccagcgccaaacagcggtttgagaccctgattaatcatcacgatgcttatccgctgaatgccaaacgcaatacgacctttattgcactcgaagatactctgaaatatgccgttatgcaggacgtcagtaaaaataccgtattaaaacacgccattgaacgttataaggaagatacttatgaaattacggtgtcataa

SEQ ID NO: 291680 - DNA, 774 bp, Morganella morganii
atgaaattacggtgtcataaatacgcattaccactcttaccggtgttattactattacagggatgcgcacagaataccgcattttctccgccagtgaacggggagcgtatccgttttaccgccaccgtgccagccgaactggaggtattaccgctttataccatctaccgttctgatatctgccgggatgagagacagaattccagctgggaaacctataccgtaccggggtaccaccgggagcgctatccgctgactatgctcacgccgggtaaggtggaagccgatattcccgagtccgggggaggtggatgcaactggaaactcagtaatattgtttttgaagtcaaactcagggacccagccaaaatagaaccgttaatttcaaaaaatcatggcgaagaagctacctttgtgtttgacaatcatgccccggccacctttgatggtggttatgaaaaacaaacaggggatgtgaatgaagaactgatactgtttcctttgattacagaaagttttattggagggcacgagaagtcgttctggctaatcggaaaatatgaaaccctgacctataaagtcaaaaatgttaaaaacatcaatctgaccattgactacaaatcagatatgaaaacgcacagaattggaattaaaaagaaggaagaaaatgcgatggctacctttatttatcctgacggtgaacaggaaaaaaccagagagcttttccctgaatataaaaaattgatgaaaatgtataatgatcgtaaaaaataa

SEQ ID NO: 291681 - DNA, 492 bp, Morganella morganii
atgaatctgaaaaagcaggcagcgaactgtcatatttttgtactttcatttttctttatagccggatgtaaaccggggaatccttcagagcagcctgaaaaaatcagccggtttgatggcgtttatgtatgcagtataagccagtcatttaatcaattggcaattgagcagaaaaataaacatgcttttccgacggtaatgacaaaaaccaccattacggttaaaggcggcatcatgacaattcatggtatgacgtcaggtgattacgtcactcatcagatgtcggtcactgaaccaccgatgactgatagcggccgtatattatattcagaagtagaactccgttataaaaatgcaaatacacaggaagatttcacaaagaaatatggtacggcatcggtatctgaaggagatccttttgacaaagggtttatgcagcaactcagtagttgcaggctgtcgccggatggggggataacacaccaagggtag

SEQ ID NO: 291682 - DNA, 1194 bp, Morganella morganii
atgaggattcaacctcatgtttggagttgtaaaaatttagctgaaaaaaaatatgctttatctattattaaggattctctagctactcatggacatttacttgccgtttgtggagccatgtttcatgcagatgcattacaatactcactaatcaatgggagaccagctaatcccaatgaacttgaaaaaataatagatggtttctcagtgattccagatattattaatagtgtttatgaacttaaaagtttttggttaccaaattgggaaagagtcagtgggaaaaatttaaataatgaaatagaacgaattaaaaaagaatcaaagcattatttaattaacgcgattagctcgttgaataaaatggcggaaccatctgaaaattataaaatcgcaatcattgaattagaatgtaacaaagaggaaagaagaggaaccgctacaaatacagcaattgctagtagccttctttgttatttatttaaagactcatctccttatgaagcaattacatcttgtgtgaattttttgggcactgatactgactcaattgcaagtatggcaggggcaattttaggatgttatagtgatagaccaaaatgggatatacaagatagtgattatataataaaggaagctattcgactaagtaatatttcagatgggcatgctcaagagagtttcgtatatcctgatataaataaatggcaatcaccacaaactcaaagtgataccttggtaaaaaataatgaaggtaactactatattacagggcttgggatagtaaattcaattgggagtaatatctggaaaacaaaaactcatgcatggcaatggatgcggttggattttggccaaactatattaataaaaagtagaattgatgatatcagaataattgaaccaactcctcttcggactattttcactgaatttaaacaagaaaaattatttactgatgtggaaaataaaagtcagaataaaaatagccaagattttagtatctatcaggcagagaatgaggtttgcaatctggatattgataaaataacaacttctttaataaaagatggattcaatgaacaacagcttggacattttttgatacagtttgctgataaaaaaggacttgaggcctgtatcggatttgctgctatcataggtaaagcatttatagcgagaaagccgaaataa

SEQ ID NO: 291683 - DNA, 666 bp, Morganella morganii
atgaatattgaagaatatatacaggatagacatattttagaggtgttacatttcactacagaaaaggggcttactggctgcgctggcacgaaaatggtattgtctcgtaaagcattaaaagaagaacaatacttaagttatatagcatctcctgtatctcgtgagcgtaaagaagcgcaaaatacttttaataaagacgaagattggttagattatataaatctatcaataagtgaaattaatacaaactatttttgtgccgccaaaagatggtttgaaggatcagataggtggtggtgcataatgtcatttgatccaataattttaacccaccctggagtttattttacaacaacaaataatatttacactggagtaaatcgagctacaggaataaatggcctcaaaagtatgtacaatgaatcaattacaagatggacagggaaaattgttagaagaaaagaaagatcaatacatttaactacttgtgaacaggcagaggtcttgtatccaaatccattagctatgtcctttctgaagagtgtttatgtacagaacacagaacaagcagggtcaatacatggaacactgagaagctttggttttacagaagtaagtgttattgttaaacccgatagatttcacggtgcccctaatacattctaa

SEQ ID NO: 291684 - DNA, 1425 bp, Morganella morganii
atgaatatttttctcaaggagagttatttgaaaatcctatccaatcatagagctacacctgagcaattaccaatagtgagtagaaatacaacaggagtagtagttattcgaggtgctgcgggaagtggtaaaactacaagtgctctacttcgattaacagctattgttaatgctctgtcatatcggaaaaatcttgacggtgatgaaacaccaatcaaaactcttgttctatcttttaatagaacattatctggatatatcgaaggcttgataagagatagtattcaagtaggagcaattcctgttgaagtcgaaaatgatacttttgctagatgggcaaatcggcacgtaaatacgccattaataactgattcagaacgtgataattattttcagcaggcatgcagatacttaggctatgacttgaaatttattgtaggtgaaatagactatttaagaggacgatttctttactcagatttagaccgatatttaactacagaaagaacaggaaggggattatcacctcaggttaccaggccaacacgagaattattaattgatattgtaagacaatatcaacattatcttaatatgcgcagattagatgattggcatacgcaatgcgaaaaaatgattacttgtcaatctttaggttacgatattattgttgttgatgaaacacaagatttttcagcaaatcaaatcagagcaatattgaagcatttaaaagaagacttttatttaacattcgttattgatactgttcagcgtctttatcctagaggttttacttgggcagaaacagggttggatatgagaaattcaacatatttcaagctaaaagaaaatcataggaatactatagaaatagcctctttttcttcatctatcactcaagggctaactctagatgatgatggaagtttcagtgattttactcaaactacaagacatggcagaaaacctatagtttgtaaaggtctatattctcagcaaattaattttgctattaactatatacatgaatatgtagatttgaactcacagtcagtggctttcttaaaacctaaaggtggttattggttttatgaattaaaacgacagctatcaaataataatctaaaatatgtgacaattacaaaaaataatatttggccaagaggagaggaaaatattgcattatcaacaatgaactcagcaaaaggtcttgagtttgatcatgttatcatacttggattaagcagccaaaatatggactattataataatgagaatgatgatcaatttttacaattgagacgtttacttgcagtggctattagtcgagctagagaatctgtaattataggatataaagagtctgaaaaatcagacttagtaaattattttactaatggaacctttgatgaggttagtttatag

SEQ ID NO: 291685 - DNA, 303 bp, Morganella morganii
atgaaaaaacgaaatttcagtgcagaattcagacgtgaatccgctcagttagtggtggatcagaactatacggttgcagatgctgcaaatgctatgaatgtcggactttccactatgacccggtgggtaaagcagttgcgggatgaacgtgccggcaaaacacctaaagcctcccctatcacgccggagcaaattgagatacgtgagctgaagaaaaaactccaacgtattgaaatggaaaatgaaatattaaaaaaggctaccgcgctcttaatgtcagactccctgaacaattctcaataa

SEQ ID NO: 291686 - DNA, 1047 bp, Morganella morganii
atgtttgcggcgtattttgtcggtgctccgtatgacatgatggtggagcagcacaaaaaaggcgaagccaaccagaaagccctgtatcacggtaataaaaaagaagatatccggggcatggcactgcgtgacaaaaaattcatgagcaccctgagtgtcggtgaactgtgggatatgcagttcggtttcccagatgaggatctggagaaaaagctcaacgaacagtttgaaaaaaaatgggaagcagagcgggataaagcgctggggcagtacggactgaatcagaaaattgagggtattggtgcaaaagtgccggataactggtcaatgacagctggtaaagatccgaatgttcgtgcttaccgcaacaataacccgggtaatgtccgctgggccagtaatgaagtcgggcgtgaccggcccggggtggatgccaacggtaacaaaaaagggtttgcccggttcagggatgaggcagacggcagagcggcactggcccgtcagttactgttatatatggatcgcggtaataacaccgtggaggggattcttccaatctttgcgccgaagaaagacagaaacaacaccgaagaatatatccggctgctgtcaaagcatatgaatgtgaatccggatacgccgttggatctgtatgaccagaatgtactggctcagatgatgaatggtattatccggcaggaatcagacgcacagccgtatacttatcaggaaatgatggcttctattgacgatgcggtgaacagcccgaggtgggcggggctccggcatccggataaactggaggcgcagcgtgagcggtgggccgctgaaaactcagtcccggatatgccggcaataaatcatcccgcacagccggatactcagcaaattgtggatgctttgtccaaggctatccgggaatcgctggccgccgggcaggagagtatcccgattgaaattacattcatcaatccggacaccggcgcacgtcagaccgtgaacacgaaacagaaagggcgggtgactacggcaatgaattatccgtga

SEQ ID NO: 291687 - DNA, 672 bp, Morganella morganii
atgagtgatttttcagttcctgatgaagaagataaaaaacaagaagacaaattatcagtaatcatgcaatgccttgattatgcatatacaaaagctattgatggtatccctgggatggataccgcatatgagctcgctaatgattatttgaaagaaaaaggagagttggaggatcagataaactgtttgattagatggcaaaatacaaaatcagccacatcaggttttcttactggtgttggaggcttaattacaatgccaattgctataccagctaatatatcgagtgttatctttgttcaagtcagaatgatcgccacgatagcgattatggctggctacgacgtccgtgatgacaaagttaaaactttggtttatacatgccttgctggtaatgcttcaaaagaaattttgaaagatatcggtatccaaataggaacaaagttaaccaaatcagctattagcaatataagtggtaaagtattaactaaaataaatcaagctgttggcttcagactactcactaaatttggtgaaaagggtgttattaaccttggaaaatgcatcccatttatcggaggggttattgggggtggttttgacgcagtaacaacaaatattataggcaatactgcccgagataccttcttatctctagatattcaagattag

SEQ ID NO: 291688 - DNA, 471 bp, Morganella morganii
atgacgcagattcggttcgcgccatccccggaaaaaataaaaccattttctttcaaacccgggcagcgggataaccggcaaagcggaaagacgctgacacatccttgtccgctcggttcgcgccatccctggcgctttacgctttcctttttttgccggttaatcccctgtgtacttcaactctgtcaaaaacagaaaaacaataaaattcagaaaagaaaccaatctgctaaatcatccgcgctgtggcaaggcggcaagggaagaattccggggagcatacaccagtatgtgacccggaattctgagtgcagccaacacagccacagagtggaggatgacgcagattcgctaaatcatttcgtttgtggcatgcggcaaagtgaggatatccccgggagcatacatcagtatgtgaccggggtagccgaacgaagccaacgccgccacagggcggaggatgacgcgtaa

SEQ ID NO: 291689 - DNA, 1089 bp, Morganella morganii
atgtctgtagatagttcaatctcaaccgatacagaggtggaaaacgtgtcagacaataagaaatacttaatatggaataataaaggaggtgttggaaaaacattcctgacttattgcctgtctgttgaatatgctatagcccaccctgatgaagatgttgttgttattgatgcatgcccgcaatctaacgtttcagaaataatattgggtggcaatggaaccggagaagcaaagctaaacaaattacgggatagcaatgcgactatagcaggatatataaaagatcgatttagtaaatctcctttaaataaaattggtaatgaatcaagctttttccaacaagcctgtacaatcaatacagctatgccagaaaatttatacttacttcctggtgatgttgacttagatatttgttcacggttaattgcgcacattggttcctctcctgtaaaaaaagcgtggaaaacaagccgttctttattatctgatttaatggaatcctttgaagcagacaaaggaatacctggagatcgggctaaaacattttttatcgattgtaatcccagttttgccagctacactgagttagcggttgtggcatcaaataggataatcacaccatgtaccgctgatgcggcttcaattagaggtataaaaaacctcataaaattaatatatggtatttcaattgaaagctcagaagctgatgagttatttttagacttcaataaagaagctaaagataataacgtaacacttccaaaactacatctttttattcaaaacagaagtcgaactacagagcgagatgctgctcaagcattcaagtcgcactctgatgaaataaaaagaatttcaaacgagctttttaaagatcatggtacactatttactgagctaccagttcaagaaagagtgattaatgttaaagatggaaacacattggcagcaataataaatcacgaaggatgtcctatcagtacattacagcctaagagatattctatatatggccgtaaaacacaggcaaacagagagcaaataaatgccttaaccttggacataagatctgttgttgagtccctataa

SEQ ID NO: 291690 - DNA, 678 bp, Morganella morganii
atgttacttctggaaacgctggtttccagaaaagaagggttccgtcttgctgaactttcagagcaattctcacttaataaaacgacgttgcacgggttgctagccaccctttcttcactgggatatgtttctcgccgtggccagtattatgtcgccgggttacgggtcagggatattgccagaccactgacggattcggatcagcaactgcgtgaacaatttactcctgcgttacgccggttatctgtcctcagtggtgaaacctgttggctcgctgttccctgtggtacgcgcgagtatctctatattgatgctattgaaggcgggaattcactgcgtgttgccagcccaagggggacacgggaaggattgatcacctctgcaatcggacgtatctttctggcttttcatgaggatcttgccagaacactcagaaaagagggactaattaccggcaaactaaacagcacgctttcactgattgctgagtgtggttatgcactggatatagaggaagccgagaaaggcctcaactgcatggcccttccccttcggcagcatggttacgtcgtcgcggccatgggcgtagccggtccttcaaatcgccttcatcctgattacctcagacgattggctgttcggataatgcgtgatatgttcgatattatcaaactttaa

SEQ ID NO: 291691 - DNA, 405 bp, Morganella morganii
atgttcgaacaaatttcccgcgataccattcgcagaatcaccgtactggcccaggaaagcaaacaggctgtgtgcatcagtattgtggacaatgcaggccttctgagaagcttccttcgtatggatggagctgtggctggcgcaattgatgtttctattaaaaaagcccgcacagcggctttatttggttccgattcaataaatcttggacaagaggctcgccccggcggcagtatttattctcttgaatcaactaacggcggtttaatcagtttcggtggtggtattgtgctccgggacgatcagggcgcgatccttggcgccgttggtgttgcaggtgctaccgtagactcagaccagcaactggccctgtccggagcagcagcggcagcaggaagggagtaa

SEQ ID NO: 291692 - DNA, 1173 bp, Morganella morganii
atgcagcgcattcatcccggtttgctggcattgtcggtaacagcgtttgctattggtatggctgaattcattgtggtcggtattttgcctgagattgcaacggcactgcatatcgatttaccccgtgcaggtaatcttgtggggttgtatgcgctggcactggctctgggtacaccactcgtagtcatgctgttttctggttcctccccaaaacccgttctgattacgttgatcattctgtttctggcaggaagtatgatctcagcgatgtccggcaattatttatttttccttgcaggacgattaataaccgccgtagcccatggcagtttctttgctatcggtgctaccgttgcggtcagaatagcgccggcaggaaaagcaggccaggctattgctatcatgtttgcaggactgacgcttgccatggtcataggagttcctgccggaagtttactcgggcaagcgacgggctggcgtgtgcccttgttgatggttagtgtcctggcatttattgctttattgtcgacactgatctggctgccggatgtcagaaaaaatgaatcaggcagtaccggagaacaactgcgggcattattgcacccggctattctgaacatgatggttataactatcctcgggtttggcgccagttttgctgcatttacttttattattcccatactgaccttgctcagcggattttcttctgagacagcgagcatcctgctgatagtgtttggcctggctacactggccgggaacctggctggcggccatttctcatcgacacggggctgggcttttaccctgggtattcagtttttattactggctgtcgttctggttgctctggctgtattacttccatggaaagtgcctgttgttgtgttactttttctgtggggggcgctggcattcggtatatcgccggcagtacaacaggggatgttatcgacggcagaacgatataccccgcgggcagttggatttgcttctgctcttaatatatccgcttttaatctgggtatttttgccggggaaaataccggaagcgtgctggtacattataaattgctggcgtacactccatgggcaggcgcgggcatgtgtctgctggcgttagtacctctttacctccggaacagatatatcaggcagcatgctatataa

SEQ ID NO: 291693 - DNA, 435 bp, Morganella morganii
atgcgtgtgcaatttctgtttcaggacattttggtgcctatttgtcatcctgcactattaacaaataaggatatcaatcaacagttaaacgaatttttacggattaatcatcgacagaatccagatgcatggcataactatgcccgtgaaagcggaatagttatcgataatccggctcaaggtgtgcgctacgaccttcatgaaatgacaattgctgccgtcatggcgggacaaggcgcagcattagttccgcgaatgtatgtcgaaaatgaactgagttgcggcatgctggtttcgccctggcctgcatcagatagtctgagcaaaaaattctgtttagtaaaaccggtagaaacgggtataaacgagacagcaccagagagttttgaacgttggttgcttgctgaaatgaatacgctaacaagtacctcttaa

SEQ ID NO: 291694 - DNA, 303 bp, Morganella morganii
atgaaaaaacgaaatttcagtgcagaatttaaacgggaatcggctcagttggttgttgaccaaaactataccgttgctgatgcggcaaaagccatgaatgtcgggctttccactatgacccggtgggtaaagcagttgcgggatgaacgtgccggcaaaacacctaaagcctcccctatcacgccggagcaaattgagatacgtgagctgaagaaaaaactccaacgtattgaaatggaaaatgaaatattaaaaaaggctaccgcgctcttgatgtcagattccctgaacaattcccggtaa

SEQ ID NO: 291695 - DNA, 507 bp, Morganella morganii
atgacaaactatgatttcagagcactcaataatgaagaatttgaaagactagctatagacctcttaagcaagagagaaaatatgcttattgagcgctttaaatcaggaaaagatggtggaattgatggtcgtttttatcattttggcgaagtaataatccaagttaaacactatgttaaaactggttatagtggattattaagtaaacttaaaagtgaagaagttgcaaaagttgaaaacttaaaacctaatcgatacattttcatcacaagcgttggtttatcccctgctaataaaaaagaaatttacgatttatttaatccttacattcgaaaaaataatgacatcattggtcctgaatatctcaatgaccttttaacactttaccccgaaatagaacggaatcattacaaactttggctttccagtacaaactttttaatcagtctgctaaataatgctacaattcaaaatagtaacttcctgattgaagatgctaggaaataa

SEQ ID NO: 291696 - DNA, 1236 bp, Morganella morganii
gtgggtaatgttttgccatcctctaatataaaaaaaaatctcttatacttaatactagtacaactagctaactatattgctccattagtcatacttccctatctggcaagagtaataggtattgatggtgttggcattgtcgcaatatgtttatccatatgtgcaattgcccttattgtaacagattttggttttgctatctcatcaacctactggatatccataaacagaggcaaaaaaaataaaattgcaacttatattggagctgttctaatcataaaaataatattatcattatcttttatagctatattatcactatatccaatagatgaaatgataaaagtacaaaatatactttacccattgattgcagcaatagtatttcagacattccaaattccttggttttttcaaggtatcgaaagaatgcaaaacataacatactgcactgtagccacaaaattaagttatctaattttagttattctatatgttaaaaatgaaaataatatacctttagttataactttctttgccataagtaattttatttactcattaatgggctttatactatattataaacaaggctatactatatcaatcccatcaatacgtaaattatacatggtttttaaaaacaatattccgttctttttttcaagagctgctgtaggtatttatacaagtgccagcacactaattgttggtagctatgcgggttcatatcaggctgcactatattcaagttcagaaaaattatatcaaggagcagtaagtctaacatcaccaattagccaagtcttatatccacacctagcaaaaacaaaagatagaaaaatacttataaagatgctttatacattattacctatcggctttatattgtcaggattatgtatatatttttcggataatattattattattatatatggtaaagacttccttgaagcctcacgtattttaaaagtatttatttttatatcaatccttagttttatcagtataaatttaggctacccgctatattccaccataaacaggttagacatagtaaataaaagtgtagttatcggtggttttttacaattaatttttgtactattactatacatcactcataacataaccgcatataacatttcattatctatcctagtcactgaaatagtaatattacagcttcgcttaatccctttttatttcataatacgcaaaaatcacaaatga

SEQ ID NO: 291697 - DNA, 204 bp, Morganella morganii
atgactgtaacgaaaagaaaaaaaataaacagcggaaaaataatcagtttactcaatattaatccattcacttttagctccgaagttaattcctgtggtatctctagatcgcattcattctctgattatattatccggtttattaccaatttcttcagcttagcggtacaaaacctgtatgttatgactgaataccaacgatag

SEQ ID NO: 291698 - DNA, 174 bp, Morganella morganii
atgagcggtaagcgttatctcgaagagtttaaaattgaatcggtaaaacaagttgttgaccgcggtcattctgtttccggcgtggcaacacgtcttggtatggtaatccccccatttttaacggaggtaataactcatacgttgtatatattgcattggggtgtagccatttaa

SEQ ID NO: 291699 - DNA, 3855 bp, Morganella morganii
atgaatcatatttataaattagtttggtgtgcatccagcggatgtgttattgctgtttctgagctggcatcaggcagcaaaaaaaaagtttcttcaacaggaagaaaatcattaacaacgattgcattgctcagtttttctctcagcgcaacggccgctcctgatactgatattatttttgaaaacgctgaattgtcagaaaataatatcacggagccaatttctaaaaacgtaaatattgcaaatatcaataccaataatcttaatatactgaatgataaaaatattataaaaaatggtaatcttaaccatgctatccgtggtgatcttggtgcaggaaccaccggtaataaaattaatattaccaatagtggtaatttaacggttagtggtgataaagcgacaggtattttttcagaaaaccgtgatactggtgatacagttgttagtcatagtgggaaaattattaccgaaggcttggctggccatggaatttataccaaaattgagagtgatggagcaggtcagaatattactattaatgttaaaaatgctgaaatatcaacaaatgatagagctgcaacgaataaaaatgatatcgcatataatatttatgcggaacaaagtaataaaaacgccggtgatgttaatattaatatagaagatagccggttgctcagtagaagtagtgattatggttcatcatccgtttatgtgaaatctgatgctaagacaggaaatttaacagctaaattaaaaaattcaaatttacagttggacggttcaagtgcagacgcaataaatttagttaattatgcagatgattcaaagggtaatgttactatcgagacgaatagtggcagtatccatacacataattcagataaaggtgttgcctataactacggaattattggtcatcttaaaggtgcaagagccactggtaatgttctgattactaataacaatacaaatattatcacaggtattgaaggtgctgaaggtcacgacggaattggaatatatggagttattgacggagatgattctgcgggttctgtttttattgacaataacggtataatcaaaacaaacgaaaagggcgatatgaatatcggtatttatgcaaaaaatacaggtaaaggtgatattcatattaataatacggcaggtatcagtacagagggtaatgcatccagtactattcatgttgaacaggcggcttcagcttcaggaaataaaagaataagcagtattgttaatacgggtaatttggtaactaaaggtaattattccaatggtataacattaattgaaaagaatgcagcaaatattaacattaataataaaggtaatactgagataaaaggaaattattctcatggtatttatctgaatactcaaggcggtaatgtcagcgtcagttcatcagagggattattatctacttcaggtaacacttctcacggaatttatatcaataatgaaaaatcattaaaaaatgataaagttattattgccaataaatcagatattattacaaatggttctaaaacaggtacagacagctcatcatcagctattcgcgttgcacagcgtggtgatggtgaaatagttattgagaataacggaaatattttaacaaaaggtattgatgcaaaaaatatcacggtaaatgctgctgataatgcgaaggttactgtttataactcaggaaagctgacaacaaacaacagtactgctgctgctgtttatagtaaaggagatatcttttttactaacaataatgatatagcaacagcaaatattgccggtaagacagataaagaagaagtatcagcacacggtattgaagctgtttccggtgacggaaatgtgaatatttcccatcagaatagcaatatcattgttgaaaataatacaaattcccgtgtcacaaatggtattacagcaacagcagcaaaaaatgtgactgtcagtatcggagaaactgcggttgttgatgcagcaaaaggagattcgggtatctctctgaatacatcacagaatggagctgtaaacattggccgggatgcagctgttcagggaggacgtaattccggggttcattttgacatcaataacggtgcaaccggaatatattcaatcaataacgcagggctgattggatcagaaaatgatcatgccgcaaatgtttcaggctcttcagagaacagtattgttaatctgaataacagcggtgttatacgcggttatgtgagtagtgataataaaacagctcttaacatggaaaatagcggcgaatttctggtccgtaaccagagtgatgatacaaagaaaatttcagtttcatcatttaataacggaatagttaataatacaggggtagttaaattatctgatgttaaaaaagataatattgatactaccggggaatatattcctgtcagcgcactcagtacatcagaaaaccatattgttcagggacaattccttggtgtgaaagagttcagtcacagtggtattttagatctgaccggtgcgggactgtcaggaaattcgtttattatcagcggtggtcaggttgcaggtgaaaatggtaacggaacttttattaccaacggaggaacgctgaaaatagcaacaaccctgaatgagggaagcgagaaaagccggagtgatatattagttgtcgataatctgaaaaaagggagtgcatcaacaaagctcgatatcgttattgctgaaggcagtcaggatgtggcaactaaaaatgaaggaattcaggttgttaaaacattaggtgagcaggatgcgggagcctttgagctgggttcgccggttacatacggccgttatgaatatttactttacggtgataatgcaacaggtacagaagatgggtattatctgcgtaacagattaaaaaagaaagagataatccctaaccctaatgttggtgcttatcttggtaaccaatatgctgcgatgatgtttaaccagaatattttggatcgcagggataatgtgcagtcacctgatcaaacagtctgggcacgttttaattataacaggatgaaaactgaccaaatcagtaatacacaggaactaaaaattaataccgcattattacagataggtgctgatttttaccggaatgaggaaaaaggacaggttgccggtgcatttataggatatggcgacagtgatattaaaaaccgttcttatatcagcggaacaaaggctgaaggtaatgtcagaggtgttcagctgggcgggtattacagctggatgccggagaaagataacggaccttatacggatgtctggggtcatattgcacactataataacaaactgaaaggtgaagctcagaaaaaccgcgataagaaatacgacagttttggttttgctatttcagcggaaggcggttactcctttattgtgtctgaaaatgataccaataaatggattgtgaaaccgcatgcacaggtaacttataattatattgatgcagatgacttcacagatcataacaatacccgcttcagtgataacagaagcagtggttttgaaacacgtctcggagcacggttttatggtaataaaaagcagacaacaggtgtgctgccatttgccgaagtgaattggctgtataacggagtcagcaaccgggttgatgtcaataaatcacaggtaagcagccgtattggtcagaatgtggctgaactcaaattgggtttgcagggtgatatcacggaatcatcatcggtctttatccatatcggggggcagaaaggaaaccatgattaccagaatatcagcggacaaatcggatataactacaattggtaa

SEQ ID NO: 291700 - DNA, 1131 bp, Morganella morganii
gtgaaaatttttgatttattttgtggaactggcggattttctaaaggctttgaaaactcaaaaaaaagtaccttcgatgtcgtttttggattagacctcttggagacatcaataaatacgttcaaactaaatcatccagatgcaatatccattgctaatgacattagaaaatttcccaaaaaagatataatggaaataacaaaattaaaaagaggggaattagatgttttaattggagggccaccttgtcaaggtttttcttcaattagaccatttaggtcatctaatgatgatgatccaagaaactctttatttgaagaatatgcatcgtatgtaaacttctttagacctaaattttttgttctagagaatgttgtgggccttgcaacacacaaaaatggtgacactttaaatataatgcaggaatgtttctcctcacttggctatgaaagtgattggcgaatattaaatgctgctcattttggaataccacaaaagagagagcgattcattctttttggcgcacccaaagggacaaagtttgatttcccaacaccaacgcatttctataatggatcaactattagttacaaagataaaagtaaagttataacaacaaaaaataaaaaactattacccttagcgctttcaacaatggatgcaattggagacttaccgcctattaattcaggtgaaaatgcagactcatacaccatagatgcatgtaatgcttatcaagtcgagagaagaattgggagttctgagttgacattgcataatgctacaaaacactcagataaaatgatggaaatcattaagcactctggaaaaaatattaattgcattcccaaacatcttataactagtggttttagtagttgctatagcagattagataaagatgaaccagccgttactattacagtcaattttgtccatcccgcatcaaatcgctgtattcaccctatacaaaatcgtgcgttaaccccaagagaaggtgctagactgcaatcatttgatgatagctttaagttttttggtaatcgttctcaaataaccaaacaaattggtaatgcagttcctcctcttttagggaccgccattgcagatacaatttcaaaatatctttaa

SEQ ID NO: 291701 - DNA, 234 bp, Morganella morganii
atggctaatgataagaactttgtcgtaaatttttccttttttatcaataaaataagagttgaaaaaggattgactatcgagcagttggctgatctggcttctgtgcataggactacgattggcttgatcgagagaaatgaaagaagccctactatatcagtagccaagcgaatagcagatgcacttgaagttgagcttagtaagttagtcgagcttgctgaaaaaaaaggataa

SEQ ID NO: 291702 - DNA, 633 bp, Morganella morganii
atgagaagtgcaaagtgtgagcacataagaaatgaaaatattctaaatagggttactggattaactagtgaaatgcttatttcagcaatcaattcatgttatagaactctagataatatagataatcaaatgatttctcaaaatattcctccgatagctaatttagttgaattggctaatttatcttctatggttggaaatattgttggagcgggattggctgaaaactctaatgggttatatataagaaataggccacatgcttatccagatttaataccacaaagagttggaggaacggatcttgagctaaaaatggcgttagagactaacagaccaaaaggtcatttacctaaggctggaaattatataacctttagatatgtcttgggttataaagatggctcttttaataaaggaaaagagtctagaggtgatacggtttggatttgggaagttaaaataggctctctaagcgaggatgacttttcttgtagtaatacagcaggagactctgggaaaacagccgttataaaatctagcgttcataataatatgcctttagtatattttgcaccggaatttttaccgtatagtagcaaagatggatatacatattgtggatttaattaa

SEQ ID NO: 291703 - DNA, 1041 bp, Morganella morganii
atgcttcatactaccaatcccgtcatcaaacacaaagccggtttgctcaatctggctgaagaactcagcaatgtgtcaaaagcctgtaaaattatgggggtctcgcgtgatacgttttatcgttatcgcgaactggccgatgaaggcggtgtggacgcgctgataaaccgtagtcgccgcgctcctaatcttaagaatcgcacagatgatgccactgagcaggccgttgttgattatgccattgcttcccctgctcatgatcaacaccggaccagcaacgagctgcgtaaacagggtgttttcatatccggaagtggcgttcgttctgtctggctgcgccactcacttgagaacttcaaaaaacgcctgaaagcactggaagaaaaagtggctcgcgacggcattgaactgactgatactcagattgcagcactggagcgcaaagccagtgatgacgaggcctgtggcgaaattgaaaccgcccatccgggttatctgggctcgcaggacacattctatgtaggcaacctgaaaggtgtcggacgtatttatcagcagacgttcgttgatacgtactcaaaggtggctcactgcaagctctgcgtcacaaaaacaccgattacagcggcagatttactgaatgaccgtgtattgccgttttatgagtctcagggcctgccgatgctgaggatattgactgacagaggcacagagtactgcggcaaagtggagcaacatgattaccagctttatctggcgatcaatgacattgagcatacgaaaacgaaggcgatgtcaccgcagaccaatggtatctgcgagcggttccacaggacgatactgaacgagttttatcaggtgacgttccgcaaaaaactgtatggagatcttgacgcactacaatcagatcttgatgaatggctggctcactataataatgagcgaacccatctgggaaaaatgtgctgtggccggacgccgatggaaacattacttgatggaaaacgtatctgggctgagaaaaatttaagccagatgtaa

SEQ ID NO: 291704 - DNA, 282 bp, Morganella morganii
atgaaatttaagccaagaaatttacgcgcgattgcagaaatgatcattggcgatgctgagcacttcccctatcgttcaagcagctatataacacagttttttgaagaatgtgaccttgattttattcatgatggctcaacaagatggtcatggactgctgaacgaatcgctgaattactcgaagaaccccaactcgcagctaatacgttaccagagagatttgttaatgtattgcgtgtgttaatggataaagccgatgctgaagattatgattggtgctga

SEQ ID NO: 291705 - DNA, 1110 bp, Morganella morganii
atgctcattggttattactcaagtatatcgttagcaaaagcgcgggaaatgactaaggagcttcatgctcgtgttgccttaggctatgacgtggccggtgaaaaacaggaacgcaaagccgaagcgatcaaaaagatagaagaagagaaaaatgcactgcatgtatcagaattggccgcagagtattttgaaaaacaaatactacctaactggaagcatcctgatatcctacgccgccgtatcgaaaaagatatcaatcccaacattggtcatcttaaaattgaagacgtacgcccccgccatattatcgatatgctgcaaaaaattaacgctcgtaacgcccctactgtagctaatgatgttcttcgctggacacggcgtatttttaactacggtatcaaattccagatgattgagacgaatccaacaactgcctttgaaatcgctgatgcaggcggtaaagaaaaatcccgtgagcgctggctaacccaagaagaactgactaagttctttcaggcaatgcagattaccaaaggattttcccgtcaaaatgagctgacaatgaaactattactcgctctttgctgtagaaagatggagctgtgtggtgcccgatgggctgagtttgatttagagaatgctatctggcatctgcctgctgagcgggtaaagaatggcgatgctattgatatccctttaccagcagtaaccgttgaatggcttttagaactgcgccaaatgtctctcaacagccagtgggtcttgcctgcacgtaaaatgcagcacaaaatgatccctcacattcaggaaagcaccctacccgtagcgctggcaaaagtacgcagtaacctccctaatgtgccaaatttcaccatccatgacttccgccgtactggacgctcacatctagctgcattaggcgttgatcctgtcgtcgcagaacgctgtttgaatcaccgaatcaaaggggttgaaggcatctataatcggtatgagtacttcaaagagcgtaaagccgctttggaaaaatgggctgcattgttggtatcgttggagcgaggtgaagattataatgtgcttccgatgaaaaataacagaaaaatcaattag

SEQ ID NO: 291706 - DNA, 222 bp, Morganella morganii
atggagcgctgtagttttgcggaaaacagagatatagcccattaccgtctgaacgtcctgcaaagcgttctccatttcttatccatgtccttatttgtatatctgttaattttcccatatgtcacccattttttgaggggtgtactcaaattagtgtacttaaaaccggctaagtacacttttaagtacaccattaatgtgcgctttagtgatattatatga

SEQ ID NO: 291707 - DNA, 1038 bp, Morganella morganii
atgaagaaaaaaattgccattataattaccaagtcagaaataggtggcgcccaaacgtgggttctggaattattttctattttaaaaccatactttgacatttacctagttacatcagaatcggggtggctaaccactaaattccctgaggataagacatatattattcccggtatatctagtataaaaaaaccattaactgttatgaagatagcagcggttttgaaagataacaatattgatgttgtcatttcaaattccgctaatgctggtttatacgctaggttagctaaaattttaaaatcacacagacatatatatgtatctcatggttggtcatgtatttacaatggcggtcgttctcaaagattattttgctgggtagaaaaaatattatctcgtttatctaacactatattatgcgtatctgagagagataaaaaaaacgctcttgaaattattggtataaaagaagaaaaaatagttatcattaaaaataaaataacaccacttcccaaaaaagaaaaaataaacacccgactaaaggcgctatttgtcggcagaatgacacaccctaaaagagcagatttatttatagaagctgcaaagagactccctgacattgatttttatcttgtaggagatggccctttaattaaagatctcaaatcgcttagtcagggttacgacaaaaatatattttttcttggtgaaataaataattttaattcttactgtgattttgatatttttgttctttgctctgatagtgaaggactgccgatgtctgctattgaagcaggttcagcaggtttgccactagttttaagtgatgtgggcggttgttctgaattaatatattcattaagtaatcaaactaatggcttacttgttgaaaataatacaaacagtattacatcagcattaacgcaaatatcttctcactactctaattattatgatgctgcacaaaactttagatatgaatttgatatcaaaactgtagctgatgattatataaaactaattcaaggatag

SEQ ID NO: 291708 - DNA, 738 bp, Morganella morganii
atgtttctctaccgagctactgattggctagccacaatatcaacaaatgtaagtcaagaagcagttcatgcctttatagaaaaaaaagccacaaaaccaggtagaatgatcccattctataatgggattgatacagcacttttctcatacaacgaagtagcaagaaaaattaaacgtgaagaaattggtgttactgaccatgtgccactgatacttgctgtcggcagactaacaaaagctaaagattatcctaatttattacatgctatttctaaattaaatatattagttcagcctaaattagtgataattggtgatggtgaagaaaaacaaaatttatattatctggccaaaaaacttggtatagataagaatattatttggcttggaattcgccatgatgttcaggattggatgtcagcttgtgatctttttgtccttccatccgcttgggaaggctttgggttagttgtagcagaagctatggcatgtgaacgccttgttattggtacagactctggtggtgttagtgaagtaattaatgattttggtcttatagtcccacctaaaaatactcctgctttaacatctgcaattgaaaaatatttatcactttctgttaatgaacgctatactattggaaaatacgccagaaaacatattattgatagcttttcattagaaaaaatcagtcaggattggctaaaattatatactgaccttttagaagaaaaatga

SEQ ID NO: 291709 - DNA, 717 bp, Morganella morganii
atgcagatgatttcttatcacattttagattatagtcttgatttttcattattaaccggaggaataaattccagaagttattttggtacatatcgaccatctggttttttacctgaacctgcagtttatagtggtcatatgattgcactattagcattatactttacatataataagaaaatagatattcctgttgtcataggaataatatctatattactatctcaatcaacagttggcatcatacttacgttattaatgacaacctgtatattatcgcaatattttctctctaaaaaaaattcaatattaatacttaaccctaaacttttagatagatattattcattattatcaggcactgacacaagtaataatttaaagctcactggtttgcaacatttttactataccgacacatttttcactgggtttggtgtaatagcaaaagatcatagttctcttcctgcttactatgaagccataaaagactatactctatttgggaatatacttacaatatatggtgtattaattggaaccattattttaatattacttttctacttaataatccgttcaaaaatatcattcttaaataagataattctttcaataccatttataaaactatgtagcccaagttattctttcttctttatatactttggaatatacataatacttctctcttcaaaaaagaataaaaacatttaa

SEQ ID NO: 291710 - DNA, 4659 bp, Morganella morganii
gtgcaggaaatgaaagtgtttgcatgtttttcagataactgtacatcttcttcagttcaaattcaggaggaatacggaaacctggagttacctaatgttaatgaccgggaaaaatatggtgattatgtacaggttcttgaatatgaaaataatggaagatctgaagttttaatttttgccgggcagaatgacgacgatataaaaatttataaatatgatattgataccggagaagataaagagcagatagttacagcggaagaatatgatgcagctctggacaggataagcagttcacttccccgttcaaaggatatgctttatgccaatagcccggcaaacggaaataccatcggtgtcatcactgcacaggccagagctgctgccgtttctgcacagcaggctaaccctgcggtgatcgctgagacggccgctgagcaatacagacttaccgatcccacaataactttattgtccgcagaagatgcggaaagagtacgtctgtgggcggaagagagaaaagaggaattaacggcctgggcaactcaaaccggtaatgaaatttcggctgcactggattcgccttttgaaggaatcagcggagctataaaagatacctggaatattgtgcctgatgtgctcgatttagcatatgccggggcacagattattgaaataaccgcaagtactctgggggcgaaaattgcggggctgttcagtgataaatgggctaaaaaagcggaagagcatgcagatagtgttaaaagtcagctgggttattcggcgtttaattttgccagatttgaaaatctgtctgaagccgaaaaaggcggggcatttctggcgatgataaatccgctggggttggtaaaagcaacaggccggaagctggaaaaagaaattgcagaggaagcggctgaaattatcagcaaaaaaccgtccgccggaggggtggtcaaaccccgtgaagttccgccggataaaacaccggataccgcggcagcaaaagtcagtgaagatacgaaaaaaacacagtctggcagtgacggtaaaggaacggataataataaccgtaatgtcggcggtgacccggtggatttggtcagcggggattttattcagtcatggccggttatctgtattcccggtctgttgccggttgaactgacccggacatattattccgtccagtcagcccggggacttttcggtgaaaaatgggcagatgactggtcaatgtatcttgagatacatgatgacactgctgattttcaggatcccggcggaaaccggtatacctttgaaatatccggcgatgaagtccggtcacgaaatttacgtgctccgtactatctgttgtcaggcaaccggaaaacggggttacagatacaggataaccgccgtcagcgggtatatcactttgaaccggcaccggtattgcaccaccgtctgatcaaaattaccaatttgcagggtgttgccttacattttcattacaacgaagaccggcagctcagccacctctcccgcgatgacggattcataatccggctgcattatcagcaacatcagctgacgcatattgattatagctgtgacaaccggacacagcggcttgtttcatgccggtacgataattccggctatctgagtgagtgtgatgcttttcagcaaaaccacctttggcacagttatacgccagaagggtggatgaccggatggcaggattctgaccagacctcgctgacggttacttatgatgaccgggggcgtgtgatacaaacgcattctgacagcggatactggtgcgaccgttttgtttatgacgatacattacggctcaatacctatatcgacggtgaaggcgggcacttccgttactattacaatgaagataacctggtggtacgtacactggatccgtcaggccgggaaacccgtacagaatggcgtgattttcagaaaatcagtgaaaccaatgatattggtgaaatcacgcggtatgtttatcatgccgacggattaccggcacaaatttatctgccggataaccgcaagattggctgcgaatacaatgataacggacagctcacccgctatatcgcaccaacaggagatgagtggcggctgagttatgatactgccggtaacctgatatcagagactgatccgcagggccgcgtccagacgtacgaatacagtgtacatggtgaattactgaaagccgtttcacctgacggggcgcagtggcggtatgaatatacgtctgcgcatcagttgagcagaagtatcaatccgtatcttaacagcacggagtatcagtttgatgaactgggacgccttacccatctcacggatgcactgaataataccacccgttataactatgatccgtctcatgcgggggttaacggcagtatcagtgatattttcctgcctgacggcgtacatcagcatattgattatgacagtgaacgccgggtggtggcggtcactgacggtgagggcaaaataacccgttaccgttacggtccgtttgacctgctgctggcgatggtccgtcctgacggtacagaaatccgctttgaatatgacagcctgacgcggctgaaaaaagtgattaatgcggcaggggatgagtactgctatgagcgggacaatgccgggcagattatccgcgagaccgattttaccggacgggagattcagtaccgttatgaccggctcggtcgccgcacagccacccgttacccggatcagcatgaaatccgctggtcgtactctccggaagggttgattatccggcaggatatctggtttgatgacggcacacgcagtgaactgaaatccgccacgcggtacgagtataatgaccggatgcagcttatccgtgccgaaaatccggatgcggtcaccgaatttgaatacgacgatgcagggcggcttatctgtgaaaaaatcaatggccgtgagattgagcatgagtgggatgaccggacagaccggctcacacagacccggttcgggtcgcaggcattacagtatcagtacggattacagggtgaactgacacagtttcaggtcggaaaacaccagccgctgcaactgaaccgaaatgcgctcgggcaggaatacctgcgtcacagtcagtccggttttgcctcgtcacgccactacacggcgaccggtatgctggcgcatcagaccgccgggcgcggctcggacagctatcttcaggcgttgcgggataacccggtacagccgcctgccgccagtgatgtcaaccggagctggcagtatgacaaagcctataacatcacggcgattgatgaccaccgctggcgccgtatacagtaccgctataatcagaatgaccagatagagaatacgtccttcggcggtttatatcctcagacagagcagttcagttacgacaccaacctgaatatccggcagcagacgctgataccgggtgaggcgcagggtgctctgcatcagttatcgcagcaacagcaggcgggacgggtggtccggcgcaccacggcaaccggtcattttgattatcactacgatatcaacgggcgtctggaacggaaaaccgagcaccggaacggcttccggccgcgcgagtggcgttaccagtgggacaccttaaatcagctcacatcctgcttcatgccgcagggcgactgctggcgttacacctatgatgctttcggacgccgcctgagcaaatatcaggtggttgatactcaggaacaaatccaccaacggcacctgaatctgccgccgaaaacccgtggccggcagtacctctggtccggcaatcagatgattgaggaagtaccggtctatgcggacggcacggtggcgtatgacgccgggattcagtggctgtatgagccgggcgcactgactccggcggcgcggtatgaaaaagggaaactgcattacctcgtcactgaccatcagggcacaccgcgtgaaatcttcacggaaaccgggacggtcagttgggcagcacggccggacacgtggggacagatggcgttctggagcctgaaaaccagtgccaatgacccgaattacaccgaatgccacttccgcttcgcgggacaatatgaagatgctgaaacaggcttgtactataaccggttccgctattatgataaggacacgggacagtacatcagccccgacccgatagggctggagggtggctttaacccgtacgggtatgtgcattgtcctgtgggttgggtggatccgtttgggttgagtggtacgtctaagctaaattcatttcaacacgctaatttttctgatcctaaaaagctaactcagcattttgagaaacatggtcatgaatttagagctgcttcagaagccgagtatttgcaaataggccgagatgttatggagaaaggacataaaatagagtactactataaaccattagatcagtaccgtaccggatatgtaatgtatatgaggaatacgaaacgaggcgatgtgcaaatggcatttgttggagtcaatcctcaaggtcagattgccactatacacacaaaaagtggcaaagatgtttggaaactacttaatggaaataaagatgaaaaagttatcaatcttgttcccagagatgctaatgggttataa

SEQ ID NO: 291711 - DNA, 369 bp, Morganella morganii
atgaaatattacgcaaaaataatctcacttaatccaaatgttgaagaggaagtgacaattgctcttggtgaaattgaactcacatgctttatcaatgaattagatagttcaataaaattgggtgaagtttatttagttgaactcgaacttgaatttttagatgaaatacacgctgaattagctattgatacattaccaaagcaaatcgggaaatcatttgcatatgaattaagtggctatctgctagaaaataaaatcattacatccaatgtaatatttcaaaatgatttactatatgaaatatcattttatgaaaataaatatgtaaaaatttatgtggatagaattaatgtctcattttttatgtaa

SEQ ID NO: 291712 - DNA, 327 bp, Morganella morganii
atggagttaatttctataaaagaagtattgtctaaccctgaaaataatccagatggaggtttttatttacctccaaatattgatgaatggagcttagataccctcggcattttttctgaggattcgtattattatcctcctgattctacggaatatatcccaaaacaagcaacagaagatggttggattgaagcactcgataatggttcaatcgaagaagttgtagaaaatacaaaattacaactttcacattatacaattcatcatttatttgaagcgtttgttttttatgtaaaaaatgatgcttttattgatttttcaaactga

SEQ ID NO: 291713 - DNA, 366 bp, Morganella morganii
gtgatccggatttccccggcggtcccagtggaaatagactttcactgccccctgctcgttggtgtaaatctcttccccttccgggccgaccacagttgccagctcatccccgtctgcctgcggacggaagcggtacggcggccgccattcgcgggttcccgggataaactgcacggtgttactgaatgtggttccctctccgccgccgttatccgccagtggctgaatgccgtgatggttgaccgtaatcacctgccacgctttattcatgctgtcagacggatggtttttcagggagaagattttgcccggcatcagcgcaaagcagttggtgcccaccgtgccagtctggcgctggttttgtga

SEQ ID NO: 291714 - DNA, 375 bp, Morganella morganii
atggttgtcgctgtaaaacagtttcgggccttcttcgaaccagaagttaattccttcctcaaaggccaggcgacaccagaaatcataggccgattcgcgcttctgagtgatgtaatcccgtttctgatgcagttcgtcctgataaaatttcagctcatttttgacatgcgcttcatccagaagagtggcgagaacttccggcacggattgcttctgaaaaatacgactgtcctggttgagggtcataatccacatttcagggcggatcagaaagtgataccaggttttgttgccgtcggtattgccctgttcagcagaggccagcagcccctgcacggtacggactttaacgccgtcacgggttacggtcagtga

SEQ ID NO: 291715 - DNA, 213 bp, Morganella morganii
atgcaaaccgaaccaatcatcaccactaacaacatgtcagtagacgatgttgccgcgtggatcaccgaaaaagcccaggcttttcacaaactgcaatcactccgtacagaacgcgaaagagcaatccgcgatcacgaacgtgctctggaccgctttgacgaagacattgccaagtgggaagaccgctgcatcttaatagtacaaccgcagtaa

SEQ ID NO: 291716 - DNA, 477 bp, Morganella morganii
atgattgagaaaaatgaagatatcttattgatatctaatgcatttaaaaaggcaagagaaagaattgtatctttcagtgaaatagaagatacaataaaaagcatcatgaatattattacaaaggagaccggtggaaaattagtaccgaagatatcaaataaacttctaaagtggggtctttttgatgaaaaagataacggtaaggatgcatatgatatatttttcgctaaaaaaaactcatcatcaaataaaacaattaaagtttgccgtatatatgttgataaattaactggatatccattgtcattagaattgcctattaatgatacgagtggaaaagataaaacatcagaggttgttatttgtagaaatcataatgaacttagaattacattggttaggttgttatcagaggaagagttagtttttaactttattagactatctatagatgatgatgatgagataccattttaa

SEQ ID NO: 291717 - DNA, 282 bp, Morganella morganii
atgtcggaattaaatagcagtgaagcgttgattatcagcgatgagaccaggaaaggcatttttacgctggataatcagaaaatcaattgtattggtgataaagcagaaattatccatacaggtaataacgtaaaaatatatgataatgaaggctatacgtcttacccgggtaaaagtcgtgtcaagaacataggtaaagactcactttttgttgcgacaggtgagaacagttctattgaagccacttccgggacggtatctggttctttttatccgtcctga

SEQ ID NO: 291718 - DNA, 318 bp, Morganella morganii
gtggaaaaagaaaaagaaagcaatatcgatgatataataatatttaagtatatattttttgcactgactgttaaagccaatatggcaaaggacattgataaaatcataaatgccccgtcatatctaaacgaaaagtttgacacaagcattgggcatgataatagagatgccattaacaaagatgatgttaaattattatctatactaaataaatctgtcagtcgtttaaatgcaaaacagaaaaatataccagataaaattaatggtatagggtataggtctggtatgttatttgcacctagagacattattttatag

SEQ ID NO: 291719 - DNA, 549 bp, Morganella morganii
atgagtttaacaaacaacaaatttatgatgacactggctactgcgttggcaaaatcaccgaaaggcacttaccaggaaatcgcagataatgcaggtatcagccgtgcgacgttatatcgcctctgcggtaaccggaaagcactgatttgccgtcttcttgagtatgcaactgtcatgctgacagataatattcgggcagtacggcttgaggaaggtcaccctgttgaggctctggaacgcttattaaaaagcgagttagaatatcgtccgctacatttatgccttacagaattctggtcgagtgagcctgagctgacttcagaattaacacctgtttatcagatatatgagaaaacattagatgatttttttctcagggggcaacgggaaggcgtgttccgtatagatatcccggcagcagtacttaatgaaactttaaccgggttgattattagtctgatagatgctgagcgtagagggcgaatagccagtgccagtctgcctgaaacagttatgcagttatttctcgaaggagcattactccggtga

SEQ ID NO: 291720 - DNA, 1185 bp, Morganella morganii
atgagacaaaaaagtatcatttgcgtatacataatactatttaccaaagaattatatcatatgacatatcccttaacgtgcaaatccctgattgttgctgcagtaattgccctgacagcatgtggcgctgaagataaaagcacctctgttaccggcctgccgtcagtaacagttatcaggacaaaggaaagtgtgctggaggtaaatcaggagcttcccggccgggtgcatgcagtacgtactgccgaagtacgggcacgggtggccggcattgttttaaaacgcgaattcactgagggggcagaggttaaggaaggcgatatattatttcagattgatccggctccttttgaaacagatctgacccgggccgtggctgaagcaaaacgggctgaggccgttgcagctgatgcaaaatcaaaactgacacgctctgttcccctggcaaaaattaatgctataagccagcaggatttagtgactgcccagacaacttataaagcagcacttgcaaatgcggaagtagccagagcaaatgtcagagccagtcgtcttaatctggaatatgccacagtgcgtgcccctgtttcaggccgtattggccgctcgtcagtcacagaaggtgcccttgtcggacaggggggatcggctacacctatggccacaatacaacagattgaccgtgtatttgttgatctgacacaatcagcggcggatgcaattgcactgcaggagtctgtaaaagcagattcagtcaaatcccgtagtaaccgcattgtcgctcatattgagggaactcagaaatcagttacgggaaaactgctctttaccgatatttcggtagatcctaccagcgggcagcttgtcctccgcggtgaatttcccaacccggattatctgttactacccggtatgtatgtccgggtgagtgtatcaaaaggtatcgtccctgatgctattctggttccgcagcgtgctgtttattttgataccgacggggctgctggtttgtgggtagtcagcaaagacggaacagcggaacggcgcactgtacgcaccggcggaatgtatagtgccgactggcatatcactgaaggaataactgcgggtgagctggtcatcgtcggaggtactgaagtgaccgccggccagaaagtcagtatcacggaatcatcaggtaactaa

SEQ ID NO: 291721 - DNA, 3177 bp, Morganella morganii
atgtcagattttttcatcagacgaccaagatttgcctgggttgttgccatttttatcacacttgcggggctgctggctattcccaacttaccggttgcacagtttcctgatgtggctcctccgcaaatcacagtaattgcttcgtatccgggagcttctgcctcaacggtatctgaaagtgtcaccagtgtgatcgagcaggaacttaacggcgcgaagaatctgctgtatttcgattcatcaagttccgccggcagcgctgaaattaccctgacattcgcaaacggtacaaatcccgatattgctcagattgatgtacagaaccgcctgaaaaatgctgaaacaagaatgccggagtcagtacgtcagtcaggacttaatgttgaacaggccaatgccggatttttgcttatttatgcgctcaaattcagggaacatcaggcagatcaaaacgaaactgaactttcagaatttgcagcccgttttgttaataacgaaatccgtcgtgttcccggggtcggtaaaattcagttttttggctcagaagcagccatgcggatttgggttgacacacaaaaactacgcgggtacggactgtctgttgaggatgttaactccgccattaagtcccagaacattcaggtctctgccggcagttttggcgcaagaccaagtgaaactgagcaggaactgaccgctacaatactggtgcaggggatgaaacggacacctgaagagtttgccgagataatactccgagcgaatactgacggctcttcggtacggctggcagatgtggcccgtatcgaaaccgggctgcaggaattttcatttcagtcccgccttaacggtatgcctgctgcagccgcagcggtacaactggcgccgggagctaacgcgattgagactgccagagctgtaaaagaaaaattagaggagttaaaaccttatttccccaaaaatataacttatgacattccctatgatacttcgcggtttgttgatgtggcaatatcaaaagtgttaaccacgctggcggaagcggttgtactggtatttctggtaatattacttttcctgcaaaatctgcgttatacactaattccgaccattgttgtacctatctgcctgatgggaaccctcgccgtcatgtacgttgccggattttccgtcaatatgatgacgatgttcggcatggtactggcaataggtatcctcgtggatgatgccatcgttgtcgtggagaatgtggaacggcttatgactgaggaggggttatctcctcgggaggccactataaaggctatgaagcaggtctcaggagccattatcggaataaccctggtgctctcggctgtgtttctgcctctgggttttatgtccggatctgtcggcgttatttatcgtcagttctctctgtcactggccgtgtccatactcttttcaggattccttgcgttaacgctgaccccggtgctttgttcaacattgctgaagccggttaaaatagggcaccacaggaaaaaaggtttcttcggctggttcaacttcaaattttcggtattgacccgacgttttgatattctgaatcaccgtttggtcagacgcaccggccgctatatgctggtgtatctgatgatgactatcattctggggctgctgtatatccggttacctgagacttttgtaccggttgaagatcagggggctaatattgtcagcgtacagcttccgcccggtgcaacttatgcacgcacagagcgggtggtccgggatctggaaaaatacctggcttcccgtgatgctgttcagagtgattttaccgtcatcggtttcagtttctccggaacaggtgaaaatacggcaatgtcatttccgacattcagagactggtcacaacgcagtgcggaacaatcagctgatgctgaaacagcggcattaaataacgccctgggaacccatccggcagcacagattatggctgttaaccctgcaccaattgaagggttgggtagttccggcggattttcattacgtatacaggatcgagccgggctgggaacagaagcattggcaaaagcaaaagatgttcttcttgaaaaagcgacaaaacatcccgcaatagcccatgcaatagtagacggtatgccggccgcgccacaactgcgtctgcagatagatcacgccaaagccgaagctttagggatcaggtttgactctgtatcaaatgcactggggactgcgttcggctcaaatattgcaggtgattatgtctataaagggaagctgcagcgggtggttatccaggctgaatccaaaaacagagtcagtccttctgatgtactggctttaacggtttcaaaccgctccggtgaacccgtccccttgagtgcatttgcttcagcagaatggacgaccggcccggcacagctgacacgctataatggctatccggctatccgtatttccggtgatgccggtcccggttatagcagtggtcaggctatggccgccatggagcagctggcgagtgagctgccttcaggtatcggatatgaatggacagaactctcttatcaggaacgtcaggccggcaatcaggctcctgttctgtttactttggctattctgacagtatttttactgctcgttgcattgtatgaaagctggactatcccggtatcagtcatgctcattgttcctataggcgcactgggagctgtgctggccgtgataataaccaatttaatttccggctcatcggttctggctaatgatgtctatttcaaggttggcctcatcaccgtcatcggtctggcggcaaagaatgctattttaattgtggaattcgcaaaaagcctgctggaatcaggtaaatcgctgcgtgaatcagcaacagaagcagcgcggttacgcttccgcccaataatcatgacatcaatggcattcattctcggggtcgtgcctctggttattgcatccggtgccggtgcagccagccagcgttcactggggaccggcgtcattggcggaatgctctttgcgacggtaataggggttgtatttgttcctgtctttttcgtagcagtaatgtcattttttgcaaagaaaaaaacagaaaaacctctgctgaataataacaaggaggggcctgaactttccggtttaggtgtgtag

SEQ ID NO: 291722 - DNA, 678 bp, Morganella morganii
atgactgaaactcagcaactgagtatggcaaaatatcggttacagtcattttgtagtgtgcgcgattccctgaccggcatacagcatcagcagggaaaagactcatcagtaaagttgctgtcgaataaagcgggagtgtatttaatgaacaggaaaataacattatcaaaagtatccgaatcggatatccctgtcttcattgcggatattcagaaagcttttcagattgcatatgaacaggaatgcggaaaatccgctgagccggtaatttccgaacaggacataatgtcatcattttctaatgttgattctgttccctgttttgcatacataaataacaatattgcaggaggctgtgttgttgttattaaccctgaaacaaaaacgggaagccttgatttactgtatacgaaagttggtaaccaaaatcttggtattgggacaaaaatatggtcaaaaatagaggaaacatatccggaaatacacacatgggaaacatttaccccctattttgacaaaagaaacatccatttttatgtaaataaacttgggttccatattgttgagttttataatcaatcacatagaatgccgtcagaatacagcagacaaaccagcagtgatatgcccgcaggaatggacgacgtttttttcaggtttgtaaaataccttaagtaa

SEQ ID NO: 291723 - DNA, 354 bp, Morganella morganii
atgacaaaggagaatattcgttcactcaatcgtgaaaatgagagtgctcaaattttatctaaatcaggttttcatgtggaacaaaatccagttatttcaggaaataaagccccggattatcgaattaacgaggagatttttgataactatgcacctaaatcgagtagtgtttggaatatatggactgaagtaaaaggaaaaattgataaaggacaaactaataatgttattattaatatgtctgatactaaagtctctgttcctgaattgcagcagcttacaaaatggccggttatggggctagataaagttattattattgataaatcaggcaatgcaatccgcataaagtga

SEQ ID NO: 291724 - DNA, 1041 bp, Morganella morganii
gtgtccgccggacgggatattaacgtcaccgccgccggccagcttaaagcctgccggcacaccactctggatgcacagcaggatatcatcctgcagagcggtgctgaaacacagaacaccaccggcagcaacaaaagcagcggcggcaatatcggggtcagcatcggcatcggcggcaaagataacggaatacaggtatttgccaatatgaataccgcccacggaaaggagaaaggggacggcacgcagtatgcggaaaccactctggacagcggcggcagtatcatcctgaacagccgccgggacacggccctggacggggctcaggtcagcggggataaggtgaacgtcagtaccggccgtgacctgacactgcggagtcagcaggacagcgacaggtatgacagccggcagaccggtacctccgcagggatttcagtaccggtttacggaaccggcggaggaggaaacctcagtcacagccgtgataaaatgcacagcacctatgactcggtgcaggagcagaccggcactctgggctggacggacactgaaaacaaagcagaatttaagacagagcacagcggtgccggtctcagcaccggtgacagcctgccgggagctctgctgaaaacggcagctggcatcctgttaagccaggacggtaatcagggaagtgtgcagggaaccactaaatccgcggtctctgaggggcagtggattatccgcaacaccgcagaccagaaacaggataccgcaggcctgagccgtgacacggacaacgctaacggcatcatccgtccggtgtttgacaaagagaaagaacagaaacggctgcagcagattcaggttatcggggacctcggcggtcagatgtccgatattatccgcatgcagggggatattgaggggctgagggccgcgaaagatactaatccgggtatcacggatgttgccgccctgcgtgagactgacgcctataaggccgcagcgaaagaatacggcaccggcgtgatatgcagaaagcggcacaggcggtga

SEQ ID NO: 291725 - DNA, 222 bp, Morganella morganii
atgaataccactgataccaccacagccccttctccgcttgacgaaccacttgttgatatgaaattcatcacccaatttaccggatcaacggacaagtggttttacaagctgatacaggagggcaagtttccgaaacctattaaactgggacgcagttcccgctggctgaaaagtgaagtagaagcctggctgcaggcccgtattgctgggtcacggaattaa

SEQ ID NO: 291726 - DNA, 1224 bp, Morganella morganii
atgagtgagctgagttatctgaaaaagctgctgaatggggctgaggttgagtggagaaatttaagtagcttagccgatttaaggcgtggaagagttatgtcgaaaggttatttcgttgataacattggacaataccccgtatatagttctcaaacagcaaataatggaatgataggatccatagatacttttgattttaatggggagtttgttagctggacgacagatggagctaatgcaggtacagtattctatagaactggtaaattctcgataaccaatgtatgtggattgattaaaattaatgatagctccccattggattataaatatcttttttattggttaagcattgaggctaaaggtcacgtctattctggaatgggtaatcctaaattaatgagccatcaggttgagaaaatacctgttccaatcccttgccccagcaacccgaaaaaatccctttcgattcagtcagaaatcgtccggattctggatgcatttactacccttacaactgagcttaccgctgagcttaccgcacgtaagaaacaatacaattactatcgtgaccagttgctgagttttaatgacggcgaggtggagtggaaaaccttgggtgatgtaacaaaaaaatggtactcgggtgggacaccaacagctgggaatccagagtattatgatgatggttatattccatggctaagaacccaggaagttaagttttctgatattaatgaaacagagatcaaaataactcctgcagccctgaaaagctcatcagcaaagtggatccctgaaaactgcgtaattattgcaatctcgggagcaacagcaggcaggtccgctattaacaaggtaccattaacaactaatcagcattgtggttgcctggagatagatagtaaaaaagcattgtatcgatatgtatttcattgggttagttttaattatgaaaatataaaggctcttggacagggagccagaggggacctgaattccagtattataaaaaacttcaggattccgctcccctatgctgacgatcgtgaaaaatctttggccgaacaagccagaattgtcagtattctcgataagtttgatacattaactaactccatcaccgaaggcttaccccgtgaaatcgagctgcgccaaaaacagtacgaatattaccgtgacttactgttcagctttccgaaaccggaatcggtgaacaactga

SEQ ID NO: 291727 - DNA, 729 bp, Morganella morganii
atggcttgttataccttattgggtttcgtggatagacatgcatctaaaatgtatacatttcaagatactataacttataataaagggatttataattcctatgttgaggataataaaaagataccgcgatatttagaagagtacgttccttattttagtaaggaagaaatagatatttttgactatgttaaggcctactgttcaggaaggcttagtaataatagcaatgctgatctattattgatgattggctggcttattttattcccgggagcattatggttgtttggttatctggcattttttacgccaccggtttatttaacagcagacagaaaacggggtctcctgtatagccatggcaggggaaaagtgcatgtcacccgttatgaagaggcacaaatcgggttagccggtaaaatgccggctatcaagctgtatgggattgatgaaaaatccggtgaactgaaaacgattatattccggcctaatgtttcccactattctgcgtttctgaccagtactgacagcgaaaatcaccgctttattacgttcctgaatgcctatatgcaacaaggccgggatgcggtctcccccgtggattatcaggcgcgaaaacctttcctgtcgtttggtaaaaacccgctccccgaagactttgaacagcaggttgcacagattctggcagaatttgataaaaggaagcagcgtgatgcgcagtcagattaa

SEQ ID NO: 291728 - DNA, 1878 bp, Morganella morganii
atgcaacctgatgaatttaaatccgtgcagtataatgacccatactgtgcagactgttctaaatttatatattggatagaatgtattcttgttgatgagctaaataaacccttgattaatatgccttataaattaaaggtgctaggtagtactacccgtgaaggaataaccgatggtaaaggatattttcgggaggaaaatttaccacgaacacttgctatactgacgttgccagctcaaaaattaatagatgaaatggagaagcggcacttgagaactttgcggggagagattaattcaatagtaaaaacccatgcgaaatcgaaaggatattcattccattatgctgtaattggtgagttgtgcgataaaaatcctgaaattaaagggtgggatcaatctaaactaggtttaccacactatcacttccctagaagttcctatttcaatgggtttttatttttaggaacagtttttaataattgtcatattattgaaatttgtcccttcaggtcatggaagttattgctacaccatacaactaattattcaatagttaatgcaatgaatcttggggttcttgcagatctttcttacgaacaaaaatactctatcgaaaattttttttataaggaatgctttgatcttagaaaaacaccaataataaatgatcttggttccaatacagtagtggtagatgttccatttagtgatagatataaaacagtaaaatttttagatacagaaactgtagaggagggtagtactcaattattttatattgaaagtaatgatgaggtaatagtttcatttagaggaactcaggaagttgatgattttataacggatgctaaatttagaccagttcctgaaatgggagtgataaaatcagggtctatccattatggttttaatcgtgcttacgatatagctagatattactttaaaaaagaattcaatgaaattgagtcggcggttgctaatgaaaataaaaaattatatgtttctgggcatagcttaggtggggctatttcgttaatatattcaatatatatggaaaaataccatccaatattatatacatatggaatgcctagattattaacaagggatgcaattaaatctttgggtgagataacgcattatcggcatgtcaatgatagtgatgtagttacatctcttccaccagaagcagatttagataatgaacgttatgataaagtaggcgtttttgctggtttaattgactctgtcgggcaattagttaatgaaaaaatttttggtgaaggattaggagatccttatttgcatcatggttctatagtaatatttcttgactgtgatttaacctatactgattatacatacactacgtatgcattgagtgagcttccaatgaagccgggtaataatattagggcgatcagacgtagtaagagcgctcagttatttattgcgacatcgctaaataatcaatgttttgttgatgcagtaaataaccaaattgattttattaaatgcttaagtgaagcggaaatggatgagctttttcctaaaggtacgaaccctcgcttgaaaagtttaccgagtgctgcaaaacattcaatgagtcaaagatatattaagatattaaacaatcaattggttgaattagttgatccaaacagagatttagaatataagagcaggcggattgattttgaagattttattttaaagtcaaatgattcaccgtatgtcaataagagtgagatattgagaaatttagatttattatctttgcataaactgatgccattaagtatctacttgacagatactgatgaggtaggtaaaaaatctctgattagatttaaacaagtgtcaaaagaaatgtag

SEQ ID NO: 291729 - DNA, 801 bp, Morganella morganii
atgacgacgacctggcgtacgtggatagccaatgtcagacaaggtgacgtctattttttacttaacaggctggcgcactctgacccgaccaatcttttttatcatcataactggattgatgaggctgttccgctgtatgcgggaacgccgttatcgcatctgggcacggcagggccctggcttatcagggcaaaatggcaggcgttctccggtatggctgaaatcctcgataccgtaccgttttcagatgacagctggggatgggcttatcacagtgaggatagctgggaaaaccagacagcacactggcagaaatatcaactgatagagtttgaaggggaagaacgggttttgcgtctgtttgatcccagagtagcagctgtactgattccggcctgtaaaccggcggactggtcatctctgctgaggccgctggctgattgctgtattccgtcactaggtgggaataccatcttgaatcgtcctttggataccagtgggacagcgccttacaggctttttgtgccaggagcccatttgattggcgcatggaataattctgagcaatcacatcgtaatatggtagataatttttatatacagttttgggaagaatacccagaactggcctttaaacttgacgaaccacatggttgtttacatacactgattaacgattacatgaatgtctgcaaggacgacctgataaatgtagcctggatagataatgactattttattaggtatctgacaaaacatcaccttattaacgaacagacaggaataaccgatgcaacctga

SEQ ID NO: 291730 - DNA, 483 bp, Morganella morganii
atgggattgtctgtgttttttattttttttccattaacaatctcatttatatcaaaaaataatttattgattaacctgtgttcattagcaacatttctcccgttaatgttagttaaccaagtagcaataaactcaataaagaatgaaataaaattttcaaatcaagtgtcagaatatatatataatgatataaatgcacttggtctgacatcaaaagaaaattattatatatcaggaacattaaagacaacacccagcactaaaaataacataaatgcctttccaatcattagccatttaatccctgagcattttgtaaatctctatgatggaggtcgattcaccttaatgaaaaatggtttctcaaacatcatttataataaaacaaaaccaaaggttataaatacacacaacccattaagagataataatatatattcattatattatataaataatacggtatacataatatttaaatga

SEQ ID NO: 291731 - DNA, 687 bp, Morganella morganii
atggaaaacattattggtattgactccacctatttgagtgatgagtcgttatttctatttgttgacaggcttagaactgaagttaaacaccttaaaagcaatcgtattacatgttataagaatttagaagagctggatttaaacaaagagtacactattatggagatatttgatgcattaccgaatgattgttatgcacaacttgaattaacccgtgaaaatattaatttatctacaaaattcttcaaaaagaatgagagctttgtgcctgcattgcttagtgtaattaaatcaaatttgagagcgtgctttaccctgattacagaaaaaggaacactgcaaaggtatatatacagtagtgctaagaatgactcgggatgggttggtataaatagcccatttgccatatacgtggatgtgggcgacgctgggtcaataaatgatttcaaccatgctggtaggtactacttatcacgaacaataagttcaaatatgaatgattttccgactaaatgggattgctttttagatatagtcagatatcgagattcgcattttaaatacattgttaccaatattactgctgaatatgaagaatgggtgaaagtgatttcaccgacagcgagttcaaactggataaaaattcggttagttggctttaaatataatatttttagtattgattag

SEQ ID NO: 291732 - DNA, 1239 bp, Morganella morganii
atggctactatccctactcaaaatgcagtaccgagtgaagcaccgcgcgacctgaaatttaactcaggcaaaattgatgagttcgtgacgtcactggaacacgaatacaaagaccgttttggtcgctgccatatgactatcgagggcatgcgctggatattcgatcagcttatggagcgcttcaaagtcgatattaaccaggccattattgctgccggttacatcccgattgatagcttccagcaaggctcagaaatcactaaacgcaatgaaattctgcgtgatgaaaccactggtgaatactaccgctgggatggggatttgcctaaatctgttctggcgggctctacacctgaatctgctggcggtgtcggtatgggggcgtgggttagtgtgggtgatgcgtcattaagaggcgagctatcacaaactgagggttacaaattaatcggcggtttgtgcaaattgataaacccacatgatttaaccatagaaaatataaacaaaacaccacttgatagcgccatagaattaaaaaataaacctaagaatgtattaagatttgctacaaataacttgtggacagaatattctacgaatacatggttcggtggagatcgggtatcccctgaaaaaactatgcaactgaaaaaactatggttgaaagtcagtgcagatgtatgggggtttcaggaggtattcaccagtcccaccaaggacatttctatgtttttaattcctccgtatgacagtgcattttttacgacggcgagaccaacaacaaaggggtttcaatatggcacagcatgcatgacaaggctccctgttttaaaacatgaaaaaggtaaatttgactccgaaccaacacctttagaccatgagtacagagtttatgatttgctgtttttagaaaatggtgtgctattcgttaatactcatctgagcacagatcctgccagggcaacaaaaatgctgtctgatttggcaataaaagtatcagggttaggaattgaaaaagttgtgatagtgggagatatgaacacaagagacttaaatgactttaaaccgcttgaagatatcggattcactttagttaataaaggagcatgggatggtatagataagatactaataagggggggtaagttggttaatgcagggatggtgaaaattttaggagggtctccctggagtcagttgtccgatcatgacttatatttcgttgatgtagaggtgtaa

SEQ ID NO: 291733 - DNA, 594 bp, Morganella morganii
ttgaaagaactgtacctcgcactcaccggcggcacactgaccgggccgttgtttatcaagcaggatggcccggcatttgtcattcgcccgacgaccgaaaacggctcctgttatatacaggcgcgcaaccatgataatcaggcggtctggtatattggcaggccgacagacggcggttccacagtttatttccgtaattatatgacagaaagcgaagtcgctttacactcagacggagtgttaatcaaagggcgacttaccttgtctgattattcagcgttcgatgccagatacagcaaaatccggacagtgcttaaaagcgataacgggtacgagaaagacgaaaataccggacttatccgtcagtggggcaaaactcctgcatttggtgccggtaatggctctccggttaaatttccgattccgttcccgtctaaatgcgttggggtaaacgctctgcctatacgcaacactgcgtcgtcagcaggcagcgcagaaacaatttattgcggtgagcccgggctgtccggtgttcagttatatctcggtggcacaattaattacccggtatattgggaagcatggggttactaa

SEQ ID NO: 291734 - DNA, 633 bp, Morganella morganii
gtgactcaggcgatcggcgcatcaaaaacggatgtaatgagtcaggatagtgtgacgaaagcacttagcggaaaagcaagcggggataatttcgttgttcacagtacgttttccgccatgcattcaccaaataaaaaattccgcgcatgtatgcttgatgatggttcattttctgtcattaatgcggaagccgaaggctctccatcgacgttttcatttactgtgaatggtgaaatgctcacaggaacggttccggtttcacgacttaccggactgtcatcatcaatgggctcatccacagcggcggtaatgaaccagaaaggggtcactgatgcagtaaatagcactctgggatacaagcaaacaccccgggatatgacatcaagccgcaagtcggatgtcaggtacgttaatgaaacaggtagccctatttatgtatctgcgacatataacgcaggggatgaagctgttcgggtcacaatccttgtgaatggagagcgtatggatgagacatcccagagaggggcaggatttggcttgactgtaggggcaattgttccacctggtgggtcttacctggtatcagtgttaggcgcttctgcaacacttattagatttatggagttaagataa

SEQ ID NO: 291735 - DNA, 387 bp, Morganella morganii
atgcacggtgaggtgcaacctgaccgttacacttattatctgaccccggaatacgggcagcaactgaaaatgcagaacgacagcaaaggccgaaacgccgggtggaagccacttcccgccggagagctggaaagtgagaccagagcagatttgtccaaaggctatccggctccggtggccatgacctgtatcagcagtatttactataacaccggtgcccgggccaactggctgaaggtgggctgtatcgacaataacggtctggagtataagacagaccagaaatggccgccgaaatccgtcgcggagcgggtctgtaaagccggagagggagactgtgcgtccttcctgcagatggataccgacagctggtccggtccgcagtaa

SEQ ID NO: 291736 - DNA, 213 bp, Morganella morganii
atgtctgtctttaaattaatggccaccacactcggtgtcgcaacggtggcgttagccacgtactgtgcctggcaggcggctgctgaggcggcagacaatgaggatgccacttcagcggaaaaactggcggcagggctcagtgccgcgctggcctgctcagccgtgctgggcggaacccttgaccgtctgctgggcctgctctttccccgctga

SEQ ID NO: 291737 - DNA, 1008 bp, Morganella morganii
gtgatccgggttgccgtagcgatcccagtgaaaatagactttcaccgccccctgctcgttggtgtaaatctcttccccttccggcccgaccaccgttgccagctcatccccgtctgcctgcggacggaagcggtacggcggccgccattcgcgggtgccggggataaactgcacggtgttgctgaatttggttccctctccgccgccgttatccgccagcggctggataccgtgatgattcaccgtaatgacctgccacggctgattcatcgcagccgacggatggtttttcagggtgaagattttacccggcatcagggcaaagcagttggttcccgcggtgccggtctgacgctggttctgagattgttcgtagcgcagttgagtaaaaggttgccccggcacatcctgctgaaaacgcccgtagctttcaaaggtgctgtgctgctgatgtacttcacctgttatctggtgttgcagcggataggacggattctgcggattgtaatctttgtggatctgaatatcgccgcacaactgttcagcgtagcgccaggaaaatgcggtgctgtcgctgatatcggtatccgcctgcgggttataagccaggtctattccggcggtcataccaaggtgattgtcgctgtaaaacagtttcgggccttcctcgaaccagaaattaattccttcctcaaaggccaggcgacaccagaaatcaaaggccgattcgcgcttctgagtgatgtaatcccgcttctgatgcaactcttcctgataaaatttcaggtcatttttgacatgcgcttcatccagaagagtggcgagaacctccggcacagattgtttctggaagatgcggctgtcctggttgagggtcatgatccacatttccgggcggatcagaaagtgataccaggttttgttgccgtcggtattgccctgttcggcagaagccagcagtccctgtacggtacggattttaacgccgtcacgggtcacggtcagtga

SEQ ID NO: 291738 - DNA, 150 bp, Morganella morganii
atgtttggtgtgctcccggcggctatcgtcgcggacacgggtctgacaggcaaagaacggataaaagccttctttctgcaggctctcaagcagggtaatggtgggaatataggtataacggtcactgcgggattcatgtttttctgctga

SEQ ID NO: 291739 - DNA, 195 bp, Morganella morganii
atgttaaaacagaaagatatgacaacagcagcggcttgtttttttgaggtgttaccggaaggggttttctctgtcagcgatgcggctgccttgtcagggctttccctgccgcgttgccaacttcttcttactcagttcagccttgccggtcttttgaaagactgcggcaacggtgaacggttcagacgactttaa

SEQ ID NO: 291740 - DNA, 1248 bp, Morganella morganii
atgatcagacaagatttttcgattaaatctctgttaaaagtaacttgtagacatgagataataaaattttccctaggcaggaataaagatgaatacaaatcaaatttagaacctatatcaactatattatctgataaagatttcaattttaaatttataaaatcaattaaaataagagggaagaatgtttattttaccgataatccaagtgaacattttgctttaaaaataatatcatacaatataaatagattatacaaaatatctttgaataacagagatgagatctccgagcaaattgcaaaaatattagaaacatcaagctgttacggggtaataaagctcgatgttaagcatttttatgaatctatatcatttgacaatctcatcgacaaacttaaaacagatatgcttttatctgcaaggttgattaacatacttggaagtttaaaattattaggcgcaaaaggcctgcctagaggcttatctataagccctatactatcagaaattttcatgaaaaatgttgatagtgcaataaaaaacatacccggtgtctattattattctcgctatgttgatgacatatttatactatcaacaaaaaactcaacagaaatatattgtgaagtaataaaaatattagataagtatgaattaaaaaccaataaaaaaatgtataaaactgatatttttaatacatacacacccaacatatcaaataaaacatttgatcatttaggttataaatatataattaaaaataccgagtataataacaaaaggattgtaaatattgagttggctgatgataaagtcagaaaaataaaaacacggattgtacattcattgttagaccgagtacataacaaatcgagaataaatgataagaaagaattacttctaaaaagaataaatatactttctggtaactatcctttattttcaaaagggaaaacaaatcaaaaagaaactcaattaaaaggcggaatttactttagtaatcgactagttaataaccctgctatatttgaacaatttaattcatttatcaaaaaatcaatattctctaggaaaaataatttctttggtcgcactatgaataaaatacctctatctgaaaaaatagaattgatccacatatgctttaggcaaggttttgtacagaagaaattcattccatcttcagataaagaaatgaaagaaataaaagaatgttggaaacataagaatcataagagaaaataa

SEQ ID NO: 291741 - DNA, 519 bp, Morganella morganii
atggcagcacagatattaccggaacaggtatttccggtttctgcggagcagcttgcggctttgcagacggtaacagcagattttacctctcagcaactggcctggttatccggttatttgtggggacggggaaatacgtctgtgcagacagctattctaccggcatcaaatacaacagacagtgacattattaccattatttccgcgtcacaaaccggtaatgcacgtcgcgtatgcgaagaattaaaaacgcgttttctcagtgaaaaatttgcggttaatttggtaaacgccggagaatataaatataaacagctcgcccgggagaagattgtcattattgtgacatccactcagggggacggtgaaccaccggaagaagcggtggcgttttataaatatctgcattcatcaaaacgcccgaatctcagcgcaacagcgtatgccgttttctcgctgggagattcgtcatacgaaaaattctgtcaggcgggtattgattttgatactcagctctga

SEQ ID NO: 291742 - DNA, 1074 bp, Morganella morganii
atggaactagaaaaggaaatcccctcccccaaaagcacccatgctcctttgtcggcagtatcagctttaactggcgaaatcatatcgccattaaggcgtttgcagcaaatggacgcggacgattgggaagaatttacttgtgaacttgcaacttattggaaaacacagtatttacgagtcaatcgtgttgggggggcaggtgatatggggcgtgacgttattgcttacacccctgatggaagttgggagaattttcagtgcaaatattacagctcaccattgaatttggcagatgttctattagaaataggtaagctttgttaccactcacatcaagggcatttttctatgcctacaaaatattactttgttgtaaagagtggcttaaatggtgttagccttaacgcccttaaagattctaataagctgaaagcagaactcatttctggttgggataaaaagtgcaaagacaaaatcaccaagaaaaagagtgtaagcctagaaggcgattttcttaagttcgttgagcatgatgttgattttacaatatttgatcaaatcccacagttgaagcttatcgaattacataaaaatcatactccttattacataagaagatttggagcattagagtttgatcgaccagcccctgcaacacctccaaatgatattcaaatcaatgaattgaaatatatttcagagttactaaaggcaatagaatctatagaatctcaggtgagttctgctgatgatttagaagcctttcctgagtttttggcggaattaaaaagtgcgcgtaaaaacttctattcagcagaaagcttagaaaaattttccagagactcaatgcctcctgatacatatgaaaatttgcttgaagattgttatgaagcaatttctagcctcgttctgatggttcacaacaatggctgggataaatatttggctatctcgaaccacgtaacacaagtttcattttcatcgcatccattaaatctatacatgagtattcgagacaagaaaggcgcttgccaccaattggtgaataaaggatctttaaaatggaacaagtaa

SEQ ID NO: 291743 - DNA, 456 bp, Morganella morganii
atggaacaagtaaaacttaaagtccctcagatatttaatagtgatgtcgaattggcaactagagtcgcactaatactgtcgagtatggaaggtgagaaattcgacatagatgaactggtgttattagattacgcgctattgtattcgagcgaattcaatgggccatcaaaccttcatcctgcagtcccaaatcatttagcagaaattgcacaacggagagagttgttacctaattcgcttttgttttttattaaaaaagggctaattgatgttcgctatgatgaaaagggaaaatcattttgtgcgaatgaaaatacaaatagcttcgttagttgcttaaactcaagttatttcatcaagatttgggaaagattaagttggttgtctgagaattacgatcggattatccagataccaataatggaattaagaaaaggagtgtctagttcgacatga

SEQ ID NO: 291744 - DNA, 1821 bp, Morganella morganii
atgattattaaaagaatatccgtgataggaaaaggcaagccgaaggctgaactttgctttgataaaggactcaatgttgtcgctggtgcatctgatactggtaagtcatatgtcattaaatgttttcaatatatttttggtggtgaagagcctcctaaaaatattgacgaagctaaaggctacaatacagttgaagcagaaattaaagttgatgaaaaagaaagctttattcttcgaagggagatatcagctaccagacctcaagttactctaattgaacttgagccagatggtacagaatcagaaactattgttttaaacccaagccacaaaggaaaaaataacctatcggcacatattctcggaaaactgggcttaaacggaaaagtattagtaaacggtgtacagagtttaaaaacctcttctttgactttgcgcgtactgagtaaattattcttagtcgatgaaggacggatgattaccgaatcatcacctctgggtgaaggccagcgagagtatactcaagaaacgtcattacttaaaactttgcttactggtgcagatgattcagtggttaaagatttgaaacaacaacaagatacagaaggagctgtagaatcgcgtgttaaagctttggaagagtatgttgccaagaaattttctaaccatgaagaagtaaagtccacaacagaaaagttagactcagaattgaatgagttagaggaatctctatctcaggctcaaaacgaactaaccgctctggttgaagccagtagtgaacttgattctaaaagaaataaatttaggggtgagctaagtaagttacgtgaagcagaaaaagagaaccttttactacaggggagattcagccttttaattgagaaatataattcagatttagaaaggttagaggcaggagctgaagcggcttcttttattgagctatacgagttagctaattgccctacttgcggacatgagtttgaacaagaaaaagatgtagaagagctaaagcaattggtgcaaagcaccgaggcggaaatcaataagaatagatatcgagttaaagggttaactgattcaattgaggatctaaagcaagagtatcaagcacttgaaaatgagataattcaaaaagaaatagcagttaaagagatatcggaaatcatagaagggaatatatcttcgaagtttaaggactataatgtagctattcgactattaaatagtaaaaagaatgagtttttgaaacaaagagccatagtggactctcgtgaaagcttattaaaagaaataggagaattgcgtgttcagcttgaagacagaactgaaaaatatgtttttcctgattttagtgctgagttaaccgccttgtgtaagaacattagcgcaatcttacagcgttggtcatttcccggacatgaagacgttacttttgatatgaaaactagggatttggtaattggtggcaagccaagatcccattttggtaaaggataccgagcaatttcttatgcagctttttcactaggctttatggaatacttgtctaagtttgaacgtcatccaaaatttgtaattctggattctcctttgaccacttatcgagcgggtgacaatgatgagaatgatgatgaggttcaattaaaaaaagatatgatttttgctttctacattgatctttgcgattcgttcaatgataagcaaataatcgtatttgagaaccaagagccagatgaggctttgaaaccaaaaatgacttactaccacttttctaagaacaaggatattggtcgatatggattttttccagtagcttaa

SEQ ID NO: 291745 - DNA, 693 bp, Morganella morganii
atggaaatcaataggatgctcaatagcactctgtgcgcctccaccgtccgccgctggctgcctcgtatcggcattgtctggcgccgggccgcgccaacgctacatatcaaagatccccataaggccgagaagatgcaggctatcgaacaggcccttagccagtgcagccacaagcatccggtgttctttgaagatgaagtggatatccacctcaacccgaagatgggggcggactggatgccgcgaggccagcagcgacgggtggccacgccgggccagaacgccaagcactatctggcgggcgcactccatgccaagaccgggcgggtgttgtatgtctcggggcaaagtaaggactcggggttgttcattgccatgttgagcaagctgcgcagcacctatcggcaagcgaaaagcatcaccttggtggtagacaactacatcatccacaaaagccggaagacgcagcgctggctggccgacaatcccaagttcaagctggtgttccagccggtttactcgccctgggtcaaccgtatagaacggctctggcaggcgctgcacgaaaccattacccgcaatcaccgatgcaaaacgatgtggcaattactgggcagggttcgtcacttcatggataccgtttcccccttccctggcagtggtcatggtatccgcaaggtggagcacaattag

SEQ ID NO: 291746 - DNA, 693 bp, Morganella morganii
atggaaatcaataggatgctcaatagcactctgtgcgcctccaccgtccgccgctggctgcctcgtatcggcattgtctggcgccgggccgcgccaacgctgcatatcaaagatccctataaggccgagaagatgcaggctatcgaacaggcccttagccagtgcagccacaagcatccggtgttctttgaagatgaagtggatatccacctcaacccgaaaatgggagcggactggatgccgcgaggccagcagcgacgggtggccacgccgggccagaacgccaagcactatctggcgggcgcactccatgccaagaccgggcgggtgttgtatgtctcggggcaaagtaaggactcggggttgttcattgccatgttgagcaagctgcgccgcacctatcggcaagcgaaaagcatcaccttggtcgtggacaactacatcatccacaaaagccggaagacgcagcgctggctggccgacaatcccaagttcaagctggtgttccagccggtttactcgccctgggtcaaccgtatagaacggctctggcaggcgctgcacgaaaccattacccgcaatcaccgatgcaaaacgatgtggcaacttttgggcagggtccgtgacttcatggagaccgtttcccccttccctggcagtggtcatggtatccgcaaggtggagcacaattag

SEQ ID NO: 291747 - DNA, 729 bp, Morganella morganii
atgaatatcattcgagaatttacctctaatttaaatggcgagtttctcgcaattgtgtttgctatgttttctttattgcttgtaataatatctcttttgttattcaaaaaaagagaaactatttacaatgaaaaactaaatagaattgaacttgattttatgcgatcaaattatgaaaataagatttacgaattaaatgaaaagttaacttttgaaaagaaaagatggttggataataatcattttttcgcaaatatgcctaatgatgatcgaaagataggtgcaatcaatcaagcgttcaatccatatttttttctagagaatatggggttaaaccctgatacattgagcattaaacccaagagtgtatttatcctcactccatttaatgatagatatcttaatgattacaaagctattgaacaagcttgtatcaacattggtatatctgtttctcgtggagatgaagaacgcataaatggtgatatcttatcctatatagtttctcaaatttgttcatctcaattgattatcgctaatatttctggtagaaatcctaatgtgttctatgaactaggaattgcccaggcattaggaaagccggtaataatagtcagtaaaggtgcaaaggatataccttttgacttaaaaaatagacaggttattatttacgaaggcttatctgatttaacatcaaaaatccagaaagccgttgtaagccttctttaa

SEQ ID NO: 291748 - DNA, 663 bp, Morganella morganii
atgaacgagcaagatgtagaactttatcaccacatgttaaatgttgagttaaagttcgtttttaataataaactccgaacaaattatgatgaatttaatttccctaagtttgtaattaaagaatttaaagatcttaaacggaaaaagaaaatatcattatcattatttaagttttttaataatgcttttatccctaatcaaagcggattcttaaaccgttggtttaaaaggttcaagcgatatggtgatatatataaagttaatgagagattaaatggttgcacggtcgaagaacggctagagatgctattttctaagttgaacgactatcaatttgtcataaaaaaaccacataatgataacattgagttttatgaaaacgaatcccctcacatattatcatttggttttgtaggtatacatagcaatgaattagtaaatataaaatctggcagtaatgaaattatgctgacttattatattggtactagtgggattgcagcagaaacactacttatttaccaactgcaaaattatggctttaacatttcacttgaacttcaaagatcacaaactcgattagctcataatgaattttcatatttatttatcgaaccattctatgaaaaattaagcttgtgttctaaggagatagaaaaatga

SEQ ID NO: 291749 - DNA, 1149 bp, Morganella morganii; identical to SEQ ID NO: 291401

SEQ ID NO: 291750 - DNA, 351 bp, Morganella morganii
atggggataaatagaagctgtatcgcattagtttgctttttcttgtcatcttgtggttctaccacaggggcgatcactacacacgagcatcttgtgacgcaagccacacaagataagcatgtcagttcaggtggcttcgacagagtagctgatacctatgtactggcaagagagattactggtcttgaatccaacgaaataaagcaactctatgaggtgaaggggagtgacaacacattaataaaaattgatatggcatctataccatgctcgatattgcttaaaaagaacacaagtcaaagtagtgagatttggcttataactgatatgggttgcaatgaatatttataa

SEQ ID NO: 291751 - DNA, 570 bp, Morganella morganii
atgaatatttataaaatctcagtaatcagctcccttttattttcttctttgtcatacagcaaacctatttttataggagattcacttacctatgagatagctaaagggtacagcacaatccaagctgttgatgctcgatacaaagtaggtagcggattatccacaaagaatatccttgattggcagagatacgcagagcaattcagttttgaagaatacgataccgtttatgtgattctcggtactaacgaccatgttcaaatatcagaaaaagaaaagtacacctctaaagttcggcattttatccaaaccataaaagccagaaaccaaaatgtaatctggttacttcctccaacccttaaagacaccgccaaaaacagactattagataacactcggcaagccataatgacggcttcgcagatagaggggatcaccaccgtagatacacgaacggttcttggtgaaacatacaaggatgtcatagatgggacaacagttcgcacaaaggatggaatacatatcactccaaacggagccttacttaccgtgacacagctactattttag

SEQ ID NO: 291752 - DNA, 936 bp, Morganella morganii
atgagaagaaagcgtagatttaagaaacgaaatccctatgtaactaatatgaatattgcatttatattctatatgaccactctggtatttcttagatttgattctattgcgagagttttaactttagtaatacctttatttgctgtttatatattgtcacctagcagcaaaatattgaggttacacaagagaaagaaacctgaatgggcttcagtgggaatcaaaagaaatgcccctctattaaaccctcaagttgcattagtgataattgctgttaccacaataactgtattttttcttcgttatgaccatgtaataacaacgaaaatcatacaactgatatggggagatataaaaacagcatatgctgatattttcgggaaaagcagtgcgaataaattattctctctgaggaatatcccagtttgtacatattatacattccatatattacgttcatgcgttgcatttctgctcgtggcttattcagcaagtgtctattttcgttataaacaacaaactatgtttaaaaaggtactttttaatgccacctatcatgaagatgcattgcaatttatccgagaattatcatggcgagaatttgaggaatttataagagagttattcaacagccttgggtacagagctactgtcactaattatggtccagatggtgggaaagatatcattatggaacgtgatggaatcaaagttttcgctcaatgcaaacactggaaatctgacaatgtaggtgttgctatcgcccgtgaaatggttggtgtactagaagcagaacccgaatttaagcatgtatttctagtcacatcaggtaagttttctaacgatgcagttctatacagtcacagaacatctgaccgtctgacactcatggacggaaaaatgatagccgataaattattgctgttaagaaagtaa

SEQ ID NO: 291753 - DNA, 963 bp, Morganella morganii
atgacggatgtttcttccaatgcaaaaaaaaatgaaagtaaaaaaggacttggttttcttctgaataaaaaatccatgattgcagttgcagttgcagcaggtgcaatagcagtatttgttttactcaaaccagcaacagacacgacagaaattgatgttaattattatagtgacgttgaaacctctattcctgtttttaacaatcccaaagaggcagaaccagaatcgaacagtgccgagaacgtaactaaaaccgattctccggcatcagaggttaaatccgactctgttacaggagatgttgctaagacgctctcagaagcagaacaggagcattctgacgtaacagaaacacagaatccatcagatagcgaacaaagcattaatggcatgcttgagcatgttagcgaagctgctacttcagtagtggaacacactcaggcattaagtacaaactttacaggtcaaccacctgcaccggcagctcaggagctcagtgatgtgtattacagcaatcaggctccaacacagcaacaagactttaaaaacgtatttgatgcagcattggaagaaagaaacaaacgccttgaaaatgaccaaaacctcgactatgtagggaagcaattaacgatcccatacgcgccaaattcacaaactaaagtctatctctaccgtaattttgcagtgaaaattttcctacctgcacaatccgaagccgttaaagagctcaattacttcatcaatggctcagaccatgacgatcatttcgacatcaaattattaccaaataacattttgctcttatcgaaaaagccaagttctgaagtgtggggcggcacagacttattcatcactcatggtaaacaaaattatacatttatattacttagtgcgaaaaaccctgatgaaagaactgattctattcattatgaaaaagtaagcgcaaacacaaccaataagtga

SEQ ID NO: 291754 - DNA, 558 bp, Morganella morganii
atggaaaaatacacgagtctgagaacaatagctgacgatattcagatgtacccatattcatatctattatgccgacaattattaaaaaagggatacatcgagggcgaggctgtgattggtatctataagcaagaactggtccacactccggagacagatttagcttacacaaacagcattttgcaatactcatggatcgagacaaaggctcataccgtcatagaccctttaattgattttcgcgacggaaaccgagaaattaacctaatcgagagagacaaaacaccaaattaccatgcaggcgtaaatcccttgaaaattacgaaggaattacttccagaacatcgttgctctgatgaagtgtttacactaatgagaggggctgaatcagaggctatgaggcgaattttaggtttagaacaaaaccccaatgggatcacaatgactgaagcggcttacatagcaaattatcatacgtgtgattacttaggatatgataggattattttgaatttttttattaaacacaaattaacaccaatcataataaacgaatag

SEQ ID NO: 291755 - DNA, 438 bp, Morganella morganii
atgtcaaagaaaaatagaaccagtcttaaccaaattcaacgatgctatgaactagatgaaatgacagtaaaccgagaattggcaaaagcatcgtatggacccgcagccttgatatttttcttattaattttttttctacctttgaaagctgaatttaatctgtggctatcattatttctatcattgttagctggatatatagcatatagagtatttggcagaaaaatagcaagtaataaaattgaatacttagaccaattgctattgaagtatacgccgatgaaccaagaggcatacgaaaaattaaaaaaatctgtaaatgaagaaccggatggattttacacatatctaggtgagtttataaacaaagaaagagagttttgtgataaaaaacattgttctaaatcagatgagcataaatttaaatttataaaataa

SEQ ID NO: 291756 - DNA, 1536 bp, Morganella morganii
atgtcaaagataatcttatctcaagaacaagaagccattttagcctctgaagaaaagtatatttgctgtcaggcttatgcaggttcaggcaaaacgttcatattgactcaattggcaaagcgtaatccggataaacgtattttgtacttagcttacaacaaaggcatacagatagaagcatcacaaaaatttccttctaataccaaagtgatcaccactcatgcaatggcatatcggtatttgaaaaaattgaagtacaaaatgaagtttaatttcaatgggttcgatgtggctcggctactaaatattacatctgttcaattgcaatttctcataatcgagactctaaataattattataggtctgctgattattcgttacagatacatcacgttccaacagagaacacagggaatggtaaaaaacatgctgaaaatgttaggaaatgcgcattagaaaatgcaaaactcatttttgaattacaagctgaccctaacagtgacttccctgctccccctgacttttacataaaatattttcagttagtagcccctcccctacatacatggttcgatatcattttgtttgatgaagcacaggatgccaacttagtaacgaaggcaatgctagataaatgtgaatgcaaacgaatctttgtaggtgatacgcaccagatgatcaaccgctggcgtggggcaaatgatgccctagatgcctctgtacgtgatggagctcagatattgcgtctaactacgtcatatcggtttggacgatgtgtagcagctatcgcaaatgccatactgatgttaaaaggggagactgtaagccttaaaacgaccggtattactgataagctcataaataaagctgaaatcaagaatatcttccctagaactgtgatttcacgcaccaatctatctgtgttgatcaatgcaattgacgctggaagaaacggtaaaaaagtgttcttcgtaggtggtattgataggtatgctttagacgatattgctgatttttactatctgtatatcggcaatactaaaatgattaagagaaaagcatttttatacgactatccaaattgggatcgggttgtaagcgttgcagagaactcaggcgacaatacgttgaaaaggacgatacacctaattgaaaatgagcctgatattctagagctggttgataaaattaaagaagcagcagttaataattacaatgatgctgatttaacgcttgtaactgcacattcatcgaaaggacttgaatgggaatatattgagattgatgatgattatgtttcattagttgaatatattgagaaaacaccaaaacaaaaacagaatctaatatttattaatgatgaattaaatttgttatacgttgcagtaaccagagctacgaaagctctatcggtatcaatggtaattatggaaataatttcattaataaaatatagaaaagacaaaaaaagaaacattccaatagtaactccggaagaactacacatttttttaaatagtacaacacaaatctaa

SEQ ID NO: 291757 - DNA, 360 bp, Morganella morganii
atgcaattagtaaaaacatgtgccatgccgaaaattgataccaaaaaagtgcttttcgtggttttcgcagtgttatgtgtagcggcactggcagttatgtttgcctatggcaaaggaaccgaacagtccggtttcaaagaagtatggatgcaaattactgcatatatgcaggggtcattaggtcgtgtgttagtggggctgattgtagttgttggtattgctgcggcggttgttcgtcagtcgttaatgacctttgcagtggcggttggtgcggcaattggtctgtactatgctccggatatcatcaacggtatcatgacttcatctgttgcagtaacaacggcattaccgatattgtag

SEQ ID NO: 291758 - DNA, 642 bp, Morganella morganii
atgaaaaagtcatttatattttgttgtctgcttgcaacatccttatcaggttgtagtagcgcagataagcccatatttgggtgtggaaattatgtaaaaacatccacaattagcattgaatcgggttatggcggtacagcgaatgacgtaattgataagcaaattgctcgaaaagcagtaacggctacttatcctgctgactatacatatcgcgaaaattggaaagatacgaatagaggtggcgcatcattgcgacagcaaggttacaggcacgtaattgcatcaccatacgagatctacgaccaaggtaaaaaacatattcctgtggaccgtagctttcatacagacctgttaataagtagtttagctcgcagtagttcatcgaacgtttataccaaacctgaattaccatcgttctgtggtgaaaattcacgaaattattttctgaaggaaacgcctgagaataaaaaatctcggaatgaatatattcgtatcaaagaaaaatactgttctgatccagagtataaattaactaatgaagaattagttattttacaaaatggagagcctgactctctcaaaaactatcgaatgaaaatctatattgataaccaaaacgaaccatcacctgcaataaagtag

SEQ ID NO: 291759 - DNA, 348 bp, Morganella morganii; identical to SEQ ID NO: 190917

SEQ ID NO: 291760 - DNA, 177 bp, Morganella morganii; identical to SEQ ID NO: 14595

SEQ ID NO: 291761 - DNA, 819 bp, Morganella morganii; identical to SEQ ID NO: 16673

SEQ ID NO: 291762 - DNA, 174 bp, Morganella morganii
atggttcgctggaaagggaatggacacaaactggcgcatgaagcgagaaatgctttcaccggcatacactacgagaatttcagatcttcccgtagtgaagatttagaggaaatccaccagcgtattcagcaggattcaccgcaatcctacaattgcttcaaccagtatacctaa

SEQ ID NO: 291763 - DNA, 798 bp, Morganella morganii
gtgaaagccaataaattaattttatttgcagtcttatcattgagtatcacacatatccaaaatgcgatttccgctgaaagtcaaatgtcattttcactatcagaaatttgtaaagcaggattatctaccatatatgatcgtgatatagatataatgcaatcgacggaaatttcaaataatatcagtagaattagatacataagaagccaagatggtaaactcttttcatatctgtgtagaaaagagtcaacaaacagactaagtttctttgacgaaaacttacccaatgctcgttggtatggtgctgatctgtctgaaccacagatatttttctctacggcaaacaatgtgctaactataagagatgttgttaacggagaaaccttaaaaacatatatatttagtagaaatgattttattgacaagaaggaaacatctaaggatgaaatggataagataaacatctggctagatgagtacataaccaattcattcaataaaactaatgcgtgggatgttaaatatattggtgttacacaaacgatgtctagtccggttaatacttatatgctaaattttgataccacagataaaaagttactctctcttaaaaatgcagatgttgatgcgtttgcttttgaacaaaacatatcaagaatatctaaatggaagaatagcttttgtacaaaagagatttcagattttatgattaaatatagcattgatgtgctacactcaaaaatatctaataacggagaattacaattcatctctacttgctacaaaggtagctattaa

SEQ ID NO: 291764 - DNA, 282 bp, Morganella morganii
atggatacgttcaagttaaaactctggctaataggtgaacgtggattcgactttgctaatatttttactaatccggatcttggtaatccagtacctcctgttgcgactgtaccggagacatttaaacagcgcctaagtatcatcaccagaatggctgagctggacagagaacgcctgctcaaatggataattgcatggtgtggtctttcaactgcctggtgtcggaagacaataatgtttgaaacttttttgcattcgcagtccgttctttcgtgtcaatag

SEQ ID NO: 291765 - DNA, 648 bp, Morganella morganii
gtggctttagcagacaatatttggtggacaagaaaagctcgaatccaaacagagaaacgacttttatctaacgcttttcactcacaagtaatactactctggtattcattcttctctgtcgccgtatccgtttattatctaaataacccacaaaatggaatcgaagcaatctcttgggttgtatattctgtcctcgtactttgcatttcaggtttcatcaatgggctttcatttaaggaaagagcaaacctaatcaaagaatgttatgaaagtttgaatagcattatgcatcaagcctccaagccaaatcctgatttggacactttatcaacagcctacgaatctaagctaaatgcttgtgaaaaccacactgacaaagattttgccatcgcactatgccaagagtattgggcaagtactagcagcgtaagacaagtaagcaaagatttccattcagacacctcggaaaacaaacaacaacccaaacaagctcttactagaataccaacatcacatcactggtttttaacggtatcttattttgttgttagattgttaactcttgtgtttttctatgtcttgccagtactgatattgcttgcattaaactcgtctttattcttatccactccaacttgtactggttga

SEQ ID NO: 291766 - DNA, 1332 bp, Morganella morganii
atgcgtgtacaagaccaatttaataaagagtttaggcacgagaatctaaaagaaatcttttccaatcatgttgtatattctggtgcgactggcatagacaatatgaatcagtattcttttagaaaacagttagacccacaagtcgaaatcatttctcgtaaaatgattgaaggttcgtatacgttttccaagtacaagctaaagttgctgactaaagggagaaataaagcccctcgtgaaatctctatccctacagtgagagatagaattgcattacgtgcaatgtgtaactttctacaagacagatttgcagaatcagtgaagttcacgcttcctcaagatgtcattaaagatgtcaaggctcacactttatctggtgactttgatagctatattaagttagatgtttcgaatttttatccatcgataagacataaaaacctacgctctcaattgagaaagcgcattaggcaagatcacatactagacatgatcttttcggctgtcactgccccttcagttctagtttcgagaaaggatgataagccaagtgaagtaggcgtacctcaagggttggctgtttccaacatccttgcagccatctacctccaaaacattgacaaatttttatctgaattgcctaacgtaaaatgctaccgctacgttgatgatgtattagttctttgttctgctgatcaagcacgtgatctagcacaaatcattatcaagaagtttcgcaatattggtttaaaaatacacagccctgagaaagcgccagagaagtcaaaaattgactcacttgctaacggttttgattatcttgggtatcaatttaccaatgagcatatctctgcaagaaacggttcgattgaaaagttaaaggcttctcttgcaggaatttttacaagctataagcactctaaaaataagagcttaaaaattttagaatggcgattgaacctacgaatcactggctgtgtgtttgagaagaaatgtaagggttggcaatttttcttcgctgagatcaatgatgaaaaactactccacagactagatcattatgtcctgcgcttatgtaagcgttttggggtagaaatcaaacctaaaaagtttgttcgtactttcaaagaaattagccacaacaaatataacaccagttatgtaccaaacttcgaccagtatgacgtacctgagatgaaagaggtattagttcaatattttagttttgatttgaccaatatgcctgatgaagaaattcgttaccacttccataaaaaaataggttctcaagtcagagagctagaagttgatgtgaaagactttggttactag

SEQ ID NO: 291767 - DNA, 2067 bp, Morganella morganii
atgaacgccatcacctacaccgaagcccgcgccgtcaacaccgccgccgctgtcccgctggaagccgccgacccgaccaagaacctgattctggttccgctgtcgcggctggtgctgcgccccacgggccgcaacgtgcgcaagaccccgcgcatgtccatccccgaattggccgcgagcatccagcgcgtgggcctgctgcaaaacctgatcgtgattgcatccgccgatggcgagcactacgaagtcgtggccggtggccgcaggctggccgcgttgaagctgctggcgaagaagcaccgcatcagcaaggaatgggaggtgccttgcctgctggtggccgatggcaccgcccgcacggccagcctcaccgagaacgtgcagcgcgaagcgatgcacccggcagaccagttcgaggcattcgccgcgctggtggccgaaggccgacccatcgaggacattgcagcggatttcagcgtgtccccgctggtggtgcagcgccgcttgaagctggcgaacgtatcgccccgcctgctggccgactaccgcgccgaagccgtgagccttgaccagttgatggccctggccatcaccgacgaccacaccgcgcaggaagtcgccttctacgatgcgccaacatggcaacgccagccgtccgcgctgcgcgaccgcctcaccgaaagggaaatcgacgcctaccggcatccgctggtgcgcttcgtcgggctggacacctacgaggccgcaggcggtggcgtgcgccgtgacctgttcgccgaaggtgacgcgggcgtgtacctgaccgatgctgcgttgctggacaggctggcgcaagaccggctggcgggcatcgccgccgaagtgaaggccgaaggctgggcatgggtggatgccacgccgggcgtgacccatgccgacctgcacgccttccagcgtgcgccgagggagcggcgcgaaccgaccaagcgcgaagcgcagcgcatcgaaaagctgcaagccaagatgcaggaactggccgcagccgtggatgacgcgctggacgtcgacgacgaggaaaaggccgatgccttgcaggaagaaggcgaagccgtgggcgagcagttgcaggcgctggaagatggcttgcaggactacagcccgaccgtgaaggccgcagccggtgccatcgtcaccatcgaccgcaacgggcaggccgtcatccattgcggcctgctgcgcgaggccgaggccaaggcgctgcgcacgctggaacgcctgcgccaaggtttcagcggcgaggatgccgtgaacgacgacgaaggcgaagacggagacagcgaagggcagcccaagaccgccgccatgtccgaccggctggcgcaacggttgagcgcccatcgcaccgccgcgctgcaaatcgaagtggcacggcatccgcaagtggcgctggccgcgctggtgcatggcatggtgcagaccgttttgcaggaaagccactacggccacgatctgccgctgggcgtgagcctgaaagtgcaagaccggctggaaggcatggccccggactggccggaatcgcccgccgccgtggcgctgcgcgaactgcaacaggtggcgggcgaagccttgcccgaggacagcgccgaactgttcgccgcgctgctggcgaagtcgcaagacgaactggtgcggctgctggcggtatgcgtggccgtcacggtggacgtggtgacaccccgcaccacgcggcagcagccgggcgaagaactggcgcaggccgtggggctggacatggccgcgtggtggaagccatccaatgaaggttatttccggcatgtgccgaaggccgcgattctggaagccgttgagcagttcgcaccgtcgcacgtcacccggctggcgaagttgaagaaggccgacattgccagcgaagccgagcggctggcggatggaaccggatggatgcccgccatcttcgccaccgaaggcacgcaggaagccacgcaggcagaaccgcaggcgcaggatgacgccccggaggatgccgaggcactggcggatgaacccgccgtggcgctggccgcttga

SEQ ID NO: 291768 - DNA, 210 bp, Morganella morganii
atgacccacaccaccaccagccgcctacgcatggcggcgatctacgcccccggcgcggtacgcgcccgccgctggcacggcgacggcgacgtgcgcggctaccgcccgccctcgggctggttagcccgtgccgacctgaccgacattcaccccatcacgggccgcgccttgccgcgtgccgtatggtggctcatcgagacgaagaaataa

SEQ ID NO: 291769 - DNA, 519 bp, Morganella morganii
atgaccctccagctccgacacgaaaccccggacgacgttgccgccatcgaggcagtcacggtggccgccttcgccgatgcaccacataccagccacaccgagcaattcatcgtgcgggccttgcgagccgccggcgaactgacgctttccatcgtggccgaagaacatggccaggtcgtcggccacgtcgcgctgtcgccggtgacgatcaccgatgaccacgggcgagaggcccaaggctggtacggcctggggccaatctccgtcctgccgccaaggcagggaaacggcatcggttcgcgcctgatggaacaggcgctgtccgaactgcgagccatgcaggccgcaggctgcgtgctgctgggagatcccgcgtattacgcgcgctttggttttgaggcccatgcgggtctgcaactgccgggcgtaccgcccggctacttcatggcgctggctctgcacgggccagtgccggaaggcgtcgcgcactacagcgatgccttcaacgccgccgcctga

SEQ ID NO: 291770 - DNA, 315 bp, Morganella morganii
atggccaacatcggcaccttcaccgcagaaaaagacggcttcaccggcacgcttcgcaccctgacgctcaacgtcaaggccaagctggttcccaacgacaagggggacaacgagaaagcccctgacttccgcttgcaggcggccagccacgacatcggcgcggcgtggaagaagaccagcgaggccgggcgggagtacatctccgtgaccctcgacgatccatcgttcccagccacggtctatgcccgcctgatcgaaagcgaggacggcacgcacgacctgatctggtcgcgcagcaagccccaggcggcgtga

SEQ ID NO: 291771 - DNA, 297 bp, Morganella morganii
atgcagaagcgctccgtccaacctggccgcccggccggtgccaccaccttcgatgccgaactggcgcaagccttcggcgcggcggtgcgcgcgctacggacggaacgagggatcgcgcaggaatcgctggcacacctggccggcatcgagcgttcgcacatgggcaaggtcgagcgcggcgaacacatgcccacgctggcgcttatcttcaagatcgccagcgcgctcgaatgcagcacggcggtgctgatgagcgaggctgaaagccagctcgcagcagcagcggcccagccgtag

SEQ ID NO: 291772 - DNA, 282 bp, Morganella morganii
atgcgaccagctcccttgcggcctgccgccactgtctcgaccgctgccgcgcagccgcagcgttacctcaccaacgacgaagccgccgagtacctgcgcttgtcgccgcgcacgctggaaaagcagcgcgtgatcggcggcggcccgcgctttcgcaagttcggccggcgcgtcatgtacgccgtggccgacctcgacgcctgggcggccgaccgcagcttcgagacgacttccgatcccgagtacgccgagcaccactcggcggacagccgtgcgcgctga

SEQ ID NO: 291773 - DNA, 858 bp, Morganella morganii
atgtccatctccgcgctgccattccggcagcggcccccgcaagaacgcgaacagctcgacctgttccgcgccttgccgggcgacatggcaccgcgcgacagccaggacttgatggcctatccgttcttctcgctcgccaagtccaagcgggtcaagcccatcgacttccgggcgggcaacgtcacgatccgcgtggaaggcacgcaggagcatggcatcgccacgatttgggatgccgacgtgctgatttgggcggcctcgcagatcgtggaggcgaaggatgcgggcctgcggccatcacggctgatccgcgcgacgccctacgagatcctgcgcttcgtcgggcgcggcaagtcgctgcgcgactaccagcgcctcaaagcggccttggatcgcctgcaatcgaccacggtggccacgtccatccgcgagacaaccgggcggcgtttgcaccgtttctcgtggatcaacgaatggaaggaactggccgatgccagcggcacgccgttgggcatcgagctgatcttgccggactggttctatacgggcgtgctgaatgcggccctggtgctgaccatcgacccggcgtatttccggctgaccggcggcatcgagcggtggctgtaccgcctggtgcgcaagcacggcggcaagcaggcatacggctggcaattcgacttccgctacctgcaccagaaatccggcagcaccgccaagccctacgacttcgcctgcgacttgcgcgcgctcgtcgcgcggcagtcgctgcccggctacgtcctgggcatcgagcggatgccggacagcggcgccgagctgctgaccttccggcccgtgccgcatacggcacggggataa

SEQ ID NO: 291774 - DNA, 564 bp, Morganella morganii
atgactgcatccactgcactagccgccgcgcctgccgctgtcgcggccacggccacggctgcgccacagccatcattcatcgcaccttccggccagccagccagcgcgccgctgacgcgcgtggcgctggcctacatcgaggcccgtttcaagctctacctgcgcttcggcgaacccgcgcgcacgcaccagctcgaccgctggcggcgcagcgcggtgttcctgccgggcgcggtgttctgccgcatccgctggcaggccaacgactacggcaccgtgcgctggcagctcatggtgatgcaagcctgcacgccgctggacgcggcgcagcgcatccccggcgtacagccgggcgcgcgcctgctgctgcacgccgagggcgacgggcaagtgcgcgccgtgctggaacgcatcgacgccatcgaggcgctgggcatcgcgcccatcgccgtctcgcctgcgtactggcgcacgctcgccaaccggctcgccgcgcgcctgccgctgcccgagtacaccgccgagcggcacgccgcctggttagccgggagggtgctgccatga

SEQ ID NO: 291775 - DNA, 576 bp, Morganella morganii
atgaccgccgtttccactggcgccaacaccactggaaaggcaccgcgtcctcgctcgcgcctgcgcgctcgcatcgtgctcgcgggcttcgccgcctgcggcctcgctgcgctcgcctgggcgtccttcgtgcatccgatgccgcgcctgatctacaacccgtccgacagcgttccggtgggctggtatcgcatcgcaccacccgatgcgccgcgcgtcggctccatcgtgctgaccacgctgccgccagacgccgccgcgctggccgcgcagcgcggctacctgccggcgcgcgtgccgttgctcaagcgcgtgggtgccgtcgcgccgcaggaggtgtgcatcgctggcggcatcgtccgcatcgacggcgtgcctttggccgccgcgctgctcgccgaccgctggggccgcccgctgccatcctggcagcagtgccgccgccttgaacccggcgagcttttcctgttgagcgtgaccaacccgtcgtcgttcgacagccggtatttcgggccggttgccgcatccgccgtgatcggcgtcgcgcacccggtctggctggagaagcgcccatga

SEQ ID NO: 291776 - DNA, 942 bp, Morganella morganii
ttgggtatatataacttattttcaaagaggcaaaaaaaacttcgcggcgaaatttgtgatgtttatcaatatgataccatccctaaaaatctaaaagttcaaattattcagatcatatctgatacgataggaaagccaacccctagtaacagatatggcacgtacatgagtgtatctgatgaactatatgaatctattcacaagatattatgtcgagaatatggagtctttgtattaattaagaatgccaataatgatttccaagcggtctacgactatttcctacaacaagttgatattgaaaaatgtctagacatcatagaaataagcttccaagctatagccatcaatgtcaaaaataatccctacgaatttagagaaataacatgtcaatctccagatgaagcaatcgatgagctcaacgaaagatttagagaaaatggtgttggctttcagtttgaatctaatgaaataataagaatagactctcaaatcattcattctgaagttgtcaagccaaccttaagactattgagttcaactccatatttaaccggttccaataacgagtttctatctgctcatgaacactatcgccacaagcgctataaagagtgtttaaatgattgtctaaaatcttttgaaagtttgatgaaagccatacacgataacaataactgggtgtataacaaaaatgacactgcatcaaagttaattagtagctgtctttctcataacttaattccaagctatttgcagagccagtttaccagtctcaaaacaatgttagaaactggggttccaacaataaggaacaaaaattcaggccatgggcaaggaattgaaattaaaaatgtggatgaggaattagcaagttatatgctgcacttaacagctacaaacttactttacctcgctcaatgtgcgcaaaaaataaaataa

SEQ ID NO: 291777 - DNA, 525 bp, Morganella morganii
atggaaaaagaaactaaagttataaagctaatggtgttatttttcatcttatgcatggttatgataatcggaatttacattcttaatttcaggagtaacccaatatctaataacccatccgattggggagttttaggggattatttcgggggggttttaaatccattaatatctttgattacgctgtctttcttaatcaaaacatatttatatcagaaaaaagaaactattcagggtcaatcagcagccgacgaacagcgcagtattgcgcaaaaaaccgcacgcatacagctattaaatacaaaaatatcagcacgttatgatgcaatgaccttctataagagtgaaatggatggagtaactaacgcaatggcaagtaataggcgctatacttcaatctatggggatgagtatgattctgatcgtgaacaaaaaaaatacagattagatatggccgataaaattaagatggaattagaaaaaataaatgaatctttaaaagaaatcgaatcattatctgactga

SEQ ID NO: 291778 - DNA, 561 bp, Morganella morganii
atgactatgagatattgttcgaaagaagagtttgatagatttgaagccttttgtaatgaatctaagcgaccaactgcattggaagatattaatttttcgagtccggtcttggcacaaatcataacttaccacctttacaatgagtacatgatagaaaattgggtaaaatataagtttgcaaatggcgtttcaatttttaaagatgtgaatttcacaacaaaatcaaaacttatacttgctaaaaatcttggtttgcctgttgaaatttataatgcggtaaatctactaaatagtataagaaatcaatttgctcacaacatcaatgcgaaaccgattgatgatgtaacgctcgaaaaattgatcaaagtatctgataatatcaatttaaatgagaacacatatgcatcattatacccttatcaaaaggataccatcgataaattatcgggagatagtaagacaaggcatatattattcttagtgttgtcaactatgagccttaaaatatggaactatatatttagggatatgcaccatagcaattcacatgcgctaaagtga

SEQ ID NO: 291779 - DNA, 1500 bp, Morganella morganii
atgaaattagaacaacagatccaaaaaataattcttgaagaagctgtaaagctcattaaaaaatataatgaatatcacaatagaattcatatagaatctatcaggaataaaaagcgcttgggggattttgccccaaccaagaagatatacacccctgattattggtctattgataaaaagttcaatccattttatgttaaatctaactataaaggaattgcccgttcaattgctaataaaattgaaaacaaatcttactcccccaataaacctcatataaaagacattccaaaatcagatggtggaattagaaaagtatctatatatcaaataccagatgcggctatttcaaaattattttttaatcgattattagcaaaaaacagacataggtttagttcattttcttatgcttatagaaatgatagaaatgttcattttgctattcaagatatatcagtagatctgaaaaaaaatgaaagaacatttttagctgagtttgatttttcagatttctttggttccatttcacatgaatttctgaaatctcaattcaatgagaatggtttctatataagtgctgaagaaaaatttgtaattatgtcttttttgaaaggcagaaaaattggtatcccgcaaggaacatcaataagcctttttcttgcaaatttaacatgctggaaactagatcaagactttgaaagagaaggtgtgaagttttcacgttatgctgatgatactattatctggtcaccagaatatgctaagatctgcaattctcataaaataataacagatttttcaaaaaatacgggtgtgaaaataaatcctaaaaaatctgagggtatctctctattaacaaaagaagggttaccttcggaaatcacatcaaaaaataatctggattttttgggttatacgctctcagttgataaagtatctataaaagaaaagtctgttaagaaaattaagaaacaaatttcttatattctttacagaaatttgattcaaccactcaaaaaacaatcattagcaggacaagcaattcctgctaatgataaagaccgaaattttcttacatccatatgtgaaattcgccgttatatgtacggtgggttaagtaaaaaacaaatcaaagattacttatctggcaggacaaaacgtttatattttaagggagtaatgagcttttatcctcttgttgatgatattgaacaattgactcaacttgatggttggatagtctctgtaatttttagagctttaaaattacgaagtaaattactcataagtaaaggttataaccgaattcatagctttccttttaatttatcaaaagatgatattttggaagaatgtgccaagaaattaatttctggtaaaaaactacttgaaattccaagttttctattaattcaaaaagcacttaagaaaggtttagaagaatcaggaatcgagcgagtcatgaatcctgaatcacttaactatgattatgtttga

SEQ ID NO: 291780 - DNA, 477 bp, Morganella morganii
gtgtcgcctgaacaagatccgatgactgggttcaaaactttggagttggcattctcacagggattcagaatgtctcgtataccctttatgaataatgtttattatacaaaggataaagcgggagggtcagatcgttatacttatgcagtattacataataatagagtcagacaaacagtagtgttaagtgaaaataagccattaaatggaataccttgcttttgcttattttatggcactcacgaagaattacgtgggactggtgttactattccatttatacaagaagttcttgagcaattcaaaaaaaatttaccacgtagatatcgcgagtattacgttgaaactattgtagatattgataatgctgcctcacttgcagttgccgaaaaattgtttggtgagcacgatcatgatgggaaagagcctggttatgataaagttacacgaatatggcaaaaaaaatattctcgctaa

SEQ ID NO: 291781 - DNA, 588 bp, Morganella morganii
atgcaaaggaacacatacaacaaagtaggtctatacatcctatctttagctatgctttttgtttttatcattatcctgacagccaaaatccccttttgcttcacttcggattgtagcttcataggtttaaagaaacttgtattaataaatattgtccctattgtttgctttgtattttttctatttagtatttatttttataaaagattaaaaaatataacaaaatacaatggacaagatagtattaaaataacatcatgtcaaagtgaaaactatgaaagcttaacattcttagcaacatatattgtaccttttatggggtttagttttgaagacatgcaaaagaatatagcatatcttttgcttgtagtagtaataggcattatttttattaaaacagacaagtattatgcgaacccaactttagctctgtttggatttaaactatacagggtaaatatactacacccaggaagcggagagacaaaaaatctgatagctatttcaaatgatgtattaaaagtggacgataatgtttattatagtttctttgatgaatttgtttttatagcaaggaaaaaagtatga

SEQ ID NO: 291782 - DNA, 189 bp, Morganella morganii
atgaaatgtgaatttatttgtctgacatatcaggctgtaagcaccataattaatgcaagaacattacaaagtgcagattttgataattcgtccattataataaatatagcaaatggtgaatcaatagaaatagataactctagcctaccagtttatagtattaatatgagtcagaaagaaactcagtga

SEQ ID NO: 291783 - DNA, 1206 bp, Morganella morganii
atgaccaattatatctgtgcatttaatcccatagatgcggcacttaaagacggtgctgtaactgtagcaatcactatttccgccaattccgagaagatggccagagcagtggccaccgtgatgctggaggaaacttatcctgaaaatacagggaagtttgatgtggcggcaccaataatctgcgaagctcaggcaggcaaaccagcaccggccggcgatagttttgatgaacattttgccaaagagtacgagttcaacggtaccgactggcagaaacgtgaagaagaaatggtagtgtttgcaaaaacggcaccagtcgttcgtattgcggcgatcatgctgtatgaaaaaacacaatttacccgcaatgagtaccgcaaagcggtcgattttgttcacgaaagtgatgaatacccgcagatccggaatattgcaaaaggtatcgcggccacacgcacggtttccctgctgaatgaacaggatttagaagcgctggtaaatactgttctggaaaaagctcaggatggtattaccgaagcagaagcacagaagctggcagaagaatacctgttccctgcagaaccggccaccgggcaactccctgtcccggagcaaaagcaacgtaattttgaacataattacgcgacactggatcaggaaatagccctcgcccttcttcccggtgattttgacccatgggaaattcagccgagcaaacttaccgcggcgaaaaagctgatcagtgatgaagatgaaagctggcggcgctggtctactgagttccgtattatcccgaccgcattgcagatcccgcgtgaaacagtctttgctgtcgtacgtgaagggaaagaattacctgacctgataagcgatgcggcagcccgtaaacagtttgtggctgaccgtatcggcataacgccggcagaaagcagtcatgaccaggaaacagtccggtccggtccggatattacggaagataaaccacccgtagcagcaaagcaggaaaagaccaagcgcacacgtactaaaaaagcagataaaccggcagagaaaccagctccggaagtagcggccaacgatgaaccggctaccatagcccaaacaccggaaaaggtatttcagatctcgatggaccactgtcagaaaaacagaaaatatcggggcataaaaatatcactcaaaccgcccggtatgacagaaaagtga

SEQ ID NO: 291784 - DNA, 612 bp, Morganella morganii
  misc_feature (551)..(560): n is a, c, g, or t
atgcagaagatcaaaaggggtaagagcttcgctggtgttgttcaatatgcattgaagccaagagcacatcataaaagtgatccagtcgtaatcgggggcaatatgctgggtgacacagcccatgaactgatcgcagaattcgatagcaccaagcatcttcgccaagatgtcgcaaaaccagtttggcacaactcgcttcgcttacctgatggtgaatcattatcgaatgaccaatgggtaatcatagctgacgactacatgaagaagatgggattcagtgatacccatctccgttgctatgtcttacataacgacgaaggccagcacatacacattatcgccagcagaatcgacatggccggtgggaagctttaccttggtaggaatgagaacctcataagtacccacataatcggtgaactcgaattcgctcatggtctgacagtgaccaagacagcctcttcaattgcaccaaagcaacctaagcggaaaagaatctctcgaaacgaacagatgctatcagaacggactggtgttccctgcctcaagannnnnnnnnntcccttcaacagatcattgataaaagtttggctgataaacctaaccttttaa

SEQ ID NO: 291785 - DNA, 264 bp, Morganella morganii
atgaaaatatcttcggtccttgctgttattatttccgtatttcttcttaatgcatgtagtagtgagccttcccaagatgatatttttaaagctatgcgaaaatggactggaagctatctgacctcagtaaaaaaagtagattgcacaaaagaatctgataaaagctataagtgtaatgtagtgatggatattaatggttcgaagcaagctggaacagttaaattaataaaatcagatgatggctggcaagtaggaagttattaa

SEQ ID NO: 291786 - DNA, 231 bp, Morganella morganii
atgacgatgttcagttctgtatacaaatgtctgacaagtaatcttttgcagaagttaaacaataaagaggcagttcttagggagctaaattctctcgtcaactatattgataacaatcaagaaaaaacagaagaaatttatgctgttgtaagaacacagtatgaagtgaaggtgttagagcaagaaatgttagattataaaagctcccaaaagggagcttcattttactaa

SEQ ID NO: 291787 - DNA, 198 bp, Morganella morganii
atggataaaaacaatatcaatccagagttttctctggaagaacaacttatcattataattgataaatatatctcaaaacggtaccagcccggagataaaagtttctcataccagctttacttaatttttgtgggataccatattgaaatatttctatccaagaaatgtatatgtacaatccagccgaagcatagataa

SEQ ID NO: 291788 - DNA, 372 bp, Morganella morganii
atgaacaaacgtgaatcaattgcagacaccgtcgtctcaatgttactcaccggaaaaattatctatcgtgaagatattaataaccttggtgaagatgccaattacatccttgattttataagaaacgtaaaattaatacctgttcaatgtaatcgagggaaagaaggttctgacccttactggtatatgactgataatgatattcagatgtataaaaaaaaccgcactgaacagcgggaacggcaaaaaaaggttgtaactattggtcaacgaaaaaggcaattaaaaagtgcccaagaattattgcgaagcctatcaattccagtacctgacaaacttcaggatgtaattaattcaactttttctcgctga

SEQ ID NO: 291789 - DNA, 285 bp, Morganella morganii
atggaaatcaacgtaacaccggaaattagttcaaaactaaccaataagcaccaagtgacaataaaagaagtcactgaatgcttttctaatattgatggtaagttattgaaagataacagagataaacataaaacaaatccacctactttttggtttatttctgaaacgaacaaaaaacggaaattgaaagtttgctttgttcagataggcaaggtttatcacgtaaagacagcgtatgaaccaaatgcagatgaactgcacatttatagaacgcacgcctactaa

SEQ ID NO: 291790 - DNA, 396 bp, Morganella morganii
atgagatacgcgcgtaatctggggttaattatgaaaaaaaatgccaatgaattcatacgtgatgcggatgcctgggataacagagaactgggtgcgtcaatcgaacacgttgaagtggcatctgatgaagaaatggcagcattcaatgatgcattatcacttcaagcgatatccattagacttcagaaaaaattaatagcagatctaaaatctattgctgataattataatgtaggctatcaaccaatgattagagatctcctccagcgattcgtaattgcagaaaaaaaacaaatgttgcaaattgaattaaacaaaataactgaagaagaaagcaaacaggaagatagccaagctattgatagttttatagaattgattagaaaagaagcataa

SEQ ID NO: 291791 - DNA, 933 bp, Morganella morganii
atgatagaaagagttggctgggacttagggaataaagtagccgctccagtattcaagcgaaatgaagatgatggtagttatttgatcagtcctgatacaggtgaacaacttatcgatagcgatttttcatctatattgactgacttcagaaatagcttatctgctgacgagatggactggattactgaaggaattacatctgaagtctgttcggctgaaggatggtctgtttcgattaaaaatgttcttgatgatgatttaaaaactttagacccgaagcgatactgtgaaaaatatgtatctttagtagatgctataaaacaagagagccatttctatctaacagatgcactagaaataatttcacaagggattaactccttaggtgagagaattaaaaaagaagattcgaaggtttataaatatatcgaaatacaagatattggatatggagattataagtataccgagatgaaaggatgggagcttccatccagggcaaaacatcacgtagaaccgggtgatatatatttaggttctgtatggggtagtgtaactaaatggttcatgtccgattctcgtttagaagatgcaattgtcactaatggttgctatagattacgtcctttatctggtgagtccgacaaattaattgacatagtcgcatttctatgtactgaagcttatgcagtacagatgagagcattagccagaggctcagatggtttagcagaagtccatgaaactgatctttctaaaatcgtagtcccgatagttacagataaaaaacttagaatagaaatcaaggaatatttgaattcattgcttgatggtcgccaaacactgtcttcagcagtccagttatggcaaagcaataatgctatatcattgccaaaagtatccaaaagacatcatcatgccgtattagtttaa

SEQ ID NO: 291792 - DNA, 267 bp, Morganella morganii; identical to SEQ ID NO: 279145

SEQ ID NO: 291793 - DNA, 2865 bp, Morganella morganii
atgttaccagacttagaaacactttttgtgaaaaaatgtaatgaccatgtgggtttaaagttactggctgcgcagtgggagtttgacaaacttttattggccaaagcccttcaaaatatacaggtcaatttttctcactatagtagacacgacgaatcacactctaaacaaatcttgattaatatcgaaagaatgttgggagagaaaacagagtgttttacagcaacagacttatggttgttattagaggcagcatatagccatgacatagggatggttattactcaaaagcaaatttatgaccttgatactaatgaatttaaaagttatgtagaagaattaacagaagattcagagggtgaactatatgagtttgctattaattggctttctgataatgcacaactaccacaaggtagcaaatcatataaatttatatataagtataaacaattaattgctgagtggtatagacgaaagcatagccagaattcatcaaggtatattaaaaacccagttgctgaaatcgggttaaattcaccaagaaatgaactgttacctaaacgattattcaatatattaggggatgtatgtgaaagtcatggccttccatttgaagatgttatgaagcttccatatacagaggcgggacttggtgttgatgattgtcatcccagatttatcgcctgtttattacgtatgggagatctgttagatgtcgatgaaaaccgtttttgtccgataatgatgaatatcagtggtaataatttacctgacagtagtattcttcattttgaaaaacaccagtcaatcaaacatttaaggattgactctgaaagaataaaaatagaagtggagtgtgctacaccagctgtttatgaaattgcatatgactggtttcgctgggttgaaactgagtatcatcgccaatctcaaaattggccaaaaatagttcctagcaaagagtttggtaaactcccatctttgtcgacaccattagttacagtgaaaaaaccgtatgttatcttgcatgaaggtgaaaaacctagcttcggtattaataaaaataaaacattaaatatgtttcgctctgctgggttatataatgaagaattcgactttgttcgggaagtgttgcagaatgcggttgatgcgacattaatagcaatgtggcaagattcaaagaaagaattaagtaatataagcccgtattccagtgaatttgatagaattttaagtaattatagtattgattctaattttgagaagagtaatggaaaaataaaagtatcgatacaagatcaaggtgttggtattagtagaactgagttggataatgtttttaatgtaggtggtggacagataaaaaccaataaaaataaaattatttctgaaatgccacaatggttaaaaccatcaggaaattttggtattggccttcagagcttatttattgtaacagactcatttaagataattacaaaaagcaaagagacacatgattgctatgagattgagtttttttcaaagtataacaaagggatagaaataaaaaaaataaataatgataacgtaatgtatggaacattagtcgagttttatattgatgaagtaaaatttccaaaatcgattagttatgatgatctttatggcaaaaaagataagtatgtgaaattatttaatgactatgatattactgatgatagttctgatttaggtgattatcaactattgaagttaattgaaggtgtgagtaaatttaataatttctctatgataaaggttaaaaataattatttatatgaaaacacaaacactgattgtgatttgtttgcgaattatttttctaaagaattaaatatttacttgggagatattgattttatagatagcctatcaggtaatatatctgactataccttttttaaaggtcagagatttagtggaattaatagaatattgccaatagtaacagggtatgttgattatcatggatataatgctattggttttttaagttataatagggataaaatattaaaatcagccataccaaatgctattgataatcttaatcaagcaatattagaatatattgatagtgaatttgactcaattagtgatgataaaaaaccattggcggcagcatattggtttattattaaccatgataagattgataatactaaagatatcaataagtataaaaaatacatcaattttatagataaattaagagtgaagtgtggatcagatagttacaatattaagtgttttagtgatgtatgtgaaaatatcagaaatcagaaggtgactgaaactgtagtatatatagataaatatagggagagattgccagagtcagataatggtactgtaatagaggttagtgatttggttcaaaaattattgaaacttattctaacaaaagaatctatttactgggtatcaaaaaattacaacccagaaattttgcgagagcatgcgatgtggagcaatagtgataatatacctctggagaaagatagaggtatacatatattttctggaaaggatggcaagcctattattggtaatagaataatattcccatgctggggggaatatagaaagttaagtattagtattaatgctcaatgggcaagaataattgaacatgaacaaaatgatgctagatatatgattttgccacttaaggtaaattgtgaaaataaattgtcaaaagatactagcgatgaattaattgagtggatatatagttcgttagttgaaaaaataacaaaagatgagataagggatttaatagaatcactgtatttgaaaataagagaatattattgccttgagattgacgctgataattga

SEQ ID NO: 291794 - DNA, 450 bp, Morganella morganii
atgatgaatatagaaaatgaatttatagttagtcgctacaaatatataattgaaaaaataaataaactggatgagcagtatagagataatacaaatttagcttacaaaatttcattatctctattaactttcattatattatcaaaattatctttttcagaaggaaaaataaacttcttaacgcttgaacttgcaataaaatcagcagctataatagctattatatttttcgtgtatttgacattgctatcaatatgtcacctattatcatggtttgattttagacaggaagaatgtgaattatttgaaaggatgaatttgagtgaattaagaaataagccaacttggaaaaacatttataggtggagtgagttatacttcatagtactgtgtattactatcgcagcaataggtttatatttatttttttcacctaattttattttataa

SEQ ID NO: 291795 - DNA, 1737 bp, Morganella morganii
atgagcttcttaaagaaattacttggcaaaggtttttttccaatacaattacctcctaattttacatcatcttcttttggtgaaaagtataaagagattagtaatggtatttcaaaaataattaaagataataataaaataaatccacaaaaagagtggacgaaaattgataaatatagtgtttctcgaacttctttttatagaagaacaactagtatattaaatcctataagctattttgttttagctaaattaatttcagataattgggacgaaattaattcattttatgagaatagctctctaagcttgagtaagccatcaatagatgacgagtctttaagagcaatatcaattacaaagtttaatcaattatatgaaagaaagataattgattcagctggttataagtatgctttggtaacagacgtttctagttatttcccttccatatacacacattctatcccgtgggcattatatggaaaaatcaattcaaaagctaatttaagaaataaaaataaaaataaaaatcttggtgacgaaattgatttatattgccgaaatattcaagatgggcaaacaatcgggcttccaataggaagcgatacctcgcatattatttctgaaattattggaactgctattgactgcgagttaaaatctaaattaggttcaaatcttagagggtttagatatgtagatgatttctttttatttttcaaagaaagagtagcggcagaaaaagccttggcggcattaacagcgattattaatagttatgaacttgaaataaatgcatctaaaacgaaaatcatagaaacaaaagatctaatagaggagtcttggcgttatagtttgaaaaataaaactatctcacatgaaataaaaaaacaaaaaaatgatatacataattatttttcttctgtttttagtctggagagggaatataaagatgaaagtattgcaaaatatgcattaaagcaattaagttcgagtataattaaaaagaataactgggatataactgaatcatacttgttgaaagtagcatatacatttccaaacactattgaaattgtctctaggtttttagttacttacaattcatacggctatgagattaataaacataatataagagttttcattaaaagtctaatagctgatcacttaaattcatcacaccataatgaagtgtgttggttactttggctttctaaagaactgaatatacgactgtctaaggtgactgctaatcggatatttgagatggatagtaatccatgtattttaattttattagatatgtataatcgagacttggtaaataaaggatttaaattaactgataaattagataaatataaatctaaggatggtttaactaattcaaattggcttgtttcttatgagggagggaggaggaagtggctcggtaataaaaattttaaattcattgaagaaaataaagcatttaaattattactagatgagaatgtttcattctatgatgaaaatataaaaccaccaatgttgttcaacataaaaaatgaaaccaacaatactactttaaatatagataagttatttaatggtgatgaagatattacggataagtttcaattcaatgatttggatgatgaatacttcgataatactgattcagatgatacatttttcgacgatgatgatgaagatgaacaaagagagattgatatgcatagtgaatattaa

SEQ ID NO: 291796 - DNA, 309 bp, Morganella morganii
atgactgaatacgttaataaaacatcggcggttgttgaactggatgaacccatcaaacgcggtgataccgagataaccagtgtcactgtccgcaagccgaactccggtgcattgcgtggtgtccgcttacaggcactgatggaaatggatgttaactccatgacagaggtattaccacgcatcactgacccgtcactgacgaagccggaaataggtgcgatgccgccgggtgacctgctcaatatgtcaatcgaggtggttaattttttgctgccgaagtcgatgcaggccgattaccggaacgattaa

SEQ ID NO: 291797 - DNA, 777 bp, Morganella morganii
atggaatggtttacacgaatgattctagatttacccccacgaactaaagacataaaagaattaagagaaagtgcccctgaattgttctcaaataaaaagcgcgaagatatcacagagcattctgaagtgttctttcatcctttctattggaatgcacaagaacttaaggaagcaattcacgattggcttcaaaggtttgaagcccgtgtaacagatacatctgaatacggagcctgcgaccatccgaattgcccacggaatagagaaggatgtaacgccaacaaccatatgcaactgatgacagttgcaggtggaaaaggccataatccgccagccaaatcattttttgacttgatcgacaaaacaaagagaaaaagtgcaatagtgcaacaagtaattttgacagatccctacatctattcagacattggacaaaatggcgaaggaggtggatttgataatttgttaaagcttttggagcatctgaatattcttgatacaacaccatttgaacttaagcttacaccgcaaagcgaccttcaaaaaaaagatatttttgaaaaagaaatccagaaaaaatttcctttatgttcagtcctgaatcatcgaaatacatcaacgtttcacgatagatttattttagttaagtactgcaatggagataaaaaggcttggtatgggccatcccttaatggtttaaatagtgattcaataataatatttggagatctcaccgatgttaataccgttgttcaactagaacaacgattgttataa

SEQ ID NO: 291798 - DNA, 1314 bp, Morganella morganii
atgaaattcataaatgatatttacacatcaataacagggaatgcaaaggcaaggataaatgaccaatttattggtgcttttgtatgttcttggatcatatttaattggaatcacatatctttacttttttggggggaaggaaaagcctttgagcgaattaatgtttttcatagttatctgactgaaactaaaataatcgcatggaattcattgtttatttttccattaattatggcttctttttatctgtttatttttccatggatttctttttttattaattttactcagcgcagggcaaatgaaaaattacataaacaagctattaatactgagttaactaaaatcgaaaatcaacaaaaacttaataaagaaaaattaaaatcaaatcccaacaagccgtttttggcacaattagtacaacaagatattgaaaagcgaaatgtgataataacacatatggagctaagaacctcacgtttacaagataaaaacaatagagaaaaagataaagcaagagaacaagagctaaaaacactagaggcagagaacgcagaaaaaatatcaagacttgaaatagaaaaaagaaaaaaacaatctgtgatagaaaagattaaatttgaaaatgatagtgctaaagccagggctgcgcaagcttctaacagattcccgtccgcgtattactttttgataaaaataaatgagtactttagtgaaagcaatataaaaatatctctcaactccttaagtttaattatttcctcactttttggttatgaagattttgaggagctacttaatgacaaaaacttcaacaatgaaacattagggaaagtcaaatatatatattacgatgatgaattagctaaaagatttgaacaaatagtatcagaagaggattcggatgatacagagctttcggccaacattatatttgagtgtattgaaatactatttgacgacatgccttataaattaatatctggtgataatcttgctgaagagtgtagagaagaatttgaaagaagcccttacggtatttttgatgatgatggagtttcaggtgctattgctgaatcgaatacaacttttgaagaagtagacgatattaatattgaagattttaattttaacaatggtttttatgctgatctatctgcttatgcaagtggttatcattatcgagaggaaggtgttcctggtcgcactatgagtatttcaattactatgcaatgtgaggtattagttggtaaatttgggcttggttcaatcgaacaagggaaagtcagtggaactttagatgaatttgactaa

SEQ ID NO: 291799 - DNA, 924 bp, Morganella morganii
atgtcattctataaatacatgtctgctgagacgggtgagaaagtaattaaaaacagcacacttcgatggtcaagccccagtactttcaacgacattgatgaatgtcaactatcaccttttactcatagtgatttcattttggcagtaaaaaccgtgaatgaaattttacttaactgtgcgaatggccatttaatttacaactatcataactttgcggaggtaaacaaacaaataatagcattaatacacataagtaaaaataaaaaaaattcagaagaaaatatttcaaaccaaacaatgactgaattaattacaaatacattcaataatacggaagattattttagggattatataaataaatctattttaaattgctcccgcgtactgtgtgtaacctcagattatgataacactctcatgtgggcacactatgcggatcaacatcgaggctgcgtctttgaatttgaaaatttatatgagacaactcctggaaaacttcatcaagggaacgtccaatatataaaagagcttaaaagctcgactagtgcaattgaacttttgttatatggtgaaactgaaacgatcaacaaagctcttataaaagatgtattcttctctaaaaaattagaatggagctatgaaaaagaatatagattattatttcatgaaaatttaggtgtaattactgcaagagtaaacctacaaacccatgaaaaaacattttctaccacaggacaatcagggcaattatatactgacgtaccatttataccggaatcgatactttcaatcacatttggaatgaaaaccaatccagatatgattgataaaattacttctatcgcaagagataaaaaccaaaagtgtaaattttttcagatgaaaagatctaataattctataatacgtcaaagtatttaa

SEQ ID NO: 291800 - DNA, 213 bp, Morganella morganii
gtgataaacgataccaaagcggaatcgctggaaaatgccggactgtattacagagcagcgcggcggtggttggaggtgttcgaccgctgtcaggatgaacagagacgcaattacgcaatagaacagcgtgaaagatgccttattctggcaggtaatccggcagaagcaaaagcgcggcgcaagcggggatacaaagcccgtcaccgcctgtag

SEQ ID NO: 291801 - DNA, 804 bp, Morganella morganii
atggaaaatttaaaaagtggctttaatgccaccagccaaactcaccctaaatttgagttggaagatattacagcaactacgttcgctgagtcattgcctattatccaaaatgaaattaatggacagttaattaactgtattaatgccagctcattgcatgaattattaggcgtaaatacgcgattaactgactggattaaacgccgtattaatgaatatggttttatccatggggtagattactttattgtagaaactttgagcgactcaaatttgagtagcgcaaaatccagacagcaaattaaacatgattaccttgttagtcttaacatgagtaaagaattatctatggtggagcgtaccgaacaaggtcggttaatccgtcagtatttcattaagtgcgaagaagcattaagcaaagcagcacccgcaattacccggcagtaccgtgcggaactgaaatcacgcctgaaagttgccagctatttccagccgatgtgtaccgctctggagattgcccgaatggaacagggcaaaaacactttgccgcgtcactataccaacgaagccaatatgctgaaccggattgtcctcggcggtctgacggcgaaagcatgggcgcagcagcagggcattatcggtaatccccgtgatgcgatgagcgagacgcaactggagcacctttcgtatctggagcagaccaacacaacgctgattgagctgggtatggactaccacgggcgcaaggacaaactgaccggactgtctcagaagtggttagcgcagcgggtaggggcgaactga

SEQ ID NO: 291802 - DNA, 1059 bp, Morganella morganii
atggcaaaaactatatcagtctttaataacaaaggtggtgttggtaaaactactataatttggaatctcgctgtatcgctcgcagataaaggaaaaaatgttttattaatcgactttgatccacaatgtaatctctcgattgcctgtattggtgaccaagagttctctgagctattagttgcttctgatgattttccttttggaaaaacagtaaaagcatttgcattaccctacatacaacaaaatactattggtgaagtgtatacaactgaaccaaagactaagacagatgctggaactttgcatattgttcctggcgatttttggctcaatacattttccgatattttaaacgttggtactgatgttataagtggtgcaggtttatatcgttttattttacctgcattaataactgaaaaagcatcagaaaaaaatgaaattgattatgactatgtcctaatagacttgccaccttcatttaatactcttgtcaggtcatcattatactgctcagattacttcttagttccatgtacacctgatttattctcttcatattgtgtaggattgattggagagatgttgccatcatttatacgtgattgggagcagggtaaggaaagatatctagccagtaatcctcgtgatagtgttgtgtctcgtaaaggaatgcctaaatttggtggctggatattcaatggttttgatacaagaaagcaaaatggtatcaaacaagaggttggcgcagacgcagttcatcatcgttcaataagaaaagctattgaagaaaacatgaccccccaactttcccgaattacatcttacaacgctgttcctaattttactgattatgagcctgtaggaaaaattgaagatctcaacgttatggctcctgacagtattattcaaaatatacctattcgctatctgtcacgagtcagacctacccatgctcttcgcggaagaggacaatgggcagttaatcaagttgaacttatgaatgagatggctgatgaatatgataatttggctgatcacataatgaataacttttaa

SEQ ID NO: 291803 - DNA, 552 bp, Morganella morganii
atgaattggaaggttttatacgacttgtataatggtttattaggtaaatgccttatatttattgcgttaagcacaccagtttcgatcttagtgagaaatacagggatatatccaaaatcatttattattagtttgattggtgcaatcattattctcttaggctatgtagcttgtcaaatatctactcctgcaataataaaaaaattttccgattcacatacttatagtgaatatcttataaaaatagaaaaaaatgttactttaagtatagagttttcggtattggatgatgttaaaaataaattaccaacttgccatgatgatatatctcttgataaatttgagtttgtttctgttgaggatacaaagaataggtgtaattttgaaaaatcaataaggattttgtcttttataaaatatgcatatttttcacaagtaaatttttggctaagagtaattttaacagtgactatggctatcggttcaatttttatatttttcccaaccttatataatatctatacaattctcggagttgtcagtaatgtttaa

SEQ ID NO: 291804 - DNA, 210 bp, Morganella morganii; identical to SEQ ID NO: 282685

SEQ ID NO: 291805 - DNA, 297 bp, Morganella morganii
atgagcgagacaacatataagacagcctcatggggtgaagtaaaggcagatatctattctggtgaatcctgcaatgaacatcgcccatttgttgaggttttgtgtgatggtgacatggattcatgtattgaagataaagttacattcagcgcgagtcgctggccggttggtacgaaaattaccgtcgaagttccgtgttgtccagcctgcggtttagatgctgagtatcaggataaagctggaagatgcgaatgcggcttcgactggaaagaatgggctgaaaataagtattcatga

SEQ ID NO: 291806 - DNA, 273 bp, Morganella morganii
atgacacttgcgctccggatggggcgcacagtggatgaactgaccaggacgatgagcgccagcgaaatgaccttatggatggcttttgaccgtctcagtccgatcggtgacatccgcagtgacatacagacggcccatattgtctcctcactgcacggcgcacagggcggcaaactcagcctgaatgatgcgatgctgaaatggggcgctcaggatgagagaccgcccggtgacagtctggaagagtttctcggatctatttctgaacattga

SEQ ID NO: 291807 - DNA, 336 bp, Morganella morganii
atgaaagaatctgatttgttttctttacttgccccggtgctgcccggcaaagttttcccgtatgtggctccgcaggatgagccaaaaattcagccgccgtggtgtattttttcactttatgatgtcatcggtgatgtgatgtgcggccgtgctgagacgatgactaatattcagattgatgtgtatgcaaaaaccatcgatgaagcccgcaaaatccgtgatctgtctgttgctgctatttctccgctttcaccggcggagttcacagagaagcaggggtatgaagcagatactgcgctttaccgggccacgctggagtgtcaggtctggcaataa

SEQ ID NO: 291808 - DNA, 705 bp, Morganella morganii; identical to SEQ ID NO: 289649

SEQ ID NO: 291809 - DNA, 201 bp, Morganella morganii
gtgctgtgcggtcgtgctgagacaatgaccaatatccagattgatgtgtatgcaaaaaccatcgatgaagcccgccggatccgtgaactgtctgttgctgctgtttctccgctttcaccggcagagtttacagaaaagcagggctatgaagcggatacctcgctttaccgggccacgctggagtgtcaggtctggcaataa

SEQ ID NO: 291810 - DNA, 273 bp, Morganella morganii
atgacactggcgctccggatggggcgcacagtggatgaactgaccagaacgatgagcgccggtgagctgaccatgtggatggcttttgaccgcctcagcccgatcggggacatccgcagtgacatacagacggcccatattgtctcatcactgtacggcgcacagggcggcaaactcagcctgaatgatgcgatgctgacatggggcgctcaggatgagagaccgcccggtgacagtctggaagagtttctcggatctatttctgaacattga

SEQ ID NO: 291811 - DNA, 582 bp, Morganella morganii
atgaccacgatgaatatttccgactatgcgaagcatgcggatgtgaaccgtaagacgatcacccggtggataaaggccggaaaatatatcgtgatggccggggatgaaatcgacgtggaggccagtgaccggaatctgaaaaagtaccgggacagcaaagatccgcgcacgaagaatgcggtgaaaaaatctgatgctcaggagaagaaaccggcgaaagaaaaaggcgattttcagcagcgcgccgaatctgtttatgcccgactggtttccggtgaaatagccgttcgtccgctggaagaatccagggccatcaaagagcactactttgctgagctggcccggctggagtacgaaaaggaatccggacaggtgctgccgtggcaggacatgatcgacaaggtgggcgaggagtatcacgccatgcgtacccgcctgattgcgatagcccctgaacacggaccccgcctgcggtcgctggcactgacttcctctgatacagagtttgtggccgcgctgcaggatatcattcatgaggcgatggaggaattgagccttgaccacagtgaacaggggggataa

SEQ ID NO: 291812 - DNA, 252 bp, Morganella morganii
gtgaacacagaatccggcgaaggtatcgattttaaaggcgagcaatcacaggagcgtgacgttacacctgcaggagaaaaccagctgcaggatatcgctgatctgatgattaaagttgatggtgaatggagcgatacattccttgcgttcatcagcaaaaaattcaaccgccctatctcccacccggaacagctcaccgtatttgaggctaacaccatcatcgacatgctcaggaaaaaggcaggcgaataa

SEQ ID NO: 291813 - DNA, 252 bp, Morganella morganii
gtgaacacggaatccggcgaaggtatcgattttaaaggtgagcaatcacaggagcgtgatgttacaccggcaggagaaaaccaactacaggatatcgccgatctgatgattaaggttgatggcgactggagcgatacattcctcgcattcatcagtaaaaaattcaaccgccctatcgcccacccggaacagctcaccgtatttgaggctaacaccatcatcgatatgctcaggaaaaaggcaggcgaataa

SEQ ID NO: 291814 - DNA, 780 bp, Morganella morganii
atgaatccggcacccgaagataaaacacaagaaatcttagacacattaagagtccatattgatagtggtcacaaaatagatcaatttacatatgtacgcttaatgcatgaaatcaaaaagttaccaaatttggttgctgaggttacttttattgggctgctgtatggggcaaatcatgaatatgaaaaagcgaataaatattttaaggaagtactagaaaactatcatcatacttttttggcgaccaattatctggcttacctggctaggtcagggcaaaattttttacataccattgagtcgttgcgcttagctgattcttatcccaatgagagaagtcttcaaatactggctataggtacagcctacctaatgggagatgagaagaaattagccactctaattgatcgagcaacatccttatctagcgatgaactcaggcctgaaatggaaggagtttctatgtggatagataacatcaaagagttcaggcgtacatcgggcttgtgtgaagaagagctgctggctttaacaaaaataatgtgtgatgtggccacaaagtacagacagacgatagtttatactcgctattacgcagatccctatggctgggatagtgcttatgttagtgaagttttgaatgatgatcctgatgctatttcagatatgaatatcgatttagcaattgaaattgcagagtccggactgcttgatgaaaaaaaagcgacagcctggttcaggtcattagataaggaactgaaaaagagtatttatcaatga

SEQ ID NO: 291815 - DNA, 258 bp, Morganella morganii
atgaaaaattgtccgcccacctcacatcaaggtgtagccgaatacttgcagcataatgcatggaaaggaaatgaaccatatagcaaatcagacctgagagtgctgggtattgttttgcaacagcagcacagcaaaagaaaatggtcagactatgatttagtgagaaatatcactgaaaatgatgctcttgagagcataaagactgtccaaaaaatgatggataagctcagtgatatgaaaaaaatgtgttgcgaataa

SEQ ID NO: 291816 - DNA, 525 bp, Morganella morganii
atgaaaagggtaattactgtattgctcaacggctgggtgtgggctgtcgttttcttcgggttgtggatgttcagcctgttagcagctgagaaatcagaagggcagcgaaaagacgatgtaatcgccgatcggcagaaagtgattgataacgcttacaccagcatcgacatctttgaccgcgtggccgccgcgaacgccaaccgcaatatgcgcaccgaggcgcaatcacaggagaagcagattgaataccgcaccatcatccggaaagaacctacctgtaatctgtatattcctcagcctgtttctgatgggctgctcagccacgtctacgccatccgtgagtcagcaatgcgttccgctcccaccatcactgacacaaccggtactggcaccgctgccacccgccgactgacatattgccaggcggttgaatggatagagccgctgctgatggcactggataaggcgaacgggcagttaattgatatccgcatggcggatgtggagaggactgttgagcggtag

SEQ ID NO: 291817 - DNA, 498 bp, Morganella morganii
atggtatgtttactgctatattttaattttaaatcgacctgtgaaggtggattttcatggattggttatatgtcagagcttcctacagaaaaagatgacttgggtgatgagttaggcgattggcctgatttctacccttcaaatgttcctccaaaaactgcctctgatgcagaaggtgaactctttaggcttgtcttatgtaacccaccagagcctgcttgctttgcttcaacatacgaagaaacaccagaaaggctacaaacgtgcaaaactagagaacaaaaagaatgcgtgtatggaacctcctttttcaatagttttgagggggcaaggaataatcaagaaaaattcccacaagctttagggaacaaaaaaatagctaaaggaatgctggtagcacaaatgggaaaaatgaagcaaacatttcagaatccagctcattttactatttggctaagagtgaattcaaatattcataaaaattttgaatgtgtataa

SEQ ID NO: 291818 - DNA, 1284 bp, Morganella morganii
atgaaaaatatatttatttctcataagttgcttgggaatttagtgattcgcaatgtttatgaattttatgacgaacctcgtcttttttctgtagcaaatgaagtttcatcaatatatttagtatattgggttggagatactagcaaccactctagttggtttattattccaatatcgccaaacaaactggaaatgttagaaaggaaaaaggttgatatatattctgccttaaccgaccaagagcagtccttcttttatactgcagatatatattatgataatacagctgcggatgtgaaaataaaagaaactcaagatgtatatgatatagcacttcctaaaaaatggctttttattagctcagttgttccaatgatggaaaatggttgcttgggtcagccatttgaatactcaacacatgaaattcatgtggaaaaaagcactaaaaaaagtattttagatttaaatcatgtgtctagcgtttgcgatgcatttgattccttctatcagcatatgattaaatctcatgaaataaaagataaaataagacctgtatcagctagaccaggatcttttatattagcattccaatcgggtaagttatcagaatttgaatctactctgaatagattttataatttaattttaaatagaaaagacattaaaggattcatggtagacaatggattggattttcagtctttcttttatttgttaaatagcattatagaaaccggaactaattttgaattaaaaaacacaaatactgatgaggttgtgtttgacttgacaaaatctgctgctgatttttatttaaatgatataagacgaagtgctaacacctccgtgagtggggatcaagtaccacaggctgatatacttgaaactgtgtttaaagtcgtcgaaattaaatggtcggatataaacttagatactaataatacagggttgagtgaacgacatatatattattatcttcatgcttctagaatattaggattgattgataagcatagaaatgtaactgtttcaggccagcagttaattgaagctgatgatgctacaaaattaaagatagctgcaaagaactttgagcgtagtcattgcgcttgggcttggatacagtgggctgaggttagaaatttatcagaattagacccatcttcagctgaagattttttgaagcaacaatgttttacgcttagtaatgagacgttaatacggagagccagaacattaaggcattggtgtacgcaattaaaggagcactatatatcgtattaa

SEQ ID NO: 291819 - DNA, 1590 bp, Morganella morganii
atgataccaatcaaagagttaacccttggttatgctgatgctgagaattataagagaagagaaaacaaagaattacttaataaagtatttatacgtgatagtcatctctcaaaactatgtgagccaaatatttcattccttgtaggggagaaaggtacaggtaaaacggcatactctatctatctttcaaataacaatattaaccatacactagcttcaactaaatacataagagagactgagtaccaaaagtttatcgcacttaaaactgagaaacacttgaatctctctgatttttcagctatttggaaggttatattatatttgttaatatcaaaacaggtattagataaagagggaacgatttcaaaattattaaactatacaaaattttcagcactcactaatgcaatagacgaatattatcttaaggcattctcgccagaaataattcaagccctcagttttgttcaagattcaaaaattgccgctgaattactttgtaagcatgcagccctaaaaggggaacaaaaagaatcattatctttttctgaaagtagatttcaaataaatttattttatatacaaaaaaagtttgaagaggcttttagccaaattcgtttgtctcaaaaccatattttatttattgatggtatcgatatcagaccttcttcaatcccgtatgatgattatttagagtgtattaaaggattagctcacgctgtttgggaaataaataatgatttcttcccaagtataaagggaggtaaaggtagaatgaaggcagttctattaatcagaccagatatttttgagtccattgggttacagaatcaaaatgccaaaattcgagataattcagtttttctagactggcggacagaatatactaatcaccgtagttctcaactatttgaagtgctagatcacatgcttgggactcaacaaagtatggcacttaaaaaagggcaatcttgggatcactattttccttggaattctcctaatgttcacgatagctatagtcatcctacgtcatttattaattttcttcggtggtcttattatcggccacgagatatattacgaatgctagaaattctaaaatcacacattaatgatgatgatgatgacaaaaatagtttttctctaaatgactttgaaaatccaagtgtgcaaagagattactctaattatttacttggggaaataaaagatcatttatcattttattatggaagtgagcattatgagatttttttaaagttctttgagtttctttcaggaaaagatactttcgagtattctgaataccttttggcatataagcaatttgaaggtcatattagctctatttccactaaaaaaccaaagtttatgacaacagcaaacgactttcttcaatttctttttggtctcaatataatatgctacatagaaacaacagaagataataatagatttatccgctggtgctttagagaaagaagttatgcaaatatttcaccaaaagtaaaaacaggcatgaaatatcagatattttatggtcttgcaaaatctttaaatgttggaaaaattttaaaaaaatag

SEQ ID NO: 291820 - DNA, 1332 bp, Morganella morganii
atgaattggaatttaaggcagttatcatgtgatttttgtaaaacaaacttcaattgtagcgtaggattgtcgaataaaaatacagcacagacctttagtttttgctgtcctagctgtagtgggattctttcaattgaaatagacccttgtagaaaatctaattatacattaatcaatatttcgtataatgaaaaattcaatggaagcgttttgaatttaaaaacaataaagttacatttagattttcctactataattacagatggtcttaatattttttctccatatattctcgcatgtcttagtttaaaagataatagtaatattgaacattttaaaatggtaactgatgatctaaatttttatagtgaaaatattttaaaacttaaaagttttttcgctttttacaaaaataaaagactaaaagagctattaggtttgtcgaaatttttattacgtgatgaatttgaaagtataataaaattagatgacgactatataaacagcatttcgatatttgattatataactacccgtgagattgatattatcttctataagactttatttggcatatcaagagctttaaataaaggtaataatcctgatgatgaaataaaagatatttctttatacttatcaaatcttagcaaagagaaactttgtgaatttcgttcatatttatccaaaaatgaacatttaagaaatgcaatcaatacatccaataaaatatatgaaaatatttattcaaacgaggaattttttagacctgctattttcttgtttgattatagtgttatggggtataaagacaggaaatctccgcttagattggtaagtgaaaaaattgatgtgattcttggtgtgtataaagatattgttgaaacaatatcaaaacaatatactttaatagtaggtctgaggaatttgaaggataatggtgactatgatagattttcaaaaagcacaataaatcttgggaagaaaagaataaccattaataatatagttgacttttctaatcttgattttggattgaaatctagattcatggaagggtgctgttattataatgacgctaaaaaaatatcacataaaattagaaatgctatagcgcataataactgggaatataatgaactaacccaagatgttactttttattatgataaaggtatagttgatgaactagaaaatgtgaagtcagaaagaaaaacaatattggaaataaatagagatatagttatattgttcaggttgatgcataaactaaatattttctattatttatttaattgctattggggagttgaggattggaatgagcaataa

SEQ ID NO: 291821 - DNA, 375 bp, Morganella morganii
gtgaaaaaaaactttgcttacaggaaaaataactgttttcccctatcgctatttttagcttacatctatttaatattctgggcggtaccttatgatgtttatgcgtcacaatccgatgaagcagaatttgattccagctttttacaacatgctcagggaagaccaataattgacgtaaggcgctttagttataataaccccatccctgcaggtcaatattattctgatatttacctcaacggagaaaaaaaaggccaaactaatttatatttttccgatgcatctaaatcaggttcggcgacactttgtgccacaccggaatttatttcaactctcgatttaaccgcagatatattaaaagaatatgaaaactag

SEQ ID NO: 291822 - DNA, 456 bp, Morganella morganii
atgcgcataataattattgaagatgagcatgacaaacgcaagaatataaaaactgaagttgtacgcatagttggtgattcagctgatattcttgaagaggagtctcttcgaggaggtctgaaaactatacttactacaataaaaattgatcttatattgttagatatgagcatgcctagttttgacataactaatgaaacaagcagtgaagatcctgagagctttgctggctatgagataatggctcaaatgaagctccgtaatataaatattcccgttttaattataactcaatataaatcattcgaaaaaggaagtgtaagtgtcgaagagctaattgaaaaaatgaaatttaattataacgatttttttaaaggtactatttattataattcttcattggaagaatggaaaaaacaactttttgaccatatgaaatcattaggaataatataa

SEQ ID NO: 291823 - DNA, 1371 bp, Morganella morganii
atgaaaacaaaatcactctttcttctgataccgttattactctcaggttgtgaccagacggtggtaaaagagatcggcattgaagaattgtcggagaacctgaacaatccggaatacattattatcgatacccggccggacagtttatatttcggttttaaagataaaggcgcggcccgcggcggccatattaaaggtgcgatgcagtttactaccggctggctggattttatcgatgagaataaatttgatacgtttgtcgaagaaaaggggatttccaaagaaaaaaccctggtattttacgacagtgacccggattcactggaacgtattactgctgaatttgctgccaaaggttttcaggtcagggcatttaaatcctttatccagtacagcaattctgatctgccgatggataaatacccgaattactttctgagtgtttctcccgcctgggttcaggccgcactgaacggtgaaaaaccggaaagttataccagtgatcaaaaaccggtgatatttgaagtgtcgtggggggatgcggagcaatcaaaatcctatgcaacgcatattaaaggtgctttccattttaataccgactggatagaaaatgcgccggtctggaatttatccgaacctgacgttatcaaaaataatctgctgaaaaacgggatccgcaaagataccccggttgtcgtctattctgaaaatcagatggcagcattgcgggtattatgggcactgaaatgggcgggtgttgaggatgtccgtttcctgaacggcggtttaaatgtctggactgatgcggaattaccaacggaaaccaccctgaatattccggtaccggttgcggattttggtgcggaaattccggttaatccgcaggtcactattgccatgccggcagaagccatacagggtcagaaatccggccttaaacttatcagcaaccggacatgggatgaacataccggcaaaatctccggttatgactatattccgcgcaaaggtgaaccggccggggcaatatggggattcggcggtaaaaattcgaatgatatgtccgattactatgacccggacgggacattacgtaatccggaagagatttttgctttatggaaaacgcagggtattgaaccgacagaccaggtcgcgttttactgcggcaccggctggcgggcaagtgtttcctggtttatgacccaactggcgggctgggaaaacagccggatttatgacggcggctggaatgcctggcagatggatccgacattaccggtattaaataatattcagagccaaaaaccggcagcactgaatgattatggtgaaataatcaaaaaaccgggacaatcctgtaaaagctga

SEQ ID NO: 291824 - DNA, 1605 bp, Morganella morganii
atggatgcagtagagttaatattctgtaaatcaattaattactttgattatacttcagttaacccaaagaaaaccaattacatattaatatcgccaagtgacgataattttaatgactttgggaaaatcacctcggttttaatacgtgcacaatttgaatatgataaggttgagttccgtacaaaactagcaattctcgacgtaaaagaaagcaatcaagagcttactctagtagagtattttaataaaacaaataataatgatagtctaatatatccaaatgatgatatactttatttttcgcaatgccagtccctagagacttacagatatttgcatcgatgtattggaaaagaaaagtcagacatcattctgactaaaattaatgatctgagcactatacggaataagaaaaagtatctaaataaatttaggctatttattaaaagcaaaatatttcaaacatccttaataaggacctcggagagttattacgctttcaaaaactcaaattttataagtagtgaaatagaatcacaagaaataaaaaataatgaattagaattctcgattgatattgatgatggagagtcaaataggataaatcttggctttaatttttcttataaaaaaaaccaccctcgaaacataataactattattggcagtaatggtaacgggaaaagtaggacgttaagtaatattgcaaaaatggctctgagtggctctagatcttatggggatagaatagaagtaaaccggattttattattcgcacctagacatgagttgcgctcattcccatccgaacattggaaaaatccggcaacgtactatagaacatttccaacaacaagatcatatcaaacgcgaagtaaaaaaaccacaactgaaaccattttagacattgtccgaagcgaagaaactattgctggcaggtcacgatgggaaattttctctcaatctttgaatgggctaactaatcacggtgaaatttatctaaaaggaagttcacccaagaaatattattctcttaaattcttaaacgatcaaaaagaaaataatagcctcctggattggggtactattcaagaagatcttgaaccaattcgacttattcaaggtaatgagtttaaattaagtagtggtgagattagctttctaaaaataatcaccaatatgacgatgcacatcgagaatgggagtctcttactgatagatgagcccgaaactcatttacatcctaacttcatagcgctaataatgtctgctttacataaaatattgacagccacaggctcatattcaataatatcaacacactctgtttatattgtacgagaggtccctcaagaccaagtaattattttagagagggatgaaaaaaacaatgttgtccaaaaaacaacaggaatgactacattaggtgcaaacttaggttcattatcatcatttatatttggagaaaatagtcgctctaagcttgttaatgaaatagccgaaaaggtaattagagaacacagatcttttgaagaaattgagggcttatatagagattctttttcaattgaaatgctttcacttataagaggcatgatgaaatga

SEQ ID NO: 291825 - DNA, 861 bp, Morganella morganii
atgaagtatttcaatcaacctcttgaaaatgacatagataaaatcacagaaattgcgaatgcaaattattccggttcaaagctgattgaaaataatctgaaaactttcaccgagagatataaagagtattattcatgcaaaggtgctgcgttaagtattaatggtatgcttggactaaatgacgcaagagaaagcataaaaaagttatacaagagcaaaggaaaacaattatctttcataaaagaattgcgagataaaaatacaggaaaatgttgttcaatgtgtggggccaatttaagtacccaaatagatcattttcttccccaagaattttttccggaatattctatattaagtgctaatttaattccgatttgcaaatgcaatcaaaaaaaaggaaaatttactataggggataatattgacgaaatattattacaccctaggtatgaaaaaaaactttccaagcggattatcacggctaaaataagaaaccatgatggtgcaattgaaatatatcttgaattcaatcctccaaagaaaatatcgaatgctaaaggcttagcttttcattatgaaaagattgttgactctgatttattgattactactatcagagagcggttttatgaaatgaagcgcgcaccaagttcggtagtatatactcttgcagatcggatcaatagtccgcaagaactgaggaatattctattttcccacctacggtcatttgataagcgacatcaaagtcaaaataattgggagtccatatttattcatgcattacttgagaaaagaacttttaattggatatggagaaaaatatcagcgcccgaccgaaagtatgatgaatctttttaa

SEQ ID NO: 291826 - DNA, 4128 bp, Morganella morganii
atgaatattgatttcagtttaattcgtagcgcccccaaaagccgtaacgatagctttgaagcactcgccgtacagttatttaggaaaacctgtcgagtaccgacaaattcaacatttattagtctgcgtggagatggtggagacggtggcgttgaggcatatttccgctcaccggacggtgccgtattcggtgttcaggcaaaatactttttccagcttgcttccgcagagcttacacagattgatagttcccttaaagctgcgctaagcaaccatcccacactaaccgaatactggatttatataccgtttgacctgaccgggcgtgttgctgcgggaaagcgagggaaaagccaggcggaacgctttgaagaatggaaaagtaaagtcgaatcggaagcgtcagcgaaagggaagtcactttctattgtcctttgtaccgctgctgttatctgcaatcaattacttgagatagacccttacggagggatgcgcaggtattggtttgatgacacgttgctgacaacagctcaaattcaacaatgtctggaggacgccattgcttttgccgggccaagatatacttcaatgctggatgtggtgacgaatgctcatgtcggcctggatttctttggtgggactggtgacttttgcgagtggtacgaaacatcattaacaccaatcgttcgagagttccattcactgaatggatacggacgcaaatcgctggatatactcggcgaaacccgtgctacatctgccacggcattgattgaagaaataattgcctactgtgagagcatgagagataacaatgtcacggccacatcggttacagatctttgcgtcgctctgtcatccctattgacacttttcgctgatgcccgccatgctcaagaagataaattttatgaaaagcatggcaagcatagtgatacagaatcgttccgacagttccacgcagagtatatgtgtgcatttcctgccggagatatggatgcggcgagaaaatgggaagagcaggcgcagcaactgcaaaatttgctgacttctcaggtcattggtgccgcaacagcacattccttactgctggttgggccagcgggtatcggcaaaacccacgcgattgtcagcgcagcattgcgtcgactggaacatggtggtttttcactggtcgtctttggagacgactttggcaaagcagagccttgggaagtgctacgcagtaaaatagggctgggtgccgccatcgatcgttcgacattatttgaatgcatacaggcctgcgccgaacacactggcttaccttttgtcatttatatcgatgcattgaacgaaagcccgcgagaagtgcgctggaaggacaagcttcccgaattgctcgctcaatgcaagtcttatccagacatcaaaatctgcgtttcaacccgagatacctatcgcaatcttgtggtcgattcacgctttccagggtttgctttcgaacacatcggtttttcaggacatcaattcgaagcggtacaagctttcgcagcctactatgggctggatgcagagattacaccacttttttcacccgaactcggtaatcctttatttttacacttggcctgtaaaacgctaaagggcgaaggccgtgacagtctggatatttctttgccgggttttacctctctgtttcaaggacatctcaaacattgcgatgttttaattcgagaacgcctccactacgcaaaccctcgcaatctggtaagggctgcaatgatggcactcgcgaaaaccctgacacatgagttgccgcagaaccgaacgtgggaaacctgttgcgaagcactgagcaaaatagtgggaactgagaccacacctgaatcctttttaaatgcattggcacatgaaggcctcattatcctttctgttgtagatgaggataccttcctgatccgtctgggttatcaacgctacggtgacatactccgtgctatcagccttgtggaagctcttgattcggatacagtaaaattagcggagaaaattgcagcgttaacagaagaagatgctggattgctggaagctcttgccgccgtgctgccagagaaaactgctcttgaaattactgctgaagaagtaggattaccatccgaacaagcccataagctgttcatccagtcattggtttggcgctcccgacaaagtgtagtggaagaaattgatgaacacatccatgcagcactgcatacacctggattatgggagtcggtttatgaagcgctgttttcacttagtctggttcctgaccatcgtctaaacgcaactaactggctggggccatttttacggcagtcatccttagctgaacgtgacacctacttgtcattagctgcgctgggatcatttgataataagactgctgtctattcactcatccatgcagcactatttgctgacataacccattggcctgctgaaagccggaggctggccagtctaacacttgcctggctcacttcgtgtgctgaccgccgaatcagggatttatcctcaaaagggctaagcagaatcctggcaaactacccggagaactgccaaacagtaatcagtgaatttgcatattgtgatgatgattacgtattagagcgtattagccttgctatctacagtgcatgcttattgtcataccaacgcagaaatgcgtttatgccagcgctccctggtctattaagcattgcgtcagatagcaagaatattctgctccgggatacggttcagctattagtaaacttgttgaaaacaggagaatttcccacagccgtaacaagccaattacagcattaccagacaaacgtatcattaccatcacgatggcctgtactggcggatgtcaaacccctcctagatctggaacatttaccatcaaacatggtgctctggggagaatccatggccccggatttctggcgttatcaggtggaatcgaagatttccggctttgacttggagagcgccaatatcagccatgaaaacattgcctgttggttaatgcgagaagcacttaatttaggatatcccggttataaccactgcgcgctcaattatgatcgccatatcgggagtcagtatggctcgggacggggtagaaaagggtatgctgaccgactcggtaaaaaatattactggatcgccttacatcgactactgggcattctggccagtaatgttcccgcactggaagacccatattccgactacgaacctacaagtgatcatctatggtcagtcgacgtccgtaaagttgacctgaccgatgtacgcgatatcaccgcagaaggtgtctatccagtactgatggaggaaacaaattatgcattccctgaccacaattcagatatcaaaggttgggttcggaccgatgattttccaccttatgaagcttgtcttattcgaactgacgaggaaggagagcagtgggtagcgctttcacatagctattgggattacgataaagcgccgaatgaaaatagctgggattccccgtacttgggagtgcgtgcttcctactcaagcgcactcataaatgaaagcatccagaactttaaacagaaaagagctcgcgatattttccaatataatcaggggagtagttgttatcgcggttatcttgctgaatatcctgacagcccggtatacaaacaacttcttaatagtgatgaagatagtgaagcgtttaattttacagaagtcagtttactgcgcggaaacgaatgggaatacgactactcatataccatgcccgagcgccaggataacctcattgcgccatgcctgggaatcattcaaaaactcgaacttttatgggattgtcaaagcggttgggttgatcattctggcaaacttatcgccttccatcaaaaaggtgtaaaacaaagcggacttttcatccatcgttcggcattgaacgtctatctgtccataacaggtgaagagcttatacatcgccgttttgctaacagaggatattttgatttagctggtcgtaatagcacgcaaatagacctgaaaacttggatccagtaccgggcagacaaggcaccggtagttttacgagaagaggaactgccgtttaactgctga

SEQ ID NO: 291827 - DNA, 1143 bp, Morganella morganii
atgaacgaaaccatcgaaaaactgattgccagtggcaaggaagggccatggtgggactttaaacaaacctaccaccaaaacaatgcagcccttgttcacgatatcctctgcatggcaaacgtcctgcatgacggtgaccggtatctgatttttggcgtgaatgatgaagggttgattactggcgtgccggaagatggtaagcaacttaaccaagcaaatttaatcgatttgttaagaaaagtcagttttgcagagcaccattgtccggatattcagctgcaccacatcacactccagcataaggtgctggctattctacaaattcgtaacgtcagaataaaaccctactatctgacccaggactatataaaagagggaaaaactgtcagagccggtgtcgtttacacccggcaacaagatgccaatacgcccgtaactagctgtgccaaccctggagatgtcatggcaatgtggagagagcggtttaacctggacctggcacccgctgaccgcatagtcagactgcttctggattacgacaattgggaatatgacggtatcagcgaggcctattatcggttggatccggattatgccattcatattggcgacacagaaaaagatataggaggacaacactggtggtcaacgattagcattgagcaaccttgtcactatgaatacatcctcaaataccgtgggcgtgtacttgaacgagtgccaatcgtacattacagaaaagaggggttacagtttccctttccagagatggatacgctggcttatccaggaaaaagggatggattcgtaactgattattatgcagacgttttttacttcgtaaaaaacaccttaccctacaatctgttgagtcatatcagaaaattacactcactgcctggccgtaattcaggcataaccatgccgttaaccacccagaccaaaccgccgattatcgagctgccattcatggtgtttgagaacgcaggggaaaaagaagaaaagctaaagtttattcaaagtcagcttgctgatttttgtccggatggtatgcctgatacagcatcaatgaaaactgacccagaactaagaatggaagcagagagacaattttcctggtgggtttttaaccatatgcgttga

SEQ ID NO: 291828 - DNA, 2799 bp, Morganella morganii
atgaggggaagcaaagaaaaatctatgccggatgttctggactctgtccagttggtacgtattgaagccgtacaccggggattcctttatcagcacttgtatgccgttggctgcttgctgctggcacagaaagcaagcgtggagacagtaaccgttgagctggatgaggatattgaactcaactccagccaggagcacatttacgttcaggttaaaacccgcctgaaacccatcattctcagcgatgtgtctggcgcgctcgcgcggtttgcggagctgcgtaacgagcacactgatgggcgccgccagagaagcgcttctttcgttatcgtcgccaaccaggcgccaggtccacatctgcagaagatgattgaggataagacgcttcctgcggatgtccgttttatctggccccagtcaaccgctgagcgccatcccgcacttccccctgcctgggacaccgtggctgatgcggccgcgtggtgcatcgcgcaagcagagcaactgaatttttcgttattgtcgccagaatccctgatctggaagctggccggtctggtccagctcgccgcaaccggaggtgatgccgacggaaagcatgctttttatacccgggatcttcctgccctgttcgaacaactcatcgttcagttacaggacttccctgcaccgccgacactctaccggccacaaagagaggaaccctcttttgtgtcggatgagcggatacgcatcatttgcggcttgtccggtgcaggtaaatcagcatgggcagcacaggccgcccagcacagtacccaggtgtgtgcgtattacgatgctggcgaccttccaggccctgcacttgccagtacgctggttcgtgagctggcagcccggtttgtgactcaggagcaaggtggcctgcgaagaatactgctccctggtgccagtggcgttgaagcgctgagaacgttcgacaccttcttgcagcaacggaacgacaacctgctgctggttctggataacgcgcatcgtatccctgtggagaacttgcgggatgttctgcacgccacaacccgtatccattttgtgctgctgtgccagccccatgacaatgtccgtcaactggaggcgatgactggacttcagcgtgaatcgttacagggatgggatatcgacacagtggctgccgcagtggccgacctcggtgggcacgccagtgcgctgggatatgagcagctacgaagctacaccggagggttgccgctgtatgtcgaaagcgcggcgagagttgccgcagaggaatacaaaggggatatagacacgctgtatgctgaactgcggcaacaggaaaacagcacggaaaccgcgcaggaagtcattctcagccgtgtctatcaggggtttgagccactggttcagaacgctctggcgttgttcagtctgtccgatgtggggctaagccgtgatgaagtttcagggtaccttgcccgctcattaaatatcccttcaaacggggcagccacattaattaaaaaaatgcgggccaccggaaccattgaaaactatggaaaccagacgttaaaggtacacgatgctgtcagggcgttggggctgcaacacctgaccatgatggacgtggatatcgtaaataacgcgttactggcgttaaaagatcttttgattgagagccttcagcaagaacgcgacacttcgcgattttctcttctaacgcagatttacatcaagcttaacgatgtcatgacgctcatcgctctatctggtgaagagctgttttatgagatgggcattactgtcgacattatggaaagcctgaaacaggcgacagcttcggactctctgccgcctttacaaacgttctgggcactcgatgggctagttttttctgagcttaaagacggtgtttctgagcaaattgcacaatggctggaagcgatgggagctttgcttacagaacatgagtttggttaccgggaacgcacagcctacaccatgaaacggatgcttttcttatccgaaaagggagactttagtgaagtgcaaacgctggctgaagatgcccgccccagccttccggatgaggagcatgcgcgtatttttgactataaccatgctatcgcgctatggagactgaaaagatacaaacaagcagaaacactgtgtctgagcgtagtgaatcgctactacgcgttatttggtattaccccacaggatgtcatgggtaaaaactcggatgtgctgtgggcaatcatcaaccagcctgaaaatgttcacgagcacatcaaacatctggccgatgccctagagttgctcgccagaattaatgacgcgcagggaaaggtgtcaccgtttctgcgcattcatgcgatgaaattttacaacatgaccgcagcccccgaatctctggtccgggtaggacaggatctagctgatgagtttgtcgcaataaaggactatgtcggtgccagagaggtgatggagcaatacgtcctgccagtcgtcaatgaagccggtctggtacagcgactggttcaggtccgaagccagtacgccgttatactggcacttgcaggcgaacatgagcaggcagaagcggagatgtgtcggctagcccccttttttgaagggttaacaggtgagcagcgacaggaggttgaaaatcagtcgaactacatcgcgcagcttgcttacaaggcggctaaatccgaagtaacgcgatttttcggggcggtaggcagaaatgaaccttgtccctgcgggtcgggagtaaagtataaaaaatgtcatggagcctga

SEQ ID NO: 291829 - DNA, 252 bp, Morganella morganii
atgttcgccacaatttatggaatgaatgaactgagcaagaaacatctggggactcaagaaaacattctgtgttcgctgcgcttcttttacgtctattactttaagaagcacaaacgaacatttgactacgatttctatcggtctgtcttcaatatctcccgttttatcagggaacttgatggcttctttacttacctgctcgggaagcagcacctgagtgacgagaccgacataatctctaccttttggtag

SEQ ID NO: 291830 - DNA, 864 bp, Morganella morganii
atgggattatttaatagaagttttattcaagttttgagaaaaattatagataagagcgaggaatttacagcagatgaatttaaacgcagaataataaatactgaaaatgaatatacatactcattattattacaaataagaaacaaaataaattcacataatttactaggattatttgcaaactccacaatattaacacaaacacttccaccaaaattagaacgtgattatggtgctgatgcttgtataattttagtcgatcatgatcaacgaattagtaaagtttgcttgtttgaagcaaaattaccacgacacggttctccatgggatcaaatcccaaaaaataaacaaggcaataacaaaagtcatttttcttctcagttatctcgtcaacaccctatctctcagacatatgccatttgggagcaattttattgttatggatacaaccaagcaaattcattaaacaacattagaacacaaaaaaattgcaaattaacagcagcatataaatccctatgtttattacatgaagatgcatatatacacgatcgtacaaaaaacggctctgtatggaatatctcagacatagaaaaaacagttccaagttattctaataataccaattttaaacctatcactatgtccggcatggttaagcatgcttgtgattgtaaaataggaacccctctgatattaaataaaattttaagtatattttctgatttcattcatataccaccaattttgttcattgaagcgtctacagaaaaaattgacactagattctctgatatttttaaaagggaaaacccaacatttatttttggtctcgatggtgacgataaaaaaacaagtaattaa

SEQ ID NO: 291831 - DNA, 1326 bp, Morganella morganii
atggcagaaaatatttctgaagctgatttacaaaaatggtttgaagataagtcacgacagcagatgattgttgattttatcgtaaatcaaagtgaactagataccatacctaaatcacagcgatacggtatgaaagatagtgagcgagtaaggttacaagggctggataatgccagaaaggttcttgaaaggttaagagatgcaaagcacctttcaggaaaccgaagtgtttctgacaaaggttatacacagatgaggccagatctgattttaatctctgaagatgcaaactatatgttagtagaactaaaaactaacaaagaagctgaacggcaggcagttcaagaattattagcctacagtacagcaatgaaaattcaattacctttcaccaatgaatttatgtttattatagtcgctttccattgggggacattattaaggttctcggtgaaatcacttattttagatggtaagctagtgttaccattaggagttgagttaggtcataatggcgaatatcaactacgtattctaaaatcacttttcgactctgattttaacgtgtcatatgatcctttttatgcaatggttccgcatactttggctacgaatatttacttagaggataacaaaggaaactttcaatatacggatgaagtaagaagtcgagtgaaacaatattttagacgcatggctgttggtattacaacagagtgccgaaaatctcagcaaagtggatttgtaatattgtggaaaaattttttaggttataggtcggatattattagtttgacagtagtcacagttaaccaattctggcaatacagtgagcataattctgataatttaattcgtaataaatatattagtaacaatggtattaaacgggtacaacagaatgccgccgatctaatgtatgatgaagtttatgctagggcagatttcaaagatgaaatattaaatgatttgaatagtgcatttctagaagcagaagcttatcaggcagaagcaagtttatacgcacaaagttcactttcctctgatcttattgaacggtatcggtatattgatcatagagaagaggaggctattagagaaactggactcatccaacagtttgaatcaggaggggaaaataatttaaaatcattgctgtcaggaatgcagaatcttcggtgtgtacagattgagctgctatcagcctttggtgacgtaggtgattttttacgtcaaaaaaatttagaccatgtattgcgcaatattaatttcgccacttttcagaaaataatggaatcttttcaaactagcaaacttgataactag

SEQ ID NO: 291832 - DNA, 855 bp, Morganella morganii
atggataaaagtataggtatgacatatatagaaaacgtagccagcggtaatgctggagaattttattttgcatactggatttcaagtaatttcaactggccttgccgtcttcttgatattgatatgggggtagatgctcaaattgaaatttatgatgacctaaatcattcaacagggatgttcattggtgcacagataaaaacaacagctaaaactcttgaagagtcattacccatttccattcctttaaaaaatatagtttattgggagagtattagtgaccctgttgttattgttcgtgtttgccttaataataattcaaccgagcccagtatatactggaaacatctaaaaaaaagcgagttaaatggttacttaagtaaattcaagaataaaggcactgaaacagtatcaatagacttcgaggaagatgaaaatttattgcgtagtagtgataaatcattatgggtaagtctatttttgagtgatgaggataagaaaattattgataattcaagtaaaattaaaaaacaacttgaagacttaggtaaccatttcttgcgaggttgtattgatggacagattactgttgggtttccaaatagtcgatttacctcagaattaaatgatctattgaatgaatatgatgaattaaaaactgctattaaaataaatccgcgcctagagtatctcgcagaagaagtaaaatcagctattcattgctatgatttatatatcgaaataatattgcaagtcttcgagatggggtgggaaagtcattcaattatcaatgctgatttcgatccttattcaaatattaacccattacttcataagattatgaataattactaa

SEQ ID NO: 291833 - DNA, 381 bp, Morganella morganii
atgaatacacaaataatcacgcagaaattttttaaggattcagccggaaaagtccggtgcatcgatattatgctgatgaatcaagattgctgggagtcagaaatacaggaagattgggtacctgtcagtaaaaaagaagctgacaaaataaccaatccaccattaacagaagaacagctgttcgagcaggcagaagcacaaaagcagtatctgatagcagaagtcaacgctgaaacccagctactgcaaacaaagctggcactcggtcgaatcaaagataatgaaaaggcgctgttaaacgcctggctggattatctggatttattggaagccatggacacctccaccgcaccggatatcgactggccacaaaaaccgtag

SEQ ID NO: 291834 - DNA, 2169 bp, Morganella morganii
atgcgcctttttcatgtgccggacacacggagaaagagctgcacccaatccccctcagcgcgcgattgctcccccgcctcgcccgcacacaaaaggtgtgcttttttgtgcaggttttgccatcaaggcaacgcgcagcccgtcaggacttgcgcggtattttatgtgaaccggaaattgtgcgggagtgtgcacaattgtgcattcaaattgacgatttcagttgtgaaaaatcataaatttttttactgtattatttgtaataaattattattcctgatagacaaaatatactataagcggactgctcacactatgaagatagcaaaattaaaattagtaaattttcgtggttaccaagatgtttctgttgatttttcagatgatttcaatgtgattatcggaaaaaatgacattggtaaatcaaccattctagaagctctggaaattttttttaataacgatggtaccgtcaaagctgacattaacgattgtaatgtttactgtgaagacaaaacaatgtctatacagctatcatttattccagataaaacctcatatactattgataccatacctacagatattaaaaacgaattcctactcgatataaatggcttgctaaccataaaaaaaacctgggattgctcaaatgataagttatcctcaactaatttgaaaacttcattaatttcaaattaccctaaaaattttccagttccattagtcacacttaaaataacagaattaagaaggttattaacagataattactcctccattcttgatgttgatgcagtaaaaaagaatacgagctctgaaatcaggaaagccatttaccaatctactccaaacctagaattagaagaaactgaaattgatataaataaagaagatggaaagaaaatatataatgccttgcaccctgaactccccttatttttcctattccagtctgatagggaaaatagagattcagataaagaggttcagagccccttaaaagcaataactaaagcagccatatctgaacttgaatcagagttagaagcagttaaacaaaaaataatcgacaaagctactcagattggaaacgacactctagaaaagttaaaagaaatgagtccagaaattgctaatatactgactcccgaaatgacaaataaagcatgggacactcttttttcattttcattcgtttgtgatgatggtatccctgtaaacaaaagaggcagtggtgtaagacgactaatattattgaattattttcgtgcagaagctgaaagaaaaatatcagatggtcgtcatattatttacgcaatcgaagaacccgaaacatctcaacatccagagtggcaaaaaatacttttcgaagctcttatggatttaccaaaaaatgaaagaacacaagtaattgtaactactcacagcccttctctagcaagtttagcccctgtggatcgcattatattcattcaaaaaaatgaaggtaaagtttgcattcaaaccaagggtagagtcgaccttcaacaagttgttgcaacactaggtgtactccctgatattcccgttgatgtcactaatccttctttgaaggttattttatgtcttgaagggccaactgacgtacaattttttgataatatatgtcatatatttaatatggatataaatagtgaccctcgaataatgtctttatctctaggaggaggaacattaaaacactgggtaaataaaaactacctcagaaaactaaaccttccagaaattcatatttatgatagggatgtttcaaaatatgctgaaactgtcgcagaagttaatgctagagacaattgctgggcaacacaaacacaaatgtgggagttagaaaactatatacacccatcactctatgttagcgaatacccaactgaaaggccgtttatcgactttacatcaaactggacatccacatggaaggacagaaatattccagatgaattctctgcatttttaaaagaagaaaaacgcaatggtaatacctcgattagaaacgaaggttcagcttcaattaaaacgacattctcaaatatcttatccatgcaaatgacagaaggtttattcaaagaattggacgtttatgaagaagtgagtggttggtttaaaaaaataaatgaacacttgtaa

SEQ ID NO: 291835 - DNA, 735 bp, Morganella morganii
ttgaaatttgatatgcattgccatttggatctatataaagacccaaaggacattatttttcaatgtgataaaaaaggactatatgttctttctgtcaccactactccaaaagcgtacattggtagtaatagacttgtttctagctgtaaaagaataaaaactgctttaggatttcatcctgaactagcacacttacgatacgaagaattagacatctttgatattttaataccccaagtaaaatatgttggagaaataggacttgatagtggtaaagaatataaaaaatattccgagatccaattaaaggtttttagacatattttaaaaaaggttcatagccaaggtggtaaaatcatgtcaatacactcacgaaatagtgcagataaggttgtgaatgagttaaaaaaaattgatggaattccaatatttcattggtttacaggaacaaaaacggagcttaaaaacgctatagatattggggcatggttctcagttggtcctgcaatgctgaactcaaaaaaaggaaaagagataattgagttaataccgaaggatagattgttaacagagacggatgcacctttttcaaaattcaatgggaagaatttattcccttgggatgtagataaggctatcataggtatatctacaatatggagatgtgatcctaaaaatgttgaaaataagttagaagagaattttagaaaaattctttcttttggagaaagataa

SEQ ID NO: 291836 - DNA, 453 bp, Morganella morganii
atgaactcgtttttcatcccgcagttaggcggccagatttatgcgatggcaggtatgcagaccaaactgcatctgattgcggaagagccgggcgtgtacaaaggcatttctgccagctacagcggacacggtttctctgacatgaaatttaccgccactgccaccccgacacgcgaagccttcgatgagtgggttgcgaaggtgaaagcctcaccggacaccctgaccaccaccgaagcgtttgacgcactggcaaaaccgagtgtgaacaacccggttgtctatttctccgcggtcaaaccaaatctgtttgtggacaccattaacaaatttggtcacagcggccacggtgccgggaagacacaggaaggcgaaagccattcaatgatgaacatgagcgcagatgaacacagcagccatatgcctgcagctcatgccgggaatgaggggtaa

SEQ ID NO: 291837 - DNA, 339 bp, Morganella morganii
atggaatttaaaggtacacctgggccgtggacgcatgcagacagtcacggccttaatgaaacagcaggtggtgctattcacggagacggaaaaacactttgtctggttctgggaaagggcatcggaaaggaaaaagcgactgctaatgcgaaactgatggcggcagcgccggagttattatcggcattgcaaggcatccagcaatcaatggctaaatacatcgaaatcgcaaataacatcggcatggatgttaccgcagacgggttttatcttggtcacgcgatggaagttgaagaacaagccagggctgcaatcaacaaagcacttggccgcgaatag

SEQ ID NO: 291838 - DNA, 558 bp, Morganella morganii
gtgatttctgatgattttaaaaacaaatgtgtagcacctgtcgccagacacgaagccggacactggttagcagcttatcttttcggctgggagccaaagggtattgcaatcaaggttccggaggaggaagacaagcattacagttatgcaatgactagccaccgcgtcaagataggatcgcttgatgaggtcagagattatgcaagaaagagagttatcatcctgtatagcgggatgtacgcatcctcttttaatggtcgaacatttgacatgaataagatacaacgggagattgaaccatccggcgcatcttactctgatttctggaaggctgaggagatttatttcttttactacaacacactgagcaaccccaaaagctggaatgatgaatttctgccaataatcagagaaactgaaaaaatcatcgttgataataataaattcttgaacgctgtatcttctatcatatgcacgatggcagatgacgtagggcagttgattgagttgagttattcggatttagaggcgatatataaagaatccatgtctgcatga

SEQ ID NO: 291839 - DNA, 123 bp, Morganella morganii; identical to SEQ ID NO: 280051

SEQ ID NO: 291840 - DNA, 912 bp, Morganella morganii
atgcgaaagaagatcccgaaaacggatttactgatcaccttcgaagctgttgcgcagtatgagagctacacccgggcagcggaagagttatcactgacccagagtgcggttttccgtcagatcgccgcgctggaagaatttctgaatgtgtcgctgtttcatcacgtccgcaaacgtattttcctcagtgatgccggaaagcattacctcgggctggtgcatgacacgctggataagctggaaaaagacacccaggatattatgtcctggcagtcatcacagcagctgtttgagctggcggtaacaccgaccttcagcacacactggctgatcccgaacctgcagagcttccgtgagaaacatccggaaatcgcattaagtatcagcgcattaaccacaccggcggactttaccagcctgaaatacgatgcggcaatcatgcgtgaggatttctgtaatccgtggccggattttgaatatctgtttgaggaagagctggtaccggtctgcagccgcatgctgtggcgggatgacagtatcaaactcaccaccagccaggtgctggaagagtttactctgctgcatcagaccacccgcctcgatgcctggagtgactggttccagctctcgggcattcacaacccgaaaacccgggtcggcccgcgctttgatctgctttcgatgctgatctccgctatccgctcaaatctcggtgtggcgctgctgccgcgttttgctatccagaaagatctggaaaacggcgatctggtgatcccgtgcgacctgccgatgagcaccggcaaccgctttgttctcacctataaagaggacaaaaaaggatcactcaacctgcggaaattcagtgactggatccacgagaaatcgcgggaaaaagaactgattctgtcttaa

SEQ ID NO: 291841 - DNA, 366 bp, Morganella morganii
ttgccggaactgctggctgtcgtcgataaggcgctgaatgatgaaaatgtacgcccggtggccgaccgcgtcaccgtgcagtccgttgagattgtccgttacgccattgacgcggtgctttatctgttcccgacaccggaagccgaaccgatagaagccgccgcccggcaacggatagctcggtatgtgaaagagcagcaccgtatcggacgtgatatccggctgtcggccatttacgccgccctgcatgttgagggggttcagcgcgtcggactgaaaagcccggcaaaagatatcgtgatcagcaatacccgagcatcattttgtaccgatgtgacagtgacggtcgggggttctgatgaatag

SEQ ID NO: 291842 - DNA, 885 bp, Morganella morganii
atgagttcgctacgtgatgctgttacaacgcaatcatggtttgattctaattttttactatttaagcatgagagttcaagtcataaggtgttttttttagttgaaggaattagtgatgtggttttttttaaaaaaatattaagggatcaaagcgagaaggtttatatatcttcccctgaaaaaactggaaagagggaggttatagatgcagtaaagtctgtaaaaaacaataactatcataatatatatggaatatgtgattctgattttgaaaaaatcacaggaacgataaagaattatgaatctactatttttttatttaccgattttcatgatctggaaataacaatgctttcattggatgttttctatggtgtatttcttgaatgtactagaaattataatgaagccaatgagttaaggtgtgaagaagttttggataacgtgtttgaagctgtatataaattgggtatattgaagttcattaacatgagggatgaattgaaattaaatttcaaggcacttagacatggtaattttatttcagttgatggtattaattgttcgataaatattagagcaataatatctgatttgattccaaaaagtagtagtttcgataatttagtatattcagaagaaagagtttatagtttatacaatgaagcattgagtaaaaatatagataagttacatatttgtaatggccatgatttttgtgaagtacttgcaatagttaatcaccgtacttttcaaaatcaaaatatcaatagtgagaaattagaaactatgctgagactctcttgctctgagcatgagtttatgaaaactgaactttatggacacataaaaaatgctattgcatgtcattcgcatcatatttga

SEQ ID NO: 291843 - DNA, 567 bp, Morganella morganii
atggaagtagctgatcttgaacaagtaagaaacgaagtcatttcgtttgtgaatgacttcattaagcgtgcagatttgccatttactgcttctaggattaatgacgatgtttatagaaaaataaatgggcttagaaatagtgaaattgattgggattgggctattgattttttgaatagcgatgggcatttcgatctggctataggtattaagttagatgatgatattgatggtttggctatcggaatttatcaaaaagaagatggagtgcttgaaatccaagctattgaatcgttcgttcgtttcgatgttgaacatccgctccgaggaaggatggttgaattaacaattatagccgcaacttattttgttacattagttgatggaaccggagttcatgttattgatcctttagatgaatttcttatcgaatactatggaatgtttggttttcatctgaatactagttttgatgaaagttgtgttaaacgaatgatttctgacatagaagagttgacggctactttccaacgtttaattaataaatacgaagtaaaagatgcctaa

SEQ ID NO: 291844 - DNA, 510 bp, Morganella morganii
atgtcgtatgaattatatgaattagtaatcagtcctgctaaactaaaattactttgtaattttagtttagcaggactgagtatgtcatatcaaaatttttttaatgcagaaccaaaaagaagcttagaaagcaaatggggagaaaaagcgttgtccatgggatggtctggtatcccgacttcactatttttcctccaaggtgctcttagcatgacccccacaacattcaatgtattgcttcacctaattattcattggtggaaagctcacgaatggccacacccatcacaagaaagcatatctataagaatgggggtttcaacaagaacagttcaacgctcactccaagaattggaatattacggtcttatcaccagaatcagaacaaaaaaagacaaccctaaatataggggtaggaatatatatgacttatctaatttagttaatgcattgaatgagttaacacctagtttaaacgaaaaactaaatgaaaaatcaaatataaaataa

SEQ ID NO: 291845 - DNA, 228 bp, Morganella morganii
atgtgttgtcactaccgccttcacgccggcagtgtacaacaccctggtcaggactccgtcccgacacccggttatggcctcagtaatttgattatctcgatgctgattttgattgcctggagggttaagatcagattttgtagtgacatgtttgctcctgattttgtggtgatgttatttatacccacttacgacgagctatcgtgtttgtggagtatcaaacaataa

SEQ ID NO: 291846 - DNA, 417 bp, Morganella morganii
atggctttttcaatagcagaagtgcgtgaggggcgtatcggttctttagttattacaaaagagctttacgataaattagaaaaatattctcactcaaatggattaataacatccacatacaatcatggtcatggcgttgttagatactacaccgtgaaatattgcctccagatgaactatcacggacaaaatcagcctcaaaaataccttataaaaagaggggggagatatcccagcaagtatgcaatggtcaaaaaaaccattgaagatttagagtattcaacaccgacatttgacgcaatatgtaggaacatagcaataaaatatccacatatggtcaagtttgctaattacatatcagaacccccattaaaaggcttcgccgcaacctttaataactccgctggtaatgactaa

SEQ ID NO: 291847 - DNA, 507 bp, Morganella morganii; identical to SEQ ID NO: 277084

SEQ ID NO: 291848 - DNA, 1158 bp, Morganella morganii
atgatccgcacggtaaacagtgataccgagctggtattgtcattcaatgctccggtaacgctcagcggcgcgaaatactccatcgccaccacggtaccggataccatttcagatgcggcccgtactatgtcagccaatcagggctatatcgtttactttctccaggcaatgcagcagtggatgacagacaccggacaggtggaaattgagctgccgaacggccagaaggtgacgctggatagcattaaagcgctgaatgatgctttaagtaatctgtcagatgtgaaaaagggattatctatcaatgataatggatatacagagatctatccgtcagacaaaaataaagcagggctttggcaaagaataaatacatatgtgtttgaggtgctcagtggtagtaccggaaaattttccgttgcgaatgactccgtaaagataggcggaacaatcgatgttaaaaccaatacccccggcaatgatcagtcaagggttgaaataacatcaccagatggcagatttagcatcggtatgtgggcgtataacgatggacgtacattagtttcgtgccgaaatacatcagggtggtctaacgtcagttttgcaaatatcggaagtggcagcgccgcagtaatcggcgggaatatttatgttgatggcagtggttacctgaaaaaatcctccccgataattcttgtgtatcctggcggcacgtttgataccaacgacgaatccgaaggtgcagaagtcagccgtaccggcaccggccagtatcatatcaccggtatactcggttataactcagatggcgcatggggtgtaaacggtggaatttccgtaccgaaagacaataacggccttgagctagtttatgtcgatgaccgcgtacagaaagatggcagtattatcatcgaaacctgtcaccgtcagcatgcgcatttgccggaacgtttccagaactggcggctgaaagaggtcaccccggaaggtgagcgtatcttctatcaggacggtgaaccatgtgacctgccggaatcaacccgcctcgatgtgcgtgtggaaatgccgcagggctctgtgtggaatgagaagcaacgtgaactggctgaacagatggaacgtgagcaggcagagcgtgaggcgcaggaaaataattag

SEQ ID NO: 291849 - DNA, 1194 bp, Morganella morganii
atggctttattaaccaataccaaagctaagaatatacaacctggggataaaccattacctcatggcggtatcacgggcctaactctacatccatcatcaacaaaaggaagaggaaagtgggtacttcgctatatgagcccagtaacacaaaaacgccgaaatgcgggtttaggtagttacccagaaatcacaatttcagaagtgtcaaatattgcttcaataatgagagagcaaataatcaaaggtattgatccccttgagttcaaaaaatcaatttccgagaagccatcaatcccttcttttgaagatgctgctcgtaaacttcatactgaattacttcctggctggaaaaatgaaaaacacggtaaacaatggatcactacactggaacaatatgtatttccatttatcggctcaatgacattagataccattgcccccgctgatatagctgacacattacgccctatctggttaactcgctccgaaactgcctctcgcgtcaaacaacgtatccatgcggttatgcaatgggcatgggcacatagttattgttctgctaaccctgtcgatgtggtcgcccatttattaccacaacaaatcagcgttaatgtccgtacagaacatcaacctgcaatgccatggaaatcactccctctttatattgcaacctatgtatccacagatgaacgatacaatgtcactcgtgccttactcttatttgtcatactcaccgcctcacgttctggagaggctagagccatgcgatggggagaaattgattttaaacaacgagtttggactatcccagccgaaagaatgaaagctggcatgcagcatcgagttcccttatcggatcaagctatgtctctactccatagcttaaaagggctacatgatgaattggtttttccttcccccagaaaacaagttgtcctttctgacatggtgctcactgcattcttacggcgtacgaaagcccctagcgataatcctaatcgcgttgcaacagcacatggctttcgttcaactttccgggattggtgctctgagcatggctattctcgggatttagctgaaagagcactcgctcatacagtcaaaaataaagtggaagcagcttatcaccgaacggacctattagatcagcgacgccctatgatgcaagcgtgggctgattatctcttgccttaa

SEQ ID NO: 291850 - DNA, 1674 bp, Morganella morganii
atgaactttaatcaaaccacagtattggctttctttgaaccctccaaggttagttacgagatccctgtataccagcgggcttatgcttggggagagaataactggaatgaattcttgtcagatctttatgagcaagtagatggggaaaacaactattttttcgggaatattcttcttgaatgcgttgaaaagaacaagttatacgaaatcattgacggccagcaaagggtcactaccattactatatttgttcgctctctactcaatgtattaaagacacgagatgacctgtcagagcataattttgacattgaagacactgaagaagctttcatcagagataaaaatattaaactccgcccagttgaatatgatcgaagttgttatgactgcttaattgtcgaaaatcacgataagtttgatgcttattctccatcacaaaagaaaatacttgaagcgaaagcatacttcactaaacaactctctaaacttgataccgcacgccttgtcagtatccaagagaagcttgaaaataccgaccttaccatcatcgagttggagggtaagaaggatgcggctctgatgtttgaactggaaaataatagaggcaaagaattgaccaatatggaaaaggtcaaatcgtatttcatgtatcagatgtacgtgaatagccctgctgacgatgttgataacaatatcgaatttgtatcgaacatatttaaacgtatttatcaggtaatcaacaacatagagcggattaatgaagatagtgtgctgatttaccacaacaatgcgtatatcaaggggtatgcctaccgcactttggatgacttgaaggaagctttccgtaacaaagatgacaaagttacctggataaaagagtacgttcgaagtttaaacgattcattcgtggccatagataagttacaacatgaaaagagtatgtatgcgaaaaggctgtttaaacttgggatccctgcgtacatttacccattcattattaagggctaccgttataactcttcagatctcccaactcttttccgcattcttgaagtgataacctttagggctaagctcatcaatagtcgggcaaatattcaagagcgtctcaatgaaattctgctctcctacgatggcaacaatgctgtcttatcagaaaaaatagcaagtaagctcaacgatacgtggtattggagtgatacaaatatgaagaactatctacatggcgggatgtacggaaataatgtactaagctacctgctttggagctacgagagttatcttcagagagctggatattcagtcgaagggttcaagattaccaaccaacaaattgaacatatagcaccgcgcacgcctactgatggaagtcctctcgaaacaggatatgaactcaatgagcagggtgaatattccgaggactttagctctgaatacctcaattgtcttggcaacctgatgctcatatcagggtcgcacaatgcgtccatcggaaacaaaccatttgccgataagttaatgtcttacagaaagacccccattcttaaccaacaggctgagattgcttctttcgttaaagatagcgagaacccagtgtgggattgtgaagcaatagataaacggcataacaaaatcgtagactttgcgatcactgagtggtcatttcggtaa

SEQ ID NO: 291851 - DNA, 609 bp, Morganella morganii
atgagttgccaacatatgaagcatcgttataaacgcgggacaaaagaacatgttgacatccctaatttactcgaccgccaatttgccgtcaccgcccccaatcaagtgtggtgcggcgatgtgacgtatatttggacaggaaaacgatgggcgtatctcgctgttgtgttagacctttttgcacggaaacctgttggttgggcactctccacgtcccccgacaccacgttgaccttaaaagctctgcaaatggcttgggaaatgcgcggtcaaccaaaaggactgatgtttcatagcgaccagggcagtcattataccagccttgagtatcgtcaacggttatggcgctatcaaatagtccaaagtctgagtcgacgaggtaactgttgggacaacagtccaatggagcgattttttagaagtttaaaacatgaatggatgccttcaataggttatggaagcctaaaagaagcagaacacgaaattattcgttacatcacaggctattacagcaacatcaggcctcactggtataacggagggttgaccccaaatgaatcagagcggctgttctacatacagtctaatgacgtggccaatattagttga

SEQ ID NO: 291852 - DNA, 672 bp, Morganella morganii
atgtcagattatgcattaactgaaacagaattggatcaactgataactatcgcgagtgatcgctatgattcctcgatatcgtattatatccttcgtcgattactggcagtggttgagaatacactagaacaccataaccgagtatttgcaatccgagttgatttacgattcgctcaggatagtagtcctgatgccccagatatgccggtatgttttcaacgcacggatgagcgagccattacccgttttatcgagtcactaaaaagccaactgagagccgcacatcatcgtacggggcgttcaggtacaccagcactcccttattatgcttgggtaagagaacgtaatgaaagtgaatatcctcactaccatttagttttgttatttaatcgtgatatatacggctatttaggcaactatttacaagatgatgccaataatatggcgactagaatacaacgagcatggtgtagcgccattggcttagtgtacccagactatgcaccattagttaactttccagagaaccccgtatttcgatttgatagacgagatgctctggcccgtcattctaattattttgatttcctattacgcatgacgtatctggctaaaatgaataccaaggagttcatgactgactttagaaactttggaaccagtcaggtttaa

SEQ ID NO: 291853 - DNA, 522 bp, Morganella morganii
  misc_feature (482)..(491): n is a, c, g, or t
atggagcccggcggggaattacatgcttatgatgattacgcatcgcgctttatggagcatgcttctcgaattgcaggggtgatgcaaatgtttatgacacccgattccactgttgttacgttggaaacgctggagtcggcagtctatattactcagtggcatcttaatcactttatcaaaaaaatagatgattttaaggaagtcagtgatgctgaaaaactcctgttatggttggaggagcatcttgtcagtaataaatcttatgattttaggcgaaatgacatcattaaaaatggtccctattcactgagacgctccgaccgtttgcggcctgcattagaaaaactacagcaggaagctaaagttcaattattcgaaaaaaatgggattaactatgtcaagtttacgggggcaagaatgacacctgaagagctagccgaacgattgaatattccgttgagtagcagaggagtattcatacnnnnnnnnnncagagttatttttaataatatcagtgagtag

SEQ ID NO: 291854 - DNA, 723 bp, Morganella morganii
atgcgtgcagtaggtagaaggagtgctcagcaacaacgacttaaacttttcacgactaattatgacttggcttttgagtacgctgcatcaaatactggttttgttgttattgatggttttgagttttctaacccttctttttttaatcctatgtggttcaagtatgacatagtgaaccgtgggcagtccaagagcagtgagggcgcatacatctccaatgtggttcagctatataagatgcatggctctgtagactggagaaaatttaacggcagagttagaaagctaggtgctgatagtaaaattggtgaacctgtttttatctatccaagcagtagcaaatatcagacttcttatgattctccttatttagatatgatgacttcttttttggaagtagttaaacaacccaaaacggctgtattgtgtctaggctttggttttaatgacaagcatataaataatgcattaactatggcgcttaggactaatcctgagtttatgctaatggtggcaacgaaagatccatttagtgtaacgggttcatttaataatgaaattaggaatctgctaatggctgctattgaccatggggatggtagaattgcgataatggattcaacgtttaaacaattttcttatctgctacctgagcgaagatcaaaaactcctgaggatgaactcttcgaagcatttgaaaaggtcacagcgaacattaaatag

SEQ ID NO: 291855 - DNA, 2931 bp, Morganella morganii
gtgaatgtgcgcaaacagctacaagccctcaataaagttgagtttaccgatcctgagtgggctcgtttttgtgagcaatacttgaacacgccaagcgataatattctcgataaaacccgcaaagtgcacagtgattatatctttgattttgtttttgatgatggtcatatcgaaaatatctacctatttgacaagaagaccattgctcgcaataaagtgcaggttattaagcagtttgaacaaacaggaagccatgccaaccgatacgatgtgacgattttggtcaatggtttgcctttagtgcaaattgaactgaaaaagcgtggtgtggcgatccgtgaggcgtttaaccaaatacatcgttacagcaaagagagttttaatgaagagaactcgttgtataagttcttacagctgtttgtgatctcgaatggcactgacacgcgttattttgccaatacgactaagcgtgacaagaacagctttgacttcacgatgaactgggcgaaatcagataatacgctgattaaagatttaaaagatttcacggcaacttttttccagaaagagaccctgcttgaagtcatttttaaatactcggtatttgatgtcagtaataccttgcttgtgatgcgtccttatcagattgcggctaccgagcgaatcctatggaaaataaagagtgcctttaacgctaagaactggagcaacaccgatagcggcgggtacatttggcacaccacaggttcaggtaaaacactcaccagctttaaagcggcacggttagccacagaattagaatttatagataaagtcttttttgtcgtggacagaaaagacctcgactatcagaccatgaaagagtatcagcgtttctcgcctgatagtgtgaatggttcagacagtaccgcagggcttaagagcaaccttgacaaagatgataacaagattattgttaccacaatccaaaagctcaacaacctaatcaaaagtgagagcgatttacctatctacaacaagcaagtggtatttatttttgatgagtgtcaccgaagccagtttggtgaagcgcagaaaaacctgaagaagaaattcaaaaagtattaccaatttggctttacgggtacgccaattttccctgaaaacgcattgagtgctgaaacaacgggcagtgtattcggtcagcagttgcacacttatgtgataaccgatgccattcgtgatgaaaaagtactcaaattcaaagtggactataacgacgttcgcccacaatttaagcgcattgagactgaacaggacgataaaaagcttagtgccgcggagaacaagcaagcgtttttacatccgatgcggatccgtgaaatatcgcagtatattctgagtcattttaaccagaaaacgcatcgcgcttattctggtgcgaaaggattcaatgccatgtttgcggtaagtagtgttgatgcagctaaagcgtattatgaaacctttaaaacattgcaagccgaggctgaaaagggatccacaagtaaacctcttcgcattgcgactatcttctcatttgcagctaatgaagagcaggatgctattggtgatattttagatgagagttttgaagtcagtgccatgaacagcagtgcgaaagagtttttgagcgccgcgatcacggattataacgccatgtttaaatctaattatggcgtggacagtcatggttttcagaactactaccgtgaccttgcccagcgagtgaagaatcaagaaatcgatctgcttattgtggtgggtatgtttttaacgggctttgatgcaccgacgctcaataccttgtttgttgataagaatttacgctatcacggtttgatgcaggcattttctcgcaccaaccgtatttatgatgcaactaaaacctttggcaatatagtcaccttccgggacttagagcaggcaaccattgatgccatcaccttgtttggagacaaaaataccaaaaatgttgtactggagaagagctataaggaatatatggagggctttaacgatattgttacaggtcaagtgcgtcgaggttttatcgatatcgtaaaagagttgaaagaacgctttccaaacccagaacacattgaaaaagaacaagataaaaaagaatttgccaagctttttggtgaatacctaaaagcagaaaatattttacaaaactatgatgaatttgctggtttaaaagcgttgcaaaacttggatacccgtgatgaacaagctgtcgaagagttcaagtcaaagtactatttggacgatgcggatattgaggcaatgcaaaccatcgacatgcctagcgagcgtgcgatacaagattatcgctcaacctacaacgatacccgcgactggctacgccgtgataaagaaggtcaggacaaagataagtcaacagtagactggggcgatgtcgtctttgaagttgatttgcttaaatctcaagaaataaatctcgattacattcttgaactgatttttgatcataataagaagaacaagagtaaagaaggtttgattgaagaagtccgccgtatgatccgcggtagcctgggcaatagagcgaaagagagcttagtggttgattttattcatcagacaaatctagatgagttcaatgacaaagctagcattattgatgccttctttaagttcgctcaggcggaacagaagcgtgaagtcgatgccattattgtctctgaaaagctcaatgaagaagcagccaaacgctatatggcctcatcactcaagcgagagtatgcctctgaaaatggcactgcactgaatgaggcgctgcccaaacttagccctttgaatccacagtaccgaacgcagaagcaaacagtttttcagaaaatcgctgcttttgtcgaaaaattcaaaggtgtgggtgggcagatataa

SEQ ID NO: 291856 - DNA, 1200 bp, Morganella morganii
atgagtaaaacgctaacagaaatagcagcgctgttgcaagcgtctgacaaaaaagtgcagttgatttatgcttttaatggcactggtaaaacgcgcttgtcgcgtgaatttaaagagatcatcgcgccaaaaggtggtgggcaggatgatcttgacgaatcagagcaaacgccgctttcgcgccacaagattttgtattacaacgcgtttacggaagacttgttttactgggataacgatttagagaacggtagagaaccaaagttaagaatacagccaaacacatttactgactggattctgagggaacgaggcgataccgacattgtaaaaaatttccagagatatacaaacgacaagctaatgcctctctttcatgaggaagatgtcattatagctggcaaaaaaacgggtgagaaaacatatcctgaagtgacattttcttttgaaacaggctctgaaagttcaggaaatttaaaaatatctaagggtgaagaacggaacttcgtctggagtgtcttttacacattactgcaagaagttacgtcgattcttgaacagcctgatccggtcaaacgagatgatgataaatttaataaattggaatatgtgtttattgatgatccagtgagttcattggatgatacccatctgattgaattggctgttgatttagctaacttaatcaaaagaagctattactttgaagggcgcggtctaagatttgtcatcacgacacatagcccattgttttataatgttttatataatgagttaaataacgatcttaaaaatccagtagaaggtaaaaatcctacgtggttgtataaacgcaatcaatcagaaaagtacaggcttgttaaaaatactgacgaaactttcgaactgttcagttcgaatgatcatcctttttcttaccacctattcttattgtctgaaatacgcgaagctattaaaaatacgcaagtgagaaagtatcacttttcattcatgagaaatattttagaaaaaaccgctacttttcttggacatccgcgctgggaagatcttttgataaaaacagctgaaggctctcctgatccattttcaaacagaattcttaacttgtccagccactctgcacatgcaggggacgaaattacagatatcgaagaaaaagataaggaaaatcttgaagatccaataattttattgttctag

SEQ ID NO: 291857 - DNA, 1245 bp, Morganella morganii
atgagtaatttgagctatttagagaaactgctggatggggttgaggttgagtggctgccattgaaagacgttctggtacgcactaagggaacaaaaataacagctgggcagatgaaaatccttcacaaggatggagcgccattaaaaatttttgcaggaggtaaaactgttgcctttgtggattttaaagacatacctgaaaaggatgtaaatcgagagccgtccattattgtaaagtcccgaggtgtaattgagttcgagtattacgaaaaaccgttctcacataaaaatgaaatgtggtcgtattactctgataataatgcgattcatattaagttcatataccattttttgaaattgcatgaacggcactttcagggtatcggttgccgaatgcaaatgcctcaaattgcaacgccagatactgataaatttctcgtgcccatcccctgcccagataaccccgaaaagtcgctggcaatccaatctgaaatcgtgcgaattttggataaattcactgccctgacagccgagctgacagccgagctgacagccgagcttaacatgcggaaaaaacaatacaactactaccgcgaccagttgttaagttttgaagagggtgattttgaatggatgactctaggcgatgtcacaaaaaaatggtactcaggtggaacacctactgctggaaagcctgaattctacgaagggggcaatattccttggttgagaactcaggaagtaaaattttctgacgtatctgagactgaggtatttataacgcctgctgcattgaaaaattcatcagccaaatggattccagaaaattgcgtgattattgccatttctggagcaactgccggaagaacagcaattaataagattcctctaactacaaatcagcactgtggatgtttggaaatcgacgataaaaaagccctataccgatacgtatttcattgggttagcttcaattacgaaaacataaaagctctaggacaaggtgcaagaggcgatcttaattcaacaatcatcaagaactttaggttacctgttccttacgcaaacgatcctgagaaatcattggctgagcaggcgcgaattgtagctatattggataaattcgacacgttaacaacttcgctgcaagaaggtctgccccgcgaaatagaactccgccaaaagcaatacgagtattatcgtgacctgttgttaagctttccgaaatcagatgaggcggcttaa

SEQ ID NO: 291858 - DNA, 1560 bp, Morganella morganii
atgacaagtttacaacaacgtgccgaacttcaacgccaaatatgggcgattgccaacgatgtgcgaggctcagtggatggctgggattttaagcagtatgtactgggtacgctgttttaccgctttatcagtgagaactttgttaactacatcacaggcggtgatgagagcgttaattatgctgccatgtctgacgatgacgaaaatatcaagttagctaaagaagatgccattaaaactaaaggctattttctttatcctagtcagttgtttagcaatgtggcagccaatgcacataagaacgaaaatttaaatacggatttggcggctatttttgctgccattgaaaactcagccaatggctatgattcagaaaaagacatcaaaggcttgtttgcggattttgatactaccagtaatcgtctgggcaatacagtagaggcaaaaaacaaacgtctggcagcggtgttaaaaggcgtagcaggtttaagcttcggcaattttgaagacaaccaaattgatttatttggtgatgcttacgagttcctgatttctaactatgccgccaatgcgggtaaatccggtggcgaatttttcacccctcagcacgtttcaaaactcatcgcgcagttggccatgcacggacagaccagtgtgaataaaatctatgaccctgcggcgggttcgggctcgttacttttgcaagccaagaagcactttgatgcgcatatcattgaggagggtttctttggccaagagctcaaccataccacctacaacttggcgcgtatgaacatgtttttacacaacattaactacgacaagtttaatattcagctgggtgataccttaaccgaaccgcactttttagacgacaaaccctttgatgcgatagtctcgaatcccccttattcggtgaagtggattggtagcgacgaccctaccttaatcaacgacgaccgctttgcacccgcaggcgtgcttgcgcctaaatctaaagccgactttgcctttgtgcttcatgcgctaagttacttatcaagcaaaggccgtgcagccattgtttgctttcccggtattttttaccgtggcggtgctgagcaaaaaattcgccaatacctagttgataacaactatgttgaaaccgtgatttcattggcacctaacctgttttttggtaccaccattgccgtgaatattttggtgctgtctaagcacaaaagcgacaccaccactcagtttatcgatgccagcggtctatttaaaaaagaaaccaataataacgtgctgactgataaacacattgaagacattatgaaggtgtttgctagcaaagaggacgtggagcactttgccaaatctgttgatttggatgttatcgcaggcaatagctacaacctttcggtaagcagttatgttgaagcgaaagacaaccgcgagttagtggacattaccgagcttaatgccgaacttaaaaccaccgtcgctaaaattgaagcgcttcgcagtgatattgatgccatagtcgcggaaattgaaggtgaggaggttgacgcatga

SEQ ID NO: 291859 - DNA, 924 bp, Morganella morganii
atgacaaatgatgatctgaaacaaacggtaggggcgaagtcatataggctttcggagatagcacagttgccacaagcaatccgggatcgcattgctcacatcgatttcaccttattgtttaagggagaagcggtacgggcagatttagtcgatcgcttcagcatagctgctacacaagcaacgaaagacttctctctatacagagtgcttgcaccaggtaacattgagtatgaccaaaagctcaagctgcataaacgaggtgaagcatttgagcccttgttcgactacgacgtcgttcgaacattggcgacaattagccaagggtacggagatggctttactggcaagataaaaccgccttttgcgtgtgaagcgccttatcaccttaacaagccgagtttatcgatagtggcgaaagttaccgaggccatccataaaggcaaagccttgcgtatcacctatgtgtcgttatcgagcggtgaaacaatgcgtgaaattgtgccgcatacgctggtggacaatggccttcgttggcatgttcgtggttttgaccgcgagcatagtgagttcagagactttgtactgactcgaattaaagcagctattgtgcttgacgattccacactgtctgaaacggagctcgaaccccaagaccggcaatggaaccgatttgtagagctggagttagtgccacacccacgtatagagcatagcgaagcgattgagctagactatggcatgacggggggcgtgatgaaagttgagattagagcggctaccgctggttatttgctacgccaatggcatgtagattgtaccaaagcacatagccttcaaggtcctgaatatcagctttggttaaagaataccccaacactttatggggtagccaatttgaatttagccccagggtttgacggatga

SEQ ID NO: 291860 - DNA, 363 bp, Morganella morganii
atgaaaaatcgcacattaaatagccttccttttgtgggaattatcgcagtcgtcatattggggatttatttcggcaaacaacctaagccaacctatcgagattgtgttgagttcagcccatctcctgccaatacgcttcagatttatgatcaacccgatagaggttccaagtctatcaactatcagcccacatcaggaaaagaacaattctgggtcgcaaaacgaacagctgatgaacaatgggtacaactctaccatgccataacactttttgatgatttacctgaatcagctaaactcggatgggttagtaccacgaatataaacacattggggatatttgagtgcatgactaagaattag

SEQ ID NO: 291861 - DNA, 267 bp, Morganella morganii
gtgccgggctttgaaggatgttatcgaaaaaaagctttaaaaacagcggtaaagcgggagcttgtcagttaccttgtcgaacagtattcgatgagcacccgtcacgcctgccgggccttatcgctgagcagaacggtgtatttttacaaaccggatacccggcgggatgaaccggtgatacaggcgctgacagaggcggcagaacgttatccccgttacgggtttaaaaagctgtttcagatcctgcgcaggcagggcaacgggtga

SEQ ID NO: 291862 - DNA, 438 bp, Morganella morganii
gtggatgattttaatcgtgaagccctggcgatagaaattgatctgaatatcccggcccaacgtgttgtccgggtattggacagaatagttgcaacacgcggatacccggtgaaaatgcggatggataatggtccggagcttatatcactgacactggcgcactgggcagaagagcatggtgtgatactggaatttattaaactgggtaagccgactcagaatgcctttatcgagcgttttaaccggacataccgtacagaaatactcgatttttatctgttcagaacgctgaatgaggtacgggaaataacagaaaaatggttgtcagaatataactgtgaacgcccgcatgaatcactgaacaatatgacgccagaggaataccggcaacaccattattttgatcccttccctttcttcagtaccggtataaagtag

SEQ ID NO: 291863 - DNA, 129 bp, Morganella morganii
atgactaactccatgctcaaaaagtggtttatcgcgaccgcctttgctgcacccttcatgtttgcagctcatgcaggcgcagccctgagagatcccctcataatttccccaaaacgtaaccatgtgtga

SEQ ID NO: 291864 - DNA, 258 bp, Morganella morganii
atggatgaaattatcaaatacgcgaccatcggcctgatggcagtgggttatttttggattatcgcaaaatcagtcgagtggtttctgagtctgatattcaggaaggcattcaagcgtaaggaaaaagaccgtaagcaggcagcgataaacgagttatatgacgcctttgatcttggtgacataaaaccagagggtcacctgaaggtcgaaacgaaaggcggcttggtcattttaatgtatcgcaggccggaggaatag

SEQ ID NO: 291865 - DNA, 312 bp, Morganella morganii
atgaaagtagaacaatatcaagtcacaaagctggaaatcactgatgtaataaagcacgacccgatcagggtttatttagaagacgataaccagggaggcggacgattaactataactgaatggggtgaggcgtggacggcttattggtcctccatgtcaggctcattaattgatttcattataagaaacgataacggatatttaattagctatctttcttacaagccggtaggcccaagaagcgctgcatataaacgccttgagtccagattaaacgcagtacgtgaggcaattaagcggattcaggggtga

SEQ ID NO: 291866 - DNA, 243 bp, Morganella morganii
gtgagcttcgttaggcaacttagtacttacatgaacgaagtcagtgatgaaactctcagggaaaggaaggggtacatagaaacggttttaatgaacaagttatattttggtctcgtctttatgaataagttgcctgcggcagataaagtcgatgttgaagaattaattcaatggtatcaaaaagcttttgaattttttattgataaaaaattctccaggaaggaaccaaatcaggagtggtaa

SEQ ID NO: 291867 - DNA, 1008 bp, Morganella morganii
atgtctgaacaggtcattgaagttaaacatgtcgtagttcacattttggacaagcaacaaaatggggatgcttctgaaagattaagtcctgaggaaggaatggttactgaagcttctcagcgtctaattaacgatatttgtgcaaaatatgccggacgtactggtaaaggttacggctattttgaaggtgatatggataattacccaatggagcgtatggctggggattatttggatggtattgataatttttatcagagttcctgccggatgatgcgccatttgacgggactttcacagaaagaaaacatggctactggtggttacgttttatttgcaaacatcgtgataggaagtaacgaacacctgctgatagcaattgttagtgctactattggatcaacggttgccgatgactttaacattcaggacagcacctatctggatattgctaaattacgcatggcaggacgcattgacttaacagcttggaaaagtaacgcagagcggtatattagcttccttaaaggtcaagggaatgtttcaaactactttaaaaatttccttggctgtaatgatgtgttaattgcgaaacgtgagtctgaaaaattacgtgacgttctaaaagcatttgcgatagagaaagagcttgatggcgctgaaaaagacgcgtttcttaagagcgcatttgaacacttacatgcgttaagtaaggctggtgaacctcttagtcttgaaacctttgttaatgctgtctggccccaagctccggaggaattatctggtaaacttgctgccgaagagttggggttatctgatggttttattcctgatggtcgcgtcatccgggcactggtatcttttaaaggtaagtccaaatactgggaactcaagtttgacagggaagggaaaactgaaggctatattgattatgatccggaaacaaatattatcaccttacgcaatgtacctgaagagttcagggaaatgtggatgactgaggtttaa

SEQ ID NO: 291868 - DNA, 1206 bp, Morganella morganii
gtgacaatttcgtttgagacgttgacagagttataccgtcgcatggaatttcaggaagaattccgtgtcggttcgctgttactctcagatcagtccgattgtgacctgattaataccttgcttgatgactcaggtaagtatgggctttctattgatacagggactgtcgctccaggtaatacgatcaatctacgcgtagcgacaccgtggagcggtctgggaattgtgtttgccacatacgaaaaactacttaattctccgaagcatcagtgcctagaaccagccagttacttcattcttgaaacaaaatttcgtaatgatgatgaaaatatcccagttttcataagcaactaccggaaaattctggagttcgttaacctgctaaaagaggctgcggcttacttcgacagctcaacttgtcagttggtttttctgaaaaaagaagttattaagttattgccatactttgctgcagaaaatgtacaaaatttgcaacgtaaatatcttgataaccttatagcctgtttcaacgacgatacccataaggatcagaagctggatattctgattgaaagtatccagtcaattagtgatggaacagattcactacaggtattcgcgtttttgttggacaatgttcaacgcctacatgaacagttccttaaagggtatcgtatctattcttctggattctcttacgacaaagtaatggatcaactgcgtgcagcaaaagtcgaagaaatgggtaaaatccacaaggcgttctcggatatccagaaccatatacttggcattcctgttgcctctgttattgtggctacccaattcaaagaggccgcgaactggtcgggccaagggataacaaacacaataatccttctgggatgcatttttgcggcaacgttaatctggctggcactttcaaaccaaatgcaatctataaaggcattgggagaagaaattgaatacaaagaaaagcagataaataaggaattttctttcatcagagatgatgtggcaggtgtatttcgtagtatttttacacgtctaaagacgcaaaaacgtacattctggatcatacgtggtgttttggtaataggtatcatcactgcaatttgggtttatttttggtacacaaagcccgcttttgacttcatgcagtacttgattgactgcatgaagtctactcattctgtcaaaaattga

SEQ ID NO: 291869 - DNA, 348 bp, Morganella morganii
atgaaaacgacctctgtattctggcaacccgccctgcaggctcccggcgaaatcgtccggggagcggatgatatccggcaggccattcaaataatcctgcgtactccccgtggcagtgatccgcaccgcccggagttcggcagtaatctgcaccgctatattgactggcctgtcgacagagcaatcccgcatgttgtgcgggagtctgtcgatgccatacgccgctgggaaccgcgttgtcagctgataacagtcaaacctgccgttgacggcgaacatcttacgctccgggtgagctggaaaagctctgacggacaaatcttaactcaggagctgccatggcgctga

SEQ ID NO: 291870 - DNA, 204 bp, Morganella morganii
atggtggtggcaaaatttggatcgttacccaaagccgccgccagttcattcagtgtatcaagtgcctcgggagacgatgcaaccagtgcagcaagtgccgatttcacaaatgccgttgtggcaatctgcgtattattaacggtctgcggggcagtcggagcggtaggtgtgccggttaatgcgggactggccagaggtgcatag

SEQ ID NO: 291871 - DNA, 540 bp, Morganella morganii
atgtatatcgtagacggcggtggatattataaaaaatcgtcgccaatcgttcagatttaccctgatggccattatgaaaccaacgacgaatccgaaggcgcggaagtccgccgtaccggcaccggccaatatcacattaccggcattcttggttataactcagatggcgcatggggtgtaaacggtggaatttccgtaccgaaagacaataacggccttgagctggtttatgtcgatgaccgcgtacagaaagatggcagtatcatcatcgaaacctgccaccgtcagcatgcgcatttgccggaacgtttccagaactggcggctgaaagaggtcaccccggaaggtgagcgtgttttctatcaggacggcgaaccgtgtgatctgccggaatcaacccgcctcgatgtgcgtgtcgaaatgccgcagggttccgtctggaatatgaaacagcgcgaactggctgaacagatggaacgtgaggaggcagagcgtgaggcgaaggaagcagcagagcagggcgtagactcagaacaataa

SEQ ID NO: 291872 - DNA, 201 bp, Morganella morganii
atgcataattatattgatgcgaataatattgaaattgctcgagttgacgaagataacgaaattcaagtttatgatgatactggaaaattattattttctctgccaaaaatgacaacttggggaaaagaacaaattgatgaagttattagaattgcgaatttcttctactatttaggcgttagagacgaaaaaaacaaataa

SEQ ID NO: 291873 - DNA, 183 bp, Morganella morganii
atgatagataaaaaagcaagaaaaccaaatgaaccgtttgatatcccctcttttcatgaatctgtaaaaatcgaatatgaagcaggtctgctcactcttcatgaagcagcgattgagttttataaagccaactggacgtattatatagatatcgagtatacaaaaaggaagcttggcatttag

SEQ ID NO: 291874 - DNA, 219 bp, Morganella morganii
atgcagccggataaccgaaaaaaatttttgaagctactggctgatcacaatctgactcaggctaaggcggcacgtctgatttgtgaatacactcaccgcccttgttcagtcaggacagtaagatcatggattaataatccggataagccaagctcccgtatttgccctgattgggcagtggaagcattgacaaaagcacttaaaatcagactcgtttaa

SEQ ID NO: 291875 - DNA, 252 bp, Morganella morganii; identical to SEQ ID NO: 30842

SEQ ID NO: 291876 - DNA, 483 bp, Morganella morganii
atgcgggatgaaacgaaaaaggccatgcatatgtttctcagtggcagatgttacacagccgaaaacctcgaaagggattatctggcagaagtgactgggtacagtgatgacacttgggaagcgccgcagcgtgccgcacgtctggcggcggcggtaaaacgctataagacttcagaaatgctgcgttttatttttgctaccattgcatacgatccggacccggacttaactccactggccgtgaagcggttatgtaatgccctgttcggcagaacgggtagccagtggctaattgtggaaattttcggagagagggggaggctgcggcgcagtggcgacagcagcccggaagccgtggaaaaaatggccgccagataccggcgtgatgccggtctgcactggtcagcaacactgggcgagattgagcgggtaaagcggctgtatcaggtgagaatccgagcatccaaggagaaagagggctaa

SEQ ID NO: 291877 - DNA, 1536 bp, Morganella morganii
atgaaaactgcgaagtataatttagtcgttttagcggctgctgtcagcctttctttattctcatccgtaagttttgcgaaagacggggagaccaaagacaaaaacttctatccggaaatgctggaaggcaagaacgggcagcgaccacaaggattgtggtgtgaggggtcaggaaaatgccgcgatgatgcaatcacatgggtttacggcaaagtgaaggaagtttcgccggaaaaaatcaacgctgcaaaaaatgaagccattaacgccggacaaaacgcagcaaacaaagcggaagctaatgctaatgccagcaccgacaaaaaaatcagcggtgcgaaaaacgaattaaacaacagtattaacaacgccaaaaatgaagctgtcagtgccggtaaaacggcggctgatgccgcagagaagaatgcaaacagctataccgacaaaaaagtagcagaaagcaactcccgaacggacggcttgatttccaaagaacagaaagcgcgtgaagatgcgattaatgctgaaaaatccgcccgtgaacaaggcgacaaagacacactgaacaaagcaaaccagtacacagacagcaaaattgctgaaaataacacagtgattaaccagaatattcagaaccagtcagaactggatcgtgagtatacggataaaaaagcaaaagaagccgaaaatgcagccagcactcacgcggacaaacaggcgaaacaggctgagaaaaacgccaatacttatacagacagtaaactcactgaagcgaaaagtgagcttaacaccagtatcggtaatgccaaaaatgaagccgttaaagcaggacagaatgccgcagacaatgcggaagccagcgcgaataaatacaccgacttcaaaattcaggaaaacaacgagttactttcagcggatattgctcagtcccgtgaggagtttaatcacggtatcactaccacagaaaacaaactgactgaaaatctcgaccgtaccaaaaaagatctctctgacaatctggataaaacacgcggtgatctgagtgccaacattatcgccagtcagcaggacagcaacaaccggacagaccggctgatcgcaaaagagcagaaagaccgtgataccgcagtaaaagcagaggaacaggcgcggattcagggtgataaagacacgctgaacagcgcgaataactataccgatcaccgcattgattctctgggggcgaatgtcggggatgcaatgagtaatttccggcaggaaaccaatcagcgtttcgggcagcttgataacaaaattgaccgtgtggaaaagcgcgcaaatgcagggattgcgggagttaccgctatttcatcaattccctacgtagcagaagatacgttctcttttggcatggcattaggtcattatcgaaattctcaggcggttgcaacaggtattcagtacaaaccatccccgaataccaatgtccgcctcaatgcgtcatggaataacggaggtgactctaatttaggtgctggttttgcactaggttggtaa

SEQ ID NO: 291878 - DNA, 198 bp, Morganella morganii
atgataaagataaaacgcatcaattttattccatctgatgaattggatagttttttaactcaagtttgttctgtcagtggtagatcgagaaatgctcaggcggtatatatgcttgaaaaatacattcattatttatctgaaatagaaggagagagtaataagttaaatttaatagccgatgacatttttgagaagtag

SEQ ID NO: 291879 - DNA, 240 bp, Morganella morganii
atgactgtaaatgatgttacacaacttactaatataaaacaatatttaagtgagttaacaccagcccaacaacaatgtgctgcattgtttgcctgtggctggcgacccgctgaaattgcggctatcagaaaaacgacactgaaaacggttaaagcgcaacttgacgacatccggaaagtgtacggactggactctatacaccacatcagaaatgtgattcttttgaggcttttcctgtaa

SEQ ID NO: 291880 - DNA, 234 bp, Morganella morganii
atgttactggttgtctttatggaaaataaattaataaaaacagtaagattaaacgataatgaatccctgctcttgaaaaatgtttcgctggatttttcaaaaagaaatgttttgaacggagttcacaagctctacaaagaatcagatttaattcactttatgattgagcatctaacaggtcgtttagatattgattctaatggagatttgatttttatagaagataatcgttaa

SEQ ID NO: 291881 - DNA, 411 bp, Morganella morganii
atggcaaaactctattattttccacaaggaaaagaaaagaaaaaaattaaaaaacaaataagaaaaaataaaaatgcacctattcttgcaaaaagaaaaacaacagcattaaatttttttaaaaaattatttttctttatacgtgcattcattggtgtgttttgtgatgttgtcttttctatgattgttggtttatgccgaggcgttatttatctgacggttgttctaggtggtttttttctgcttataaaatataacactaacggtggtgtgtgggatggcagtatgtggcttgttatctttatgctcgtgttaggttctttgggggatgtgagtggatggtgtttgttccagagattgatggggacgtattcaggtagtgaaaaatctaatccacctgatgatgattaa

SEQ ID NO: 291882 - DNA, 978 bp, Morganella morganii
atgagtaatctgacaaagaaaacgagaaatcacaagttggaaacgttacgaccatcaaaatacaccgagcaggaatttttcattgcggatgaaatagagactgcatcatttcgtgatgaattagccagtatggagcatcctttttttgcattaaaagggggagatagaaaggaaagagtttatattaatggtaataaaaaaataacggtttcacctaattcaaaaggactggctactatttttgataaagatatttggatctatgctatcactaaattgcagcaagccatttctgataatcaaccaattagtcggacaattgcttttactccttatgatttttttgttaccactaatagggataaaggtgggcgatcttacgaagaattacaaaaagctcttgaacgattagcgggaacaagaatacagacaaatattgtatattcatcagaaaaacaagaaactgaaaattttggcttgattgacaaatggcgtattttagaagaaaagaaaggtaagttagatattggtatggtagaagttactttgccggattggttatatcaagcagtaactcaaactaaagtattacaaattactcaggattattttagaatccgaaaggctattgaccgcagactttatgaaatagctcgtaaacactgtggttatcaggaatcgtttactatatctcttgagttattatatttgaaatcaggtagtagcgccttattaaagatgtttagacataacataaaacaattagcgaaaattaatgatttgcctgactatgaagttatttacaatgctgagaaagataatgtgatgttcaaatatcgtgaatattgtccaaagaaagaacaagaagcaaaaaaccgtactgaaaaaaataaagtgatctcacatattaattcaggctctaagctcccgcgaaaaatgcaggaaagcatagataaaatacgttacgggaaaagatga

SEQ ID NO: 291883 - DNA, 123 bp, Morganella morganii
atgaatttttttaagggttggcgatttattgtgactcacaataatgaaattgttttcgcaaatggtgttttacccgctatcaccaaagccgattttttggattttaagaggctgaacccatga

SEQ ID NO: 291884 - DNA, 2517 bp, Morganella morganii
atggtaacgcaagctaaccaaaatttatcagattatcaaaatagttatgctgagcctcttacagaagtatttcttcataaaaatcgatatagtgcagatatcatttggatgaacaattatcttcatcgattagacagcccacaaaaagagatacaaaaattcgtttcactctgtgctccgagtggaatgatttttatacaagaagtgttacatgcccctgcacaatcactgataagcatctctttattacaacaaaatggtagtgatcctgctgatgaattattaacagcaaaaaaatgcaaagatatctttagcgcttctactgcgacttataaaagtgaaggagttaacggcgaaatattgacacagttataccaagcaccagaaaaaatttatttaccagataaaaataagctagagcatgatttgcgccaatttttaccagactatatgatcccaaaacatatttattttctaactgagttccccttaaccgcaaatggcaaaatagataaccaatcattaaaattgtattgtcaggaataccaagaagaatacctaaatcaacaacctatcaatggtaaagaacagatcatcataacaatatggcaaaagctccttggcaccaacaagatacaccgtcacagtcatttctttcgtgaagggggagatagcctagttgctattcgattgatctctgatttaaaccatattggctaccaagttgaactggagcatatctttgcttatccgatcctttctgattttgcacaaaatataaagcagagcgaagttttcgaaaaacagccagcaatttcacataacgaggcgtatagatacaatccatttccactcactgatattcagcaagcttacttagttggacggcaaaataattttacacttgggggtgttggtacacatttttttgtccattttatagcggaaaatttagatgtacctaaattagaacgtacaattaatcagttgatttctcgtcatgatatgttacgtggtgtcattattaatggacaacaacaagtacttaaaaaagttccttattattccgttaaaacgcattatatccctacagaaaaaagtgacgcttttctagtattacgagctcaacttgctaacattgtttatgatccagaaatttggcctttatttactattcaagttatcaagaccaaagaacaaccagatcatatttttattagccttgataacttattccttgatggaatgagtatgcagatatttttcagtgagctaaaaacactgtatatggagccaaatcaccaatttatccctctagatattacttttcgagattatattgattgtgatgcctatccgattaacacacaaaatgattgggaatattggttaacgcgtttaccacaattaccaccagccccacaattgccactaataaaagatccagcacagattgtgcaacctcgcttctcgcgtttacaaacatcattatctacttctgtttggcaagcactacaacaagttgctcagcaaaataatgttacgccagcagcacttttgattgctgcttattgcgccacattatccgcatggagtaaaagccctgagttaacaattaatttgacattatttaatcggcatcctgtacatcctcaaataaatgaagtacttggtgattttacctcattacaattactcgattggtatacctgtgatctttggtcaaacagtatctcaatgatgcaaaaacgtttacataaagatatgcaacatcgtagtgtttcagccattaaagtaatgcgtgaaatggcaattcaacgacagatgtctcatatagagatacctgtcgtttttacctgtgcattgggctataaacatgatgaaggttttctttctcatcattcatggctaaaacctgtttggggaatatcacaaacaccacaaacatggctagatcatcaagtatatgagtcagacggtgaattatatttaaactgggattttgtcgaacaattatttgactacacaaccattttttccatgttccagcaatatgaacatatactcactaaactggctactgaaccacaatcttggcaattgccactaaataaacttataccaagatgcaataatctcgtcatcaccccagttttcaatgccaaaaataatcaaaacacacattataaacaatctactgatacacaaaaaacaggtcagacaatacaaaaactacaacaacttgttaagcaagttattggaataacgttagcacctgaaacaaattttttcgaagcaggtgccagctctttacaattggttcaacttcatgcagcactacaaaaaaatggctatagccatattacaattactgatctgttcgctagtccaaatctaagtacattagcgcaattgctttggcaaaacacttcaccaacatgtgagcaatattccgaccgagacaaacacaaaaacaagagaaagaaacggttacaactacgaactcatagtagataa

SEQ ID NO: 291885 - DNA, 306 bp, Morganella morganii
atgttcaaacagcggttccagagccagctgccggagttgttcgatctgctcttcggtaaagtggttcttcggcgtcttcggcttcttctccttctcctgcttatcgctttctttgttcagccgcgccatctgacggccgagaaaatccatcactttaaaatcgtgcgcggtcaggtcttttttattgaggatccgcagaatgcggacatgcatctcatcactgacgcgctgaacagggtgggtttcatcccatttatcccgtctgcgccacgaatagagcgtgttggcgctcacaccgaggtgtga

SEQ ID NO: 291886 - DNA, 225 bp, Morganella morganii
atgaataaaacattaggccagaaattggtaggaatcagctttaacccatcagcgttacctgctgttgatgaagcgaaacaaaaatcagcggagttaatcgacctggttcatgcaaatatgctggattcggcttcagaagaagccctgatgatccataacgaagcgctacgtcgcatcatggatgctcagatgtgggccgttaaggctatcacctggaaggattaa

SEQ ID NO: 291887 - DNA, 174 bp, Morganella morganii
atgagagaagtatggaaaattctggaaggcctccgtagagaggaggccgaaaaattcgcaaggataaaaaaagtacctggggagatgaggaataaaaaatgcccttgcggcagtggcagaaagtccaaaaattgccagtgcgatttgtttatgggaataccctttgccggttaa

SEQ ID NO: 291888 - DNA, 186 bp, Morganella morganii
atgtttaaacatgaattaggtcaggttgtgcaggtcaccatcagcggtgaagaaggtcatgtgaaagctcgtgctgaatatcataacggtccgaatcagtatctcattcattatctggcagcggatggccgtggaactgatggctggtttgaggaaggtgagctgtccccggcagaaccacaataa

SEQ ID NO: 291889 - DNA, 642 bp, Morganella morganii
gtgaaaagaaacatcgcaatttttgcattttttctcagctcttgtttttcatcagcggcagtcactaatgggaagaaaataacagcaccacttggattgaagtggggaatgactaaaagcgagattgctaaaaaagaagggtatataaaaggaacaggtcccagggatggagttgagcagtttttaatgaaaaatacagatagtaaaattgatgggttagacttgtataacgttggagttgatgaaaaatatgggttaactaatgttgacatgatgtttttcataaaaaatgacgaaagcggtgaaaaatctattgcacaatataatgctttaaaacgagttttagtttcaaagtatggagagcagtactctgaggaatatttgtggcgagataatagcgaaggctcaatatcattagctgcctgtatttataatgagcgatgtggtaaatatacatcgtcattttgggataatgatggcggtaacgtcatgctactgttgcttgcggactcatatggtgagcacattaagatttttttattgtataaatcacctgcaattaaaaaaataaaagaagaagccaaagccagttctgaaagagaagtgcagaaaaaagcacaggaattatctgactcgctataa

SEQ ID NO: 291890 - DNA, 330 bp, Morganella morganii
atggaaacattcacctggaaagtaaaacccggtatgaacatagagagcgaaccccgtgttcgctctgttcgtttcggtgatggttatgagcagcggcgatctgatggtctgaattcgttgctgaataaatacagcatcacactgtccccaaagaatgctgatgcgcagattatcagggcgtttctggaaaaacatgcgggtgtgaccgcatttttctggaaaccccctcatcaaatgcatgtgatcacggtattatgccgcaaatggtcattttcagttggtgcactcagaaccgagatcacggctgaatttgaagaagttctgtcataa

SEQ ID NO: 291891 - DNA, 1170 bp, Morganella morganii
atgacaaacatcattgagcaagtgattaaagctggaggcaaagcaattattatcgacccgacgggggaatatgagtcactgggctgtgatagttattatgttggtaatcatacaaatgcaacaccgttgaatcagttaacttttccacattggcagtttacagactcagatattagagcatttttaaggccttcagcgcaaagccaagcgcctaaattagaggcggctattgagagtcagaggcttgtttcacactattatcagaataactatttggggttaggcattacttcagagtatttactgaataagtcagggcagctgaaagcgacttataaatctgctctcgtacaaatgaatagccataatcagcttttaccatggtcatttgcacttacagcagatcaaattgagtgtgagtgtgtgtatccaacagcaaattatgggaaagaccctacgaaatggggagaaaggtctgaggcagacgttggtcattgcctcaatttaatttctcggatgaaagcatacgctagtaatacaaacttaaaatggatgattgatgctgctggtgagctaaaaacgttgcctgacttgattgatgaattctgctcattagatcaaaaaaacaatgtcattagactggatttgtcggcagttccatttgaagcaaactcaagagaaatacttgttaatgccataggtagaaagttgttatctgtagcgaggcaaggcgcaataaatcatggtgcacctctattagtatttattgatgaagctcatcaatttcttaataagcgtatcggtgaagaaacgaatagatttgagttggatgcctttgggaatatagctaaagaaggtagaaagtatggtttgaatactatcattgctacccagcgccctcgagatattcctgaagatgttttaagtcagattggtacactgatagtacataggttgactaatcagctggaccaagaaattgtaaaaaaagccgttggtgctattgatcaacgctcagcctcttttctgcctgtattgggacaaggagaagcgctgttgttaggagtcgatttcccattccctatgacagtgaaaatgaaacgtcctataaatgcaccaacttcgaaaagtgctagcttttctaaaagttggaaacctttgcaaaattag

SEQ ID NO: 291892 - DNA, 771 bp, Morganella morganii
atgaccgccattgttttccctcatgtttactgtaatgacgggattattacggatttatccggttatggctgcattcccggaaaccttggtttgggagaaaaatttcagccgaagggaaactaccttcctttcaggacggttaacaaattaccgggacgcggatttaccggtgcgttctccggtgatgtgaacacaacttatgtcaaaggaatatcagtcgcatcggcagccggagaaactgataccggtcagttctatgtcgatccttatgctgtgctgactgtcagatatctgaacagcaatggtgcgatacaacaaaaccgtattgtggggatcccaatcggagcaaccatagaatggcagtcaacagccgctatccctgaaaactttttagcgaatgacggccgttcattcagtgcatcagtttattcggagcttgccaaagtctttcccggactgaaacttcccgacgaccgggggctgtttaaacgggcgctggacagcggaaaaggctatgactctgggcgaacgttgggcagcgtccagagcgacgctatgcggaacctgaccggccgctttggtaatccgacgattgagggcggggatttttccgagggggtattccgtcactccgtcaattccggcggtcgcgcagccggagcaggaggaaactctatcgcatactcctttgatgcatcccgtcaggtaagcacagcaaatgaattcagaccggtaaataaagcggttatttatattacgagggttatttaa

SEQ ID NO: 291893 - DNA, 618 bp, Morganella morganii
atgagatatggcgcacaggtttataacaacggaacggaggaaatactctcaccctatgaatcctccgttttttataaaagaatgagaataaccccgggggttacccggctgtttctgagcacagagcaatccacgccgcttatttttatccgtacggtgagctttaccggagtatctctgaacggattgtgtgacgttactgtggtgaataattactggtgcgtcgatcttaaaggcgatcccggtatgccgtttgatatttatatttttgtaaaatcatcttattacgtttctgtcttccctcaaaaatgggggatacgtatttataataatggcttactgacgcacgcatccagtcaaaggccactgcggatactgacgggaaataattttaattctcagtctggtcaggcagacaccggagttccgtgtgcagttttaatatcaacacttggtattcttggtcttcaggatgatcacggaggtaaaacggtaagaattaccgggtgtggcgctggcaacaaagcgatatggaattcaatgattgttgccgggcaaatgtcgtctacaaatattggtagtcagtatttttatatagacaccagggaatacatttaa

SEQ ID NO: 291894 - DNA, 261 bp, Morganella morganii
atgtcatggggaatagaaatatatgatactgacgggaagccaataaaagttaccgggacaagttttgttctcgatcagtttagtgtgacgagtgacggatcccgaacttattcaaatatccctcaaggaaaaacattatcagtttccgcaattaatattaatcccagcataaccggtacacttattaatacaaatggtaatactgtcagttggaaatgtggcaataatgctaatgtagtaataatggtgatgatcacatga

SEQ ID NO: 291895 - DNA, 255 bp, Morganella morganii
atgaaaaaattaatagtgattataactgcaataatggtatccgggtgtgcaaccagttacgaaaaagtaaactgcacgggggtttaccggattaaaacaccaggcatggataatgatgtgctcgttaaatttgatcagcgccgacagaccagacggggagatctttatcatcaggttcctcagcttggatttaaaattaatggtgggtgggtaaaacctgaacatattaaggagtttacatgtcatggggaatag

SEQ ID NO: 291896 - DNA, 618 bp, Morganella morganii
atgaaagcagaaattatcgaagtccgcaactacatggtcacggaaacaactgcacttgcagagaaactggacgcggtacaggttaaagctgaagacggtctggcgctggcgcagaactccatccgcgcacagtgggatatggcatctggtcaggcatcggtggtccacgatatgaaagtccggatccgttataacggtgaggattattccgccggtatggtgatcggggctgagctgaaaggtggtcaggtgaacacccttatcggttttaacgctcagcagtttgcgttttataatccggtgaaaaaatcgatggatctgttcatgtacatgaaggacggccaggtctttatgcgtgaggcattcattaatcaggcatggctcaacagcgtggttgtcactgacaaaatgcagtcggagaactatgagccgggtaaaaccggatttctgattgatgcgaagggcggtaatgctgaatttaacagtgcgacatttcgcggcacgttggatgttgattcaggggggagcactggtcgaatggttataaaaaataatcagataattgtctatgacgaaaatggtaaattggctgtgaaaattggttatctcggaggttaa

SEQ ID NO: 291897 - DNA, 294 bp, Morganella morganii; identical to SEQ ID NO: 287232

SEQ ID NO: 291898 - DNA, 186 bp, Morganella morganii
atgtttaaacatgaattaggtcaggttgtgcaggtcatcatcagcggcgaagaaggtcatgtgaaagcccgtgctgaatatcataacggtccgaatcagtatctcattcattatctggcagcggatggccgtgggactgatggctggtttgaggaaggtgagttgtccccggcagaaccacaataa

SEQ ID NO: 291899 - DNA, 681 bp, Morganella morganii
ttgggagaaaagtttcagccaaagggaaactacctgcctttcaggacggttaacaaattaccgggacgcggatttaccggtgctttctccggtgatgtgaacacaacttatgtcaaaggaatatcagtcgcatcggcagccggagaaactgataccggtcagttctatgtcgatccttatgctgtgctgactgtcagatatctgaacagcaatggtgcgatacaacaaaaccgtattgtggggatcccaatcggagcaaccatagaatggcagtcaacagccgctatccctgaaaactttttagcgaatgacggccgttcattcagtgcatcagtttattcggagcttgccaaagtctttcccggactgaaacttcccgacgaccgggggctgtttaaacgggcgctggacagcggaaaaggctatgactctgggcgaacgttgggcagcgtccagagcgacgctatgcggaacctgaccggccgctttggtaatccgacgattgagggcggggatttttccgagggggtattccgtcactccgtcaattccggcggtcgcgcagccggagcaggaggaaactctatcgcatactcctttgatgcatcccgtcaggtaagcacagcaaatgaattcagaccggtaaacaaagcggttatttatattacgagggttatttaa

SEQ ID NO: 291900 - DNA, 705 bp, Morganella morganii
atgatgcgtaaaaacattcaggcagctatttttgcacacgcagagcgtgaatatccccgcgagtgctgcggagtaatagctcaaaaatcccgggtggtgaaatactttccctgccgcaatgtcgcggccacgccggaagagcacttcgtattatcaccggaggattacgccgctgctgaggattggggtacggtgaccggtattgtgcacagtcacccggatgccaccactcagccgtcagaactggataaagcacagtgcgatgcccttggcgtgccgtggtacatcgtcagctggccggagggggatctgcggactgttcagccgcgcggtgaattaccattactcggtcggccgtttgtgctcgggtttaccgactgctgggggctggtcatgagctggttccggcaggaacgcggcattgaactgccggattaccgggtggattatccctggtgggagcagggcgaaaaccggtacacagataactggcaggaggcgggatttattcaggttgacgacccgcaacccggtgatgtgatagtgatgcaggtgcaggcaccggttgccaatcatgccggtattttattgcctgacaacatgcttctgcatcacttatacggtcacctgagccagcggataccatatggcggttactggcgtgaccgtacagtgatggtactgcgtcatgagcaactgatatga

SEQ ID NO: 291901 - DNA, 216 bp, Morganella morganii
atgtgtacctggtgcatacgcggcaaatacaaatccggtgacggctgtgattatgccgggcagaacgggtattttgacaaacacggcaaccgcgtggatgacccggcacaggatcagtgcagcggcatgctgaataccggctgctttccccgtttcgggaaaaataatccgatcccgttcggcggctttccgggaacctcattactgaggaaataa

SEQ ID NO: 291902 - DNA, 216 bp, Morganella morganii
atgtgtacctggtgcatacgcggcaaatacaaatccggtgacggctgtgattatgccgggcagaacgggtattttgacaaacacggcaaccgcgtggatgacccggcacaggatcagtgcagcggcatgctgaataccggttgctttccccgtttcgggaaaaataatccgatcccgttcggcggctttccgggaacctcattactgaggaaataa

SEQ ID NO: 291903 - DNA, 444 bp, Morganella morganii
atgatgatgatttacggtatgtttgtttttatgctggaaaccataccttaccagaacttacagcgttcaatgagctggcgctatgccaaaaatgaccgtgtcggccgttccgcaagctggcagtatatcggggcgggtgaagataaaatcaccctgaacggtgtgctcctgccggaagtgaccggcggtgatatttcgctggaacttctgcgcactgccgcctatcgcggacggccttaccctctgattgagggtaccggcatgatttacggtatgtacatcatggacagtctgaacgaaggccgggcggagttcttttcagacggtaaagccaagcggatagagttcagtatttccctggtgaaagccagtgaggatctgcgcgaacggctggccgagatggaattcagcgatttgatggatatgcttccggtgtcgttataa

SEQ ID NO: 291904 - DNA, 255 bp, Morganella morganii
atgtcagcatcctcttccggagatcggccgtggcttgatgatattgaaggtatggttatcgatcaggctgttggtagcctgaagaaatacgatatcgatgggtacagaatcgtctgtctgcactatcagaatcatatttcatgtcgtgcgattgcgaaggagtggaaaaagcggccagattacatcacgtcatatttggcacgggcggaagcctatatagcgggtgtaatccatacgacactgaaagctgcctga

SEQ ID NO: 291905 - DNA, 255 bp, Morganella morganii
atgtcagcatcctcttccggaaatcggccgtggcttgatgatattgaaggcatggttatcgaccaggctgttggcagtctgaagaaatatgatatcgacgggtacaacattatctgcctgcactaccagaatcatatttcatgtcgtgcgattgcgaagcagtggaaaaagcgcccggattacatcacgtcatatttgtcacgggcggaagcctatattacgggtgtaatccatgcgacattgaaagccgcctga

SEQ ID NO: 291906 - DNA, 585 bp, Morganella morganii
gtggcaaagcaaaagttcaaaatcaccaactggcccacctacaataaagccctcatcaaccgtggctccataactttctggctggatgatgaagctattcaggcctggtatgagtcagcaacaccttcttcacgaggcagacctcagcgctattctgaccttgccatcacgactgtgctggtcattaaacgcgtattcaggctgaccctgcgcgctgcgcagggctttattgattccattttttctctgatgaacgttccgctacgctgcccggattacagctgtgtcagcaggcgggcaaagtcggttaatatcagtttcaaaacgcccacccggggtgaaatcgcacacctggtaattgattccaccgggctgaaggtcttcggtgaaggcgagtggaaagtcaagattactctgcgcaaacttcctctggcggttgccgtcgcagcgggcgtaatgtctgctcaggcaatggctgttgatttccacggctatgcacgttccggtattggctggacaggtagcggcggtgaacaacagtgtttccagatattaataagcgaattatcttatacaggagtatga

SEQ ID NO: 291907 - DNA, 876 bp, Morganella morganii; identical to SEQ ID NO: 83939

SEQ ID NO: 291908 - DNA, 225 bp, Morganella morganii
atgtcatccgcaaagaaaaacgttgtgattggtgttctcggcacggtactcgaccggcgcggcaagaaagccaaccgctggcataaatggcggccgagtatcgggctgtgtcagcagccggatctgcatattgaccgctttgagctggtttatcagccgggtgatatgcagaccgcaggccgggtaaaagaggatatagagcaagcctcccgcagactgaagtga

SEQ ID NO: 291909 - DNA, 591 bp, Morganella morganii
atgtctaatttaggtcgtccagtgaattacgcggctcgagaggccaaaatcgaagctatccttgatgctgccgtccaatgctttgttaaaaagggctttcatggtgcaggcatggcagaaatatcccgtgctgcaaaagtcagccaggcaagtttctatcaatactttgcctcaaaaaatgaactcattctggaaattgccaaacgctattcttctagagatcttgatgccttgagaagaattgaaagtgctagtgatttcatggatgctttagagcaagaggcttatctcacaggcgacaaaacaggaactattatgtatctggagatcctcgcagaatcatccagaaacccagagattaagaaagcggtacaggattcaggtcaagagctctttgacacctgttgtgccatgatcaagaaattacaggataaagatgaggcaagttatttgctcacacccgagcagataacccactatatctttgcctacattgatggtttgtcctgccagatagcgactgcggatatcgagtattcgcgggagcttttacgtcagcttgttcagacccttcttacaccaaaaaagtaa

SEQ ID NO: 291910 - DNA, 1131 bp, Morganella morganii
atgagttcgccactttatatactcgaacgatcagttatattattaaagaaattcagcaagtatgcattggttagcctgcttgtcctattccagggttgcagcagtgaaagtatacctgagcccactgagcagaacattcgagtggttacgctcaatgaagtaggtgcaaacgcgcattaccaagaatctcgcttttctggaataacacaaacagagagcagagcgcagctctcatttggcgttcctggcaaagtgcaaaaggtgctggtagatattggtagccggttaaaagcaggcgatatcatggcgacactggatcttgagccttatcaactcgcggtcgataacgcccgttctgaagcctcaaaagcgcagatcgcgcttgaagagcaccaagcaaactttgaacggcttaatcgcctcaaatcaaataatgcagtttcacagcaagatctagacgctgctagaacgctttttttaaccgctcaagcctctgcccgtcaagcacaaagtagagtcagactcacagaaagagaactctctcaagcagtaataaaagccccttatgatggtgttgtctctaccaggcaagttgaaccctttgaagaggtcgctcagaatcaggtcatttttacattcgacagttcagcccaacttattgttgaatcatcaatccctgtatctttggcaaatgctctacgttctacaaatgaacaggttatcagtattagtcatcaagggaagtcttttgaagctgaggtgtcccacatcgcagagcgagcaagtaatggtttaagcttgccggttaaactgcgtatacaagtgccagagggcaattttttaccgccaggtatcgtggtcgcagtgaactatcgactgaagaatagcgaaaacgttctcttggttcctcacggcgcagtttatgttgaagcaacaagtaacagtgctttcttatactcttttaacggtgagtccaataccgttattaaaaaacctgtacaaattatcgatattcaacctacaggctacattattaatgctaagttgaaactcggagagagatacgtagcagccggagcggcctttatcagtgacgggcaacaggttcgtgttttaggggagacgcgttaa

SEQ ID NO: 291911 - DNA, 3042 bp, Morganella morganii
atgtcaattacaggcttctcacttgctaacagccgtttagtgctctttctgttttttatgcttacgagcatagggttggcgttatacccgagttacccgtcgcaggaagagcccacactaccgataaatgtcactgtgattaccgcttatcatcccggcttagatatttatcaaacggaatcgctattggcgcgcccggttgaacgtgctttgcgtgaactggaagaaactaaaaatatcacgacgtctattcgtgccggagagatccatatctctttggaaattaaggacggaacaccagactacgcgcaatcatggctcagagtcagagcgaaaatgcaggatgtgcaaaactctcttcccgatggtgtttctgggccttttgttaacgatagttatgacgccgttgccgtgatgactgttgcaattagtgcccccaatcacacttttgagcaactcagaaataaagccagtgagctgcgggattttctttacgatatccccggtatggataaagtcaccttgcatggtgtcactgaagagcaagtgactatcaatctaaagccatttgctgcgtccagattttcgatcaagcctaatgatatctacctgcaattgcataaaaacaatacgcttgatgatattgccagagtgaattttagcgatcaggaaagtcgtatttatgtcagaggtggctataactctattgaagatattaaagcgatacctattgtgctgccggacggcagccagttaccacttgacacgctagctgatgtaataaggacaactgcacaaccgcttaataccgccgcctatctaaatggggggcaggctattgttgttgcaggttatatgacaccaggcgttaacatggtcgatttcaatgatcgccttcgtacacaaatagcgcagtgggaatacgatttacccgcaggctttcaattgaaaatcattaccgaccaaggtgaagttgttaatcaagtcatatccaaaatgatttcaacccttttggaaacgatcctggtcgtaaccgcagtcactgttatcgcactgggtttacgcgctggttcattggtgggacttgctgtccccattacaggcattatgacattagtcgttttacgtgtgcttggtgttgagcttaatgaggttagtatcgcctcgtttatcattgcacttgggatcttggttgataacccgatggtgattgttgaggatatctcaaaacgtattaatcaaggtgagtctgggaaatcagcagccttacacgccggaaagacactgggtacgccaatgctgattgctagcctaacggttatcctggcattcgccccacctatgttcaccgataatatcactgcgatttatatgcagacgctaaccatcgtcattggcgtcatgctgatcatttcctggtttgttgccattatgctggtaccgattttggcgcagtggtctataaggaaagggaaaaacacttctgagcaaagtaagctctcgcgcttaatgatgatcatgtctcgcttttgggacaaagtcattatctggccaaaagcatttttagcaggtgcgacggcaagcctgatcctatcgttatttttatctgcgactattccagaggcattctttccaccgtctgagcgctcacaaatgcaaatatcccttgagctcccagcaggtacgcctgcaaaccgcacagctgaagttgcacaagaaatgacgcgatggcttgctgaggaacaacgttttccccagattacaggcgctactgcttatgttagtgaaggggggccacgctttatcctgggcctgaatccgccagatccggccccgcacaccgcttactttgttgtcaatcttagtaaagaaaccaatgttgcggcttttgtaagccaacttagggctgagatgcctcctgttttcccctatgccaagctcgggattaacccgtttttcatgggctccacccctccaggcgaagcagccattagaatcatcggcaacaaccatagtaatttattacaggctgctgcaacgattcaagaggcgcttagcaaagtagatggaaccattaacatcaagcaggactgggaacaacctatccccagcttagtggtaaatttagaccaagccgcagcaagctatgccggagtcacacgagaagacattttttccgctcttaggaaaaatactctcggagagagtacatctgagcttcgggaaggagagttcttgctgcctattatgctggcaatgccaacagataacgcgtcactgtcgcagttaaataatattcagattttctcacaatcttctgataaaaccgtttatttatcagaaattgctcgcgttgacacagagtttcatccgtcaattgtgaaaaagagaaacttacggccaaccctgacggtgacagcgcttaatccggcgatgacctctaaagagttggtttccaacatcgcagaaacgttggagcaagttcgtaatactggcaaagtgcaaatcgagtttggcggagagattgaagagagcgaggtaaccgcagaagctatttttgctttcctaccactttgtgtacttatgatgatcattttattcatccataagtacaactcgtttcgtaaggtggcgatcattgtactaagtatccccttctgtgccattgggttacttttagcactgatcattttcaggctgcctttcgattttatggctaatttagcgatattcgccctaataggcattattgtgtcgaatgctatgctaattatcgaacaaattgatatcgagaaagacgcaggaaaatctgagcttgaatcactcaaatcggctttaatgcaacggtttcgccctattatgttgacacaaataaccactattttagggctgcttcctttgcttatcgccaatgatccgctatggcgctcgtttaacgttgtgataatgggcggccttatttcaggcaccattgcatcctttatcgttgtgccaagcttatatgttttattcttcacaaaaaaagcagcaagggcaatctaa

SEQ ID NO: 291912 - DNA, 477 bp, Morganella morganii
atgaatgacttattactctatatcagtgtatttgtcggggcggcaattccggtgctcgaagtttggattgccgtcccattgggtgttattgctgggttaccatggtttccagctgcacttgcaggctttttcggaaatttgctttcgctgttacccataatttatgccagtgaaaaagttaagttatttatgaagcgctggcgaaataaacccgaaactgagcaagttgcccacgacataacggatcgtaaacatgtaattatggaaaaatttggtgttccgggcttggcttttctggggccatttttgattggtatccatgccgctggtgcatttgcaattgccattggggctaacagaaaggttgttatgttttggtttaccttgtcactgctggtctgttcgttactatttggatttttggcgtcattggggatcactcaaataggagaagaaaaacagcttccctttatgtag

SEQ ID NO: 291913 - DNA, 1596 bp, Morganella morganii
atgaagttcaaaggtgtagaaaataacagtgttatccgagagattggctctttatttcgccgccatgatggccctgattggcacattaatgtcaaattggcaccaggccaaaagaaacaatattttggtgtctctcaaattccggtcttagcaagacgcagggtggtcaatgcaagcgaacaaccacgccctgccggattccagtcccgtattgtgatagaaaatactcgtcattggcgtactgaacctatcgaagcctgtccaattccggtggtaaatcggcaggatgatggacagcaatggtgctttaattttgaatttggtggaacgcagtattatcttcctcagctcgaattagcgcgagtgctgttcttccaccacgcctatataacgcgtttagctttgatccccaacggactctctcaggagtttgatgtccagcgcttagataagttgagcaaagcgctcatcaatattctaccaatctgcacgctaccgctgtacgtcagaggtgactatgcattaagacgtttgttagcttggatcttattggatgatgatgtgcggcaatcttttgaaagtattgtccgttaccaacttcagaacggttatgacacagacaaataccgtctgtggcgttttcagtttgaaccaccgaagctctcaggtgctgagctgacacttcgaggtcatttcgatcaggagcgaaaagcgttttttgtgtatgagatttatggtgtttctaatctaaccggtgattgtcccgcctatgtcgattttatcgatccccgattcgctgagaggcgagcaggccaggggtatgctgttcgaccgggcccgcaatccggcccagaattggaaattgatgacgaacaagagccagatactgatcaaacagaaatccggattgaaacgccagccgtcgcatttgagtttgctaatcccattcggacaactcgcataggtaagggaaaaggacagactggctgtttgggccaggagggcgactcgtcagactctccagaaaatactggctttgaagtaagtacggatgaggccagtactcacggtacattaccttcagcagattatgatggcatggaagacaagagcgacgacgcacatctctatgcggataaatttgaagcctttaacgctatggtgctgcaattggttggcatgtcgggttaccgccacatccacagggaaatccgaaagcttcccactattgatggttactccaaacacttgcttgcagatggtaacccacgttgtctggcttttcatcgaattgaaaaggatggtcaagagtacgcattgatagaagtggatacttccgataataagaacagactatcgacactcctgttgaagccgcatgtccaatttgattgggaacgcactcttcgagagttggaaatcaggttattaaaaaaatcactggcatggcctacagcgctaatcaaaaagctctttagtgatagatataagcgtgtgcctcatccaaaatcatcatctgaaaataaaggattccttgaaaatgagtcaattaaacattgggctgagcgagtttataaggagattagattatcgtaa

SEQ ID NO: 291914 - DNA, 1506 bp, Morganella morganii
atgtatagcaccgtggccagagcaggtgtccggcaagggctgaccagcccaaagcaactgttggatgatgtcttcgaatctcgcagtattatcgcaacgatagacttacccaaccatcttgcaacgctctctcgctggcttccagaggagtttacacctgataggttgatctatagtcatagcttatttccgctttacgcaccttttgtaccagaggctcgacggcttcagtgcatgaattggttgtaccagggtactcagggtgccgctcatctggcattaggggttgccgcctctcgcattaaatccccgcgttttgtcaggtactgtcccggttgcatagccgctcaacgtgaacaatatggtgagtatttttggcgacgagaatggcaggttgccggggtggaatcgtgccctgaacacggtgtgctgatggatacgcggattgctcgccccttgattgaacgtcatcgctttatcgctgcggcacctgaacactgtcatgtgagtaaacagcaaaagggaatgggaatatctgactggataaccactcaggtgcgacggttgttagttcggcctgctcaagcatcacccagctttgagcaatggacagagcattatcgcagccttgcttatcgactgggtttttaccggggaaaagctcaagttgaccactcggcgataaaaaataaggtattaaaggtgtggcctgccgcttggttaatcctaaaccgtctgatgcctctcagttccgatattgatgactcagactggctgaaagcaatcttccgcaagcatcgaaaaagtttcaattatcttcagcatattgttgttcatcaggcattgctggatagccgctggcagatagacgatatacttgatgaagtaagccggaaaccaacacgtaaaacgccacaacaagttaaggttgtgatgcaacagtcgagcagtcaaacgccagatcaggaagcttggctcgaattgttgtcatctcgtcaaccccttcaagccagaaaaacatcaccagccttgtatgccagactttatcgaagtcatcgcgactggctgttggacgttaaccatcgttatgcacaagacaaggcaaaccataacgtaccacgtattgattgggacaaacgggatcgggaatatctgcaagcacttcgacaactggctacgtttttgaatgcaaatcaacaaggacccaggcgctcaagaaccaactaccttaagttgcttggcaatctctcaacccttgagaaaaacctccatcaactgccacggacttcggcatttttggtggctaattcggaaagtgtcccccagtaccagatccgacgtttgcaaaatgcctatgacgatttacgggttctctttgactctccgccaaggtggcgattgttgcgaaacgccggattgagtgaagaacgaatgatggagcctgccaggcagtatttggaaaatttagtggatacggaacatgaagttcaaaggtgtagaaaataa

SEQ ID NO: 291915 - DNA, 1656 bp, Morganella morganii
atgacgttacccaaaggcatggtgcaggcaatttataatgataccgggatcagtcagtaccaaggaaacccgctcattgaagctttgccgccgattctggaccggcgtcagctaaaggacgggttatcgggtcaaattacgtttcgcccaaccgacgtttatcttgatggccagacccgtattcatgtcatatctcaattacttgataattttttccagccgctatcccgtcacattgaactggagtcaaaattatcagtcatgcttcgacaagggtatgttggcagaaatctggcgacaggcgaactgaatgcccacatccagaatggttatgagcgtgtcatgcagggggatttggctgttttccggttcgagcatgtggaatccaccgctaagagtctggctttcatcggttgttctggttcaggcaagacaagctcattgaaccgtattctggcaacctatccccagttgatatatcacgaagcctacaacttcacgcagatcgttttccttaaaattgactgcccgcatgacggttcgttgaaaagcctgtgtcataacttctttcgggaaattgacgcggtactcgccacgaattacgtacgtcgctacgtggaaaaacgacatagcgtagaaaccttgattgcggtaatggcacacattgccaacacccacgcaattggactgttagtgattgatgaaatccagcatctgagtgttaagaactcaggaggtgccgagcgcatgctcaatttctttgtcacactggttaatgaaatttcggtcccggttgtcatggtggggacaccaaaggccagatctgtctttgaactggatttgcggtccgctcgccgtggtgcaggttttggttcaatactatgggagcctttaagcaagccctcaggcgagcaggaggtatcccgtaccgagtggggagccttcactggccgtttgtggaagtatcaatggctgactaaagcatcccctgaagtgaccgatgagattagagatacttggtacgagctttcacaaggcattatggatgtcgtcatcaagttgtttgttctgtcacagatccgggctgttgtcaccggaattgagcgcattacccccaccttgatgcgaaaggtatatcaggatgagctaaaacctatccaccccatgattgatgcgttacggtcgggtgatgtaacaaaaatagcgcgttactcagatctgactatccccgacgtagatagaaaaatactggagctgggacacctgctgcgctctaaccaggaaagcattgataccgtagtcaagtatgggggtaatgaacaagctgttcgtttgcacaatatgctggttgatatggggtatgcctctgagctgcttgaacctctgatcaacagagcgtttgaggatcacccgggccttgtgatgaaggaccttatgccgctgatcctctcttggtatcagaatgcagagatagaagaaccagcgtcaaccacacccaaacttaaggctgtgaggaaagctgactggcataccctggattcagaagacttgcgcttcctattctctcagtccgcaaacgaagaaaccttccaggaatcacttggccgcaacggcctgttttttgatgcccaggactgggttaattcctttgggtga

SEQ ID NO: 291916 - DNA, 2076 bp, Morganella morganii
atgctgcgaatcaatgatgttgtaatgtttgagggaattcggtatcgcattcttgatgtttcggatattcgatatacctggattaatattgattctgataaagcctttcctgagcggattcaagtatctgagattgaggaagccattctctccgagaccttaaaaatagtagaggatcccttctcacatctggctacacaacttccagaacaaggttcggtagcacagcaaatccgggacaagcgtatggccgttattgagcctttaatacaccaactggatatctattatcgcagcggtcgaggcgcactggttcagcaggttgttactgaatctggaacggccaaaaaaacaatatatgcctatcttcgccaatattggcagcgaggttgcacaccgaacgcgcttttgccggactacgataaatcaggcgggcgaggaaagaaacgtacagcttcaggaaaaaaattagggcgtccgaggagtatagctccaggtacgggcgccattgtagatactggcgttgaacgcatgtttcgcattgtacttgatcgccactacctgacggagaagaatcattctctaccctatgctcatcgacgcttcgaagacatgtttgaagcggctcatcccgatgtaccgaaagagaacttcccgacagttgctcaactacgctatttctacgagcgggaatatgtccggcctgaacgtatccggctgagagccaataaaattgaatatcaaaaggacatcagaccgttacaaggaacagccacaactggggttcacggtcctggtgcacggtacgagatcgacgcgactattgccgatatctatctgctttccgctgacagacaaaaaattattggccgaccaactttgtacgtggttgtcgatgtctatagcagattgattgcaggtttctatgtgggatttgaaaacccctcctatgtgacggctatgttggcactggtcaacgccatgatcgataaatctcagatatgccagtctttcggttatgacatcgagccagaggattggccgtcgattggactgccggacgtcattttggctgatcgtggtgagttgctgggccatcaaattgaatatctggagcaggcctttggtgttcggattgaaaatacaccaccttatcgtggggatgcgaagggtatcgttgagcggcattttcgtactattcaagcagacttcaagccgtttgcaccaggagtggttgctggaaccaccatcaaaaagcgcggcgggaaagattatcggttggatgcaacacttacattggacgaattcactaaaataattatcggctctatcctgcatcgcaaccagagttcggtattggtcaagtatgaccgcgatccggatatgccggatacactcgcacctgtaccaattaatatctggcaatggggtattcaaaatcgtagcggacggctacgtaacacatcggagtcggcgctgaagctggcattgttgcctcgtcaaaaagtaacgctttccgattacggtattcaatgcttcggtgcgttttatacctgtagggagctgctggcgtctggctggctccatagaaccgggcaacagcgacctggcccctttatggcggcgtatgaccccgcggtaaccgacatcatttatgtcttcccagatgcaacaaaatcagattattgggagtgctcgctaacagaccgctcaagggaatttaggggccggtcgatgtgggagttatgggacagccagcagcaacaacgaaaatcaacagcagcagctaaattgaaagagagggaaagcaaaagatcgctggaaaatgtgattcaggaaaccatccaaaacgcggaaaagttacgtccttcctactttggtgaatcaaaaacaggaactttggctggcatcaatcaaaaccgacgggaagcccgtgatcaggaacgccagaaacgtcgagcggataacaaggctactgagccgaaacccaaagcagatgtcaggtatttgactgatcagcccgaagatggggctttcccagattttctggatgacctgtttggagatgatgaatga

SEQ ID NO: 291917 - DNA, 819 bp, Morganella morganii
ttgaccagcttatcccttgactctcgttcacttaaatgggttaaacaaggtcgcggaaaggggtcaggaaaagactaccaaccctggttgaccgtcagagacctgccttctgctggacgatctcaccgcatctggggattccagactcaacgaacccaccatctgttgtcagacctagagctggcggcgttctttctgtttgattggaatccatctgtcactgatatccgggagcaataccctctccgattagaggataccattgagcttgcagcgcaagcgcgtatccgtcatcccgaagtacgaggacaaattcaagtcatgtccacggattttctagtggacactaataagcctgagcttcccagaatggctattcaggtaaaaacctcttcagatctttctaattctagaaccatcgaaaaactggagcttgaacggcgttattgggcgttaaaggaagttccatggtatttgctgacagaaaaacaaatccccaaaacggttacaatgaatattgcctggctttatcccgcgcagcttgttctggatgtactcgaaaatacgctgaatctggcaacactctatttaaatttcttcttacagcacccgacactacaaatttctcaagtcgcgatgatgcttgatcaggcttattcacttgcgccaggagaatccctgcaaaaaattcgttcactattggctctgagggttttcttgttcgatatcagaaaaccttggtcagccctgaccgtgggggagctacgagcgtcatcagatatttattcattgagggaacgttatgctgcgaatcaatga

SEQ ID NO: 291918 - DNA, 798 bp, Morganella morganii
atggcgagagaggcgataatcaaacatgccatcagcattcgtcttgcttgcagctgtctaggtattagcgagagttgtttttactatcaaagcaagcttaatgctgagaacgagcagattgctgattggctgcttcgattaaccgacaataaaaaacgctggggatttggcctatgcttcttgtacctgcgtaatgtcaaaggttttaaatggaaccataagcgcgtttaccgcatttactgtgagttggagctgaacttgcgtatcaaacctagaaaacgcatcaagcgagataagcctgacgcgctgagcgttccaacgactattaacgatgtctggtcaatggattttatgtcagacagtttagccagtggccgcagtatcagaacctttaatgtcatcgatgattttaatcacgaatgcttggctatagatgttgatttatctttgcctagcgcacgagttattcgatcgttagagcaaatcattgagtggcgcggtaagccaaacgcaatacgctgtgacaatggccctgagtacatctctgaaacaataaaggactgggctaaagagcagcaaattaccatgcagtatatccaaccaggcaaaccgacacagaatgcttatgttgagcgttttaaccgaacagtgcgtcatgaatggttagatttaaacatctttgacagcattgaacaggctcaagaactcgccacacaatggctttggacgtataataacgaacgccctcacactgctatcggagtagtaccgccaaggcagttattacaggtagcttaa

SEQ ID NO: 291919 - DNA, 267 bp, Morganella morganii
atgcgtaaatcaaaattcactgagagccagattatggcaattctcaaacaaaatgaggctggagttccagtccctgagctatgccgtgagcatggtattagctcagcttcgttctacaagtggcgctcaaaatatggtggcatggacacttcgctcatgaagcgcatgaaagagcttgaagaagagaaccgtcggctcaaaaaaatgtatgcggaagagcgccttaaagctgagattcgattggaagctcttgagggaaagctctaa

SEQ ID NO: 291920 - DNA, 648 bp, Morganella morganii
ttgtcacacttgaacacacgaacgccgtccggcgatgacgtgactcagcgtagcgatatgaagccagcctttagcaacgatctattcgagcacgtgctgcaggaagataacctctctgcggcatggaaacgcgttcgagccaataaaggggccgctggcatcgatggcatgaccaacgatgaattccccgcttgggtaagatccggcaactggaaagcattgaaacaacaactggtaacaggctgttatcaaccctcaccggtaaggcgtgttgaaatagctaaaccagatggcggcactcgtcagctgggtattccaaccgttactgatcgtgtaatccaacaagccattacccaagtattaacacctattttcgaccctgagttttctgaacacagttttggattccgtccaggtcgtaatgggcagcaagcggttaagcaggtacagagcatcatcaaggaaggacgccgcttcgcggtggatgttgatctgtcgaagttctttgaccgagttaatcacgatttactgatgacgcgccttggcgacaaggtgaaagacaaacgtctgcttagactgattaaacgttacctaagagctgggtttatcgataaccagctcttaggcgagagtcgagtcggtgtgtaa

SEQ ID NO: 291921 - DNA, 1089 bp, Morganella morganii
atgaaaattcaagcagcggtaacccacgcccagggcgcggacttcgctatcgaggaggtgaccctgtcgggtcccaaggcgaacgaggtgttggtcaggatcgtggctactggcgtatgtcataccgatgcggtgggccgtgatctgggcgtgtcgccttatcccatagtgctgggccatgaagggtcgggggtggtggagcaggtgggagagaacgtcaccagtctggcccccggtgaccatgtggtgatgtcctttgcccattgcggtcagtgcgagaattgcctgaccggccaccccacggtgtgttcgcgtttcaatgagctgaatttcggtgggcgcatggatgaccatacctgccgcctgcaccagggcgataccgacgtacataccttctttggccagtcgtcctttggcagccatgtggtggcccatgagcgcaacgtggtgaaggtggacaaggaggtggacctggcactgctggggccgttgggctgcggtatccagaccggggcgggcacggtgctcaatcgcctgaagcccgattttggcacctccatcgccatatacggctgtggtgcagtgggtctgagcgcgatcatggcggcgaaaatcgccgggtgtcagcagatcttcgcggtggatgtacatcagaaccgtctggatctggccagagagctgggtgcgacccatgccttcaatggcaaggaggtcgacgtggtcgatgagatcaggaaggtcagcggcggcggggtacattacgcggtggaaagcacgggtgtgccgccggtggtgcgtcagagcatgcacgcgctgcgccccctgggtgtggtggcgattgtcggggtcaccccggaaatgaacatcgacgtgcacaatgatctgatggccgaaggcaagagcatgatcggcgtgatcgaaggtgattcggtgccccgcgtgttcattcccaagctggtcgaattctacaaggcgggcaagttccccttcgacaagctggtcaagttctacagcttcgaccagatcaatgaggcgttcgaggcgtcagccaacggttctgttgtgaagccgattctgaagctggcctga

SEQ ID NO: 291922 - DNA, 1572 bp, Morganella morganii
atgtctgaacaaaatacttcgctgctgcccaaaggggtaacgcaggaaaacttcgacaaggcagtggaaaaattccgcgccttgctgggtgatgaaaacgtactggtagagcagcagcaactggtgccctacaacaagatcatgatgtcggtggaaaatgccgcgcacgccccttccgccgcgctgaccgcgaccaccgtcgagcaggtccagggcgtggtgaagatctgtaacgagcacagcatcccggtctggaccatttccaccggccgcaacttcggctacggctcggccgcgcccgtgcagcgcggtcaggtgatcctggatctgaagaagatgaacaagatcatcaagatcgatccggagatgtgctacgcactggtcgaaccgggcgtgacctacggccagctgtacaactacatccaggaaaacgacctgccggtcatgctgtcattctccgcaccctcggccattgccggcccggtgggcaacaccatggaccgtggcgtgggctacaccccctacggcgaacacttcatgatgcagtgcggcatggaagtggtactggccaacggtgacgtctatcgcaccggcatgggcggcgtaaaaggcagcaacacctggcagatcttcaaatggggctacggcccgaccctggacggcatgttcacccaggccaactacggcatcaccaccaagatgggcttctggctgatgcccaagccgccggtgtacaagcccttcgaagtcatcttcgaaaacgaggaagacatcgtcgaaatcgttgatgccctgcgtccgctgcgcatgaacaacaccatccccaactcggtggtcatcgccaacgtgctctgggaagcgggcagtgcccacctgacccgggcgcagtacatcagcgaaccgggccacacccccgaccacatcctgaagaagatgcaggacgacaccggtatgggcgcctggaacctgtatgccgcgctgtacggcacccaggagcaggtcgacgtgaactggaagatcgtcaccgacaccttcaagaagctgggcaagggccgtatcgtcacccaggaagacgccggcgatacccagccgttcaaataccgcgccgagctgatggccggcgtgccgaacctgcaggaattcggtctgtacaactggcgtgggggtggtggctccatgtggtttgccccggtcagtgaagcccgtggcagcgagtgcaagaagcaggcggccatggccaagcgcatcctgcacaagcacggtctggactatgtggccgaattcatcgttgccccgcgggacatgcaccacgtgatcgacgtgctgtatgaccgcaccagcgaggaagaaacccagcgcgctgatcgctgcttcaacgagttgctggacgagttcgagaaggaaggctacgccgtgtaccgggtcaacactcacttccaggagcgtgtggcgcagagctacggtgaggtgaaacgggatctggagcacgcgatcaagcgtgcggtggaccccaacaacatcctcgcaccgggccgctccggtatcgacctggacacctacaagaaggcctga

SEQ ID NO: 291923 - DNA, 765 bp, Morganella morganii
atggatcagagaatatttgattttaaaaaaaataaacaagaagctgttttatcatcattatcagaagagatgaagggtatacttgctaattatgtaagggagtcaaatgtgatttctcagaaattagatggaagtttcccaataagattatttgagcgcgaaaataaaaattataacacaacaatgttaaaagaaaggttatatggattaactagcgagaaagaaaaatatatctcatatggattattagaggaaagctttgtagatgataaacagctttcatttgaaatgaaagacagaggaactcaagataagcttgctgtgcttgaattatatttagaagactcattcgaaaaattcaagccatatgaatatcttttaaagaaaattaagttatttgaagatatgataaataaacaaggcttagcatttaaaaaaatacatgttcatcgtgattatggctttttgataaaatctataagtgacgaaattatagaattatcatctttatcatccggtgaacaaaatcaaataatattattatataatttgattttcaagacgaattcgtatgatcttgttttaatagatgaaccagaaatatcattacatgttgcatggcaaaatcaaattattaaaaatttagaaagaataatgaaagtgaataatattgagcaatttattgttgcaacacactctccacatgttattgatggaaattggaacttaacaatagatttatttgaatcaagaggtaaaaaataa

SEQ ID NO: 291924 - DNA, 519 bp, Morganella morganii
gtgactcatgaaaaatatttgtttcgagagcgttcaccacatagaacatgcaccgctgtatactctgactatcgaagatataaatctcaaatagcttcagattttaactatagatgtgcatatacggatagcccagattatttttttggtgggaaacgttgttttcacatagatcatattaaaccaaagagtaagtatcctaagttaataaatgattatactaatttggcatatgtgtgttcatatgtgaatataaaaaaatccaatatagagatgattattcctgatccgtgtttaatagattggaatcttattttttatagagatagttacggtaatataaaaccgaatattgaaaattttattctagaaaaattatttaatcaaaagcaaaaactacatgaattatgtgagagcttaggtgggtatgaacatgtggacaaagatatcttgatattaatagcagaattagataagttataccataagtattataaatatttacaaattgagctttga

SEQ ID NO: 291925 - DNA, 1695 bp, Morganella morganii
atgacgtccattatattcagaggtatagggaataatagtttttcaacgtggaatttccttaaggccagagcgaaacgcattgtcccggcacttaccactgtaataattatttgtctgttgttcggatatttatgctttgatgttatttcatacaaaatactagggcagcattcagcaggaagcttgacatttatatcgaactatatataccaatatgaatctggttatttcgatgagtcatctcgcaataaggtcttgcttcatacctggtctctatctgttgaatggcaattttacattatatatccaattattttatctatattaagcaagtttatatctatagataaattaaaagcaaccgtgctttttcttatgctggcatctcttttgtggtgtatttatatctcgcaaaaagaccctgtatcatcatatttcatgatatattcaagagcatgggaaatgatgctcggaggactggcatttttatacccaataaataccagtgatagaataagaaaaattatagaaataattggactattattaatagctgtatcattttttattgtcaacgaaacaatgtcatggcctggctattatgctgttattcctgtgattggcgcatatttttgtattctttctggcaataaaaaaacaattctttcttggaggttaatccaatacactggtttgtggtcatattccatttacttagttcattggcctgttttggtttttcttggcagatttgatatacagcctccattcatattgtatttatccggagtttttctgacttcacttgcaatttaccaattggtcgaaaagaagagagattaccattatggcatgcttttaatttacattgctacactagccttctcactggtaatttattttaacggagcagactggcggcttaccaacaaacagtatggtatgaacagaaacgaatttagaaagaactatgaagggcacctatggatgcattcaaaagaaaccatagactatttcaatgctgatgaaaatgattttgattacatagttcttggggatagtcacgcaagacattattatgcttacttcaaggatagcggattaaaggttgcgtcattagcaaccgacgggtgcaaagtaactaaaaacttcatgacacctatcgattattcagaaaacataaaaaacatatgtactaatcgatacaaaaaagcggttgattttatcaattcacatccaggtaaaaaaataatatggatgcaagcgtggtactctggtcgcgtcggtgaaccgctgagaaaagatgttgatagcgaaaacaatttcgttagtgagattggttattttcttgatgatataaaatcatcaaactcgaaactatatataattggtgatactcagggcagcaaaaaaataatgtaccaatgcctagcaagcaaagacctgcctatcaacaggatattcacaaagtgtgaggaatttcaagaatttaaaccattcaaaataaatgaaaggttttcttcccttgctgattcacgtgatgatgttgtatttattgacccttccccagctctttgtgacgatgagaagtgtaaggtattagacggtgatgaacctgtgtatacagataattcacaccttacaataaaaacatcaaaaatcgttggtgagtatattttcgataaaattaaataa

SEQ ID NO: 291926 - DNA, 933 bp, Morganella morganii
atgatatttggcgacacaactttagtgccatataagaatggtcttagcaaaccagaaagtgcaagtgaagaccgacattatcctgattttgagtattgcgtaacagctatacatatgaagtcaaagcttgtgtcagcaattacaaaccactcgattgcatccaaaaaactccttgatgcagatccagaaaaagaagaacaaaaacactatgaatctcgcaaatcttttgaatctctttttgattttgaagagtcaacatccaaacaaatcagagttgaagttgacacagaatctctttctgatgatttgtactgcctatctaattttgatggaaaaatggtggctgtaaggccgaaatctatacatctgattctaaaagaatcaaacccaggaaacgcaagggagaaccttgtcggttactgttacttcgatgacaagagagaaaaaaaagagttttcgacaacccaaggggctgactctcttgaaatatttcttcctataagttcagatgtattctctagtatttttatggggattaaaggcggagataacaccatttgtgcttcaatttattttcctgcgtatgctgacacccttgacagaatgtcaggattagttgctccatctacatgcgtgatagacgcctcatacatgggagataatttcgcagtattagataatgtatcattactagcgcaagatatttccatcgagagcaatgaaagtgaaggcgtagaagtagatcaacatgagccacacgtaggcaattccatcaatgaagaactcaatgaaatctcctataaaatagggaatttagacctaaatacccataattctaccgctctgttaacatcaataaattccagcctgaaaattgtatctttcctgctgatattattggttgctttgtttttatttaaatttgtatggtaa

SEQ ID NO: 291927 - DNA, 1500 bp, Morganella morganii
gtggaaaatctggatcagatacttgataacctgagcgacgacgagcaatacgaattgcttgagttgctggaagaggaagaagccgaccgaagtacccacctgctatacgaattcaccccctacagcaaacagcgagactttatcgacgccgggcacgactacccggaacgatgctttatggctggtaaccagttggggaagtcatacacaggaggggctgaggtagcattccacttaacagggcgctacccaggcactaaaggatatcctgatgatggcaagtacggcggaaagtgggaaggtaagcgattctatgagccagtagtgttttgggtcggcggcgagactaacgaaaccgtcaccaagaccactcaacgcatactctgtggtcgtatcgaagagaatgacgagcctggttacggggcaattccgaaagaggacatcataagctggaagaaatcgccgttcttcccgaacttggtagaccacttactggtaaagcatcacacggctgacggcgttgaagacggcatatcaatatgctacttcaagccgtactcacaaggccgtgctaggtggcagggtgacacaatccacggcgtatggttcgacgaagagccgccttacagtatttacggcgagggactgactcgaaccaacaaatacggacagttctcaatcctgacgtttaccccgctgatgggcatgtctgacgttgtaaccaaattcatcaagaatcccagcaaggcgcagaagatggtcaacatgactatctatgacgctgaccactataccgacgagcagaaagaacaaatcattgagtcatatcctgagcatgagcgtgaagcccgtgccagaggtattccgacaatgggcagtggtcgaatattccagataccggaagagacgattaagtgccagcctttcgagtgcccggatcacttctacgttatcgatggtcaggatttcggatggaatcacccgcaggctcacatacagctgtggtgggataaagatgaagatgtgttctacctggcaagagtatggaagaagtcagaaaacacagccgtacaagcctggggcgctgtcaaatcttgggctaataagatacccgttgcctggcctcacgatggacatcagcatgagaaaggcggaggcgagcagttaaaaaaccagtatgcagacgctgggttcttgatgctgggagaacacgccaccttccccgaaggaggtaattctgttgagtctgggttgatagaacttcgcgatctgatgctggaaggccgattccgtgtattcaacacatgtgagccattctttgaagagttcagactctatcaccgagacgagaacggaaagattgtaaaaaccaacgacgatgttcttgatgccgttcgctacggctacatgatgagacgcttcgcaaaaatgatgcgcgatatcaaaaagccaaaacagaaagtaattcccgccccgattaagcctatcaggagacattaa

SEQ ID NO: 291928 - DNA, 723 bp, Morganella morganii
atggatatccaactttaccacgggtgttgttttgacgtgctgccaacaatcgaaagcggcaccatcgatatggtttgcgctgacatcccatatggtaccacagaatgtaaatgggattcagtattagacctgcagcagatgtggaaagagttgtacagagttgctaaaccagatgctgcaatagttttattctccgctcagccattctcgagcgtattagtgggtagtaacttaaaagactggaaaacagaatggatctgggaaaagggttctgcaactggatttttaaacgccaagaagcagccattgagagcccatgaaaatattcaggttttttatcgcaggttgccgacgtataacccgcaaatgacacatgggcatgaacggaaagtgtcaaagaggaaagatgttaactcagagtgttatggaaatgctctatctctgactgaatacgacagcacatcacggtacccgcgaactgttcaattcttttctagtgacaagcaaaaagccagctatcatccaacgcagaagccagtctctctggttcagtacctcatcgagacatattcaaataaaggcgaggtggtgttggactttacgatgggcagcggtaccgcagctgtggcctgcaaagaaagcaataggtcattcattggtattgagcgagagttgaagtactacaaaattgcacaaaagagagttaatgaatcagggggataa

SEQ ID NO: 291929 - DNA, 138 bp, Morganella morganii
atggaattaaccaaagaagaacaggctcttgttatcgagttactggagcggcttttcgaggaaggattcggcggagaagttgaagaccagctttatgaccggttgaaggcagcggctaatgatgcggaggaatcctga

SEQ ID NO: 291930 - DNA, 171 bp, Morganella morganii
atggacggagcagtttacaaaattaccggattatggaacgggaaaccgtttgaaaagctgatggaagctgaatgcgaaatggacgcagaggcaacggtaatattctgggctaaccttggtggcgccagggtggatgatttggttgtcgtgtatcacggtgctatccattga

SEQ ID NO: 291931 - DNA, 273 bp, Morganella morganii
atggaatttaagggtacgccggggccatggtacacaagtaatgaaggccgattactggtaagggatgaggaatggcaatgcgttattgctgacggtatcggctgtaatggtgacgaggaagaagtggcgaacgccagactaatagccgcagcacctgagctactggatcagttaatccgattgagaaataaaatagctgactatcatcctgacgacgatgaccatcttgatgttgtcgacgcagtaataaacaaagcacttggccgcgaatag

SEQ ID NO: 291932 - DNA, 468 bp, Morganella morganii
atgaaatacgaaacaacttcattaccgttcgcgccaaactttgaaaattggcctgtaggctcgactgagcgcttagtccatggatattggcagttgggtatgatgagattgcacacactgtctatgaactgtagtaaagattttcaagacagatacaatcggattaatcacaaactgggtgcagatacggcctatattgatcttctaaagttagatgaagaccagtatacaactcacttactaaatattattcaaaacgataagcggccagcttggatttggttcattaattgtggagctctgctgaatacgtcgatagctggatggctaagatctattcttactactggcaacgtggagcatattcgagttacttttcttcttgatagccaagaccaatacaatcttatattccaagattattcagcacctctttacaagtccactactaaacttatgaccaattga

SEQ ID NO: 291933 - DNA, 1200 bp, Morganella morganii
atgagtgattttcatcatggttttggtcctatgcctgatgaatcgttaaatagttttatttatagagttctacggagaagtggccataggtgttttcactcaattctaatggctggaggatggggggataagccaagtgtacccttatcagcaaagcatgaatttaagttccttgaccgatatcttaaactcgatctatatgagaggacgtttaggcaggaaaagaaccaagtttcgatcttttctaatccaatcagtcatgtgaataatcttgataagacattttctccaacaaaatatgtgaaatcttgtgggaatactattcaaattaaattctgccgaaagtgtattgatgtgcaaataaaagaatctgggttctcatactttaaatatgagtggctatatgaagatttttgcaaagtccatcaaagtattcttcatgctattgactcaagagtaagcaggaaggaaatatttgaggtcgtacaatatatattgtctggaaactgcgtcgataggtttctttgcaaaacattggatggtttttatgcatatacaagttggcctctgagcaaatccgaaataaagtttgcgccatgcgttaaaccattacttatcaatcactttaagtcaaaaagcacttgctatcataatggttatacagaattggtggattatggttatctaacgaataaagagcgtcaggctattatcaaacataagcgatctgaagaaataaaattttcattggaagagtacttggatttctatttagaatttgattatgaatcaattattgagtttctgaaagagcaattaaaattacagtcattctccttagctaaagctaatcttcataagagaatatataaagtttggaaagatcgaaaatctaactgctcactctgtaaaattaatataaactttggtgaaatgtgtccagtggctgagcagtctcaagtttacttcaaaaaagcagtttctattttagatgtacatataccaccaagaaatatttgtgaagataaactatctgagatgattgataaagtttattcacatcaagagaatataggtgttagagatggtgagattctagtaaggaaaaatattgaaaaatatgaattacactcttcttatggaggagagaaagcatataatgaatacgtatcaaaggttttgagagatttaaagttttga

SEQ ID NO: 291934 - DNA, 792 bp, Morganella morganii
atgacttctgttaaccataatgaaggcaatgtcgaggaatacagcttcatctatggtgatgaagctgttacctatgaagtgatccgcaaggtatttgctttagataaaaacggtgaagctaagaaaaagaaaatcaccattcgagtgcatccagattgccgagtggctgttactgcgcctcaagatgctgaaaaatcagcaatccatgaggcggtcatgcaacgcgctcaatggatttggaatgcactggtcgagtttcgatctcacttagaatatgtgcaaaccaaacactatgtgagtggtgagatgcagttctatctaggccgtcgctatgtgttaaaggtggtagaagacagagatgccatttccaacgtgaagatggaacgaggcaagttgttagtcacactcaaccgctttaacgaagataagccaaagctagttaaagcgctgctatctggttggtatggcgttcgtgcagagcgcatattccatgaacgtttagctgagcttctgccacaagcaacgtgggtagagggcatcccatcatttcgcattatgccgatgcaaaaacaatggggaagctgctcagccaaaggtacgttgatgctcaaccctcacctgatcaaagcacccaaagagtgcattgattacgtaatattgcatgagctctgccatattgcggaatacaaccatagtgaacgcttctggcgattgttaaccagcgtgatgccgaactggaaagaagtgaaaagtaagctcgatggaatggcggagttgtatttgaatgagtga

SEQ ID NO: 291935 - DNA, 3297 bp, Morganella morganii
atggaaccattatcttctagtgaacctaagcatcacgcaccgaatttcaaagaagagcaaagtgcaaaaatcccagcgttaactttgctcaccaaccttggttatcagtttattccgccgagtgaatgcatggcgatgcgtggcaacaaaaccaccgtaattttgccgcaggtgttacgcaaagtattgagctttaaaacttattcattcatgggtaaagagcgccatttatcgaaagctgcaattgataaaatcgtacaagaactggctaaccctgctatgaatgaagggctaaaagcggccaatgaaaagctctataacgcgttaacttatggcattagcgtaacggaatttgtcgagggtaaaaaagccaacccaaccattcaaatcatcgattgggacacgcctgaaaacaaccaatttcatttcaccgaagagatggaagttgataacgcccgtggtacaggtaaacgcattcctgatgtggtctgtttcgttaatggcttgccgtgggtggtgatagaggccaaacgtcctgatagcagcatcaatggcaaacccaccatcaccgaaggtatttcgcaaaacatccgcaaccaaaaagtagatgaaatccctcatctgtttgcttacagccaactgttgttgtccatcaatggtcatgatggcttatacggtacgtgcggcacacctgagaagttctgggcgaaatggaaagaagaagaaatcaccgaaagcacctttgaacgccttaagaacacgccactgaatgacgcgcaactgaatgcgattttcagccatcgcacgccagcaatcaaagacgaatatctatcactgattgcaggcggtgatttggtggtgacagaccaagaccgcttattggtatccttgttgcgccatgaccgcctactagagttaacccgtctatttactctgtttgataaaaaagcaggcaagatcgttgcgcgttatcagcaagtatttggcattaaagctttagtggaacgcatcacctcttttgatgacaaaggcgcacgtaacggcggtgtgatctggcataccacaggttcgggtaagtctttcacgatggtgtttttgtcaaaagccctgatttggcttaaagcgttagcgaaatgccgcgttgtggttgtgaccgaccgtgtggatctagaagatcagcttgctcgtacctttgcttctggtggcgcactgtcagataaagacaaaaaagaggcaatggcaaccacaggtaaacgccttgcagagcaaatcggtaaaggcaatgagcgtatcatcttctcgatcatcaacaagtttggtacagcgattaacctaccggaatgctacaacgatagcccagacattatcgtattagtggacgaggggcaccgtagccaaaacggtgagaacaacattcgaatgcagcaagccttgccgaaagccgcttacatcggtttcacaggtacaccactgctgcaagacgataaaaccgagaacaagttcggtaaaatcattcactcttacaccatgcagcaagccgtcgaagatggcaccgttacccctttgctttatgaagaacgtattcccgatctgagcaccaacgacaaagccattgatgcatggtttgaccgcattaccgatatcctatcagaaaagcaacgcgcagacttaaaacgcaaattcgctcaaaaaggtcagatttaccaaaccgaagggcgtttagagttaattgcgcacgatatttcggatcacttccaaaacttcaagcagcaaggtttgaaaggtcaactggcgtgtgattctaaagcctctgcaatccgttataagaagctactcgatcaaatcggcaaagtcacttcagtggttgcgatgtcgccacccgatacccgcgagggacacgataacgtcgataatgaaagtaccgatctggtgcaaaactggtggaaagagaacgtcgcacaaaaaggttgggcagacgagaaagcttacactaaacacatcattcaagagtttgaaaaagatgaaggccccgacattatgatcgtggtcgataagctgttaacgggctttgatgagcctaaaaacaccgtgctctatatcgacaagccgttaaagcagcacaacctgattcaagctattgcacgggttaaccgcctgcacagcaaaaagcagttcggttatttgattgattatcgtggcatcctcaaagagctggacatcaccattgagaagtaccaagacttggctgaacgtacccaaggcggctttgatatcgacgatctcaaaggcttgtataaccgcatggataccgagtacaagaagttgccaggtttgtatgatgacctttgggccattttttctgatgtgaagaacaagcaagacggacaagcacttcgtcaggctttggcaccaaaaattgataccattgatggtcaattaaccgataccaacttaaagctgcgtaatgatttttatggtgcgctgaccacgtttgctaactgcctaaaggttgccctgcaatcggcgacgtactttgaagataagagcttcgacaataagcgagaactatataagagtacgctgaaatccatgagtcaactgcgccaacaagtacgcgcagatgcagaagaaaccgtggactacgacgagtattcggaaaatattcgcgccatgttagacaagcacattgcgggggtctcgattgaagaacccgaaggcgcttatctggttggtaacatgggtaaagatgccaaaccagagcaaatgaccgatgatgaggctaaaaacaaaaaggatgtcatcacaggtcgtgtaaccaagatgattgagcaagatttggcagatgatccgtatgcccaagagtatttctcaaacttgttaaagcaagctatcgagaaaaccaaggagatgtttgatagcccagttaaacagtatcttctattcgcggactttgagcagcaggttaaagaccgtgatgtggcaggtttaccaacggatcgctttgcagagcttgaccctaaaataaaacgccatgttcaagcttactatggactgttcttaaaagtgttgggagagacgttgcctctgagtgaagagcaatgctttcagtatgcgttagacattgatggtattgtgcgtaaagccgttgctgagttttcaattaacccatcggagattgaaaaccaaattcgtttaggactgctgccactgctgtttaatgatgttggtatcgacaaagcgcaagccattattacggatgttattcaaatcactcgccttggcttatcaggtcactaa

SEQ ID NO: 291936 - DNA, 1188 bp, Morganella morganii
atggtgcctaatgggtggcaaaaagttaaccttaaaagtttgctttctacaacaataaaaaacgggtattccccaaatgctgtagaacaagaaacaggatatgttgttcttggtcttggtgcgttaaccgacaataaacttgatgcaagaaatatcaaaaatgtcgaagcaacagagcaggtactgaagtcccaacttagccacggtgatttcttaataagtcgctcaaatacaccagataaagttggtcgttcttgcatgttccgaggagaggtagcgaattgttcttatcctgaccttatgatgaagtttcgtgccaatgaggtttttattgaacctgtatttttagaaatttatcttcaatcatcacgtacaagacaatatttccaaaactgtgccgctgggagcagtagctccatggtgaagattactaagtctgttgtcgagaaggctccagttctgctcccaccactcctagaacaacgcaaaattgcccaaatcctttctacatgggatcgcgggattgcaaccacagaaaagctgattgatgtcagcaagcagcagaaaaaagccttaatgcagcacctgttgacgggtaagaagcgtttgattgatcctgaaacgggtaaagcgtttgagggggagtgggaagaggttaagttaacagaattgtgcaaaattggaacaggtaagaaagatgcaaatcatggctcttcaagcggcaaatatccttttttcacttgtgcaaaacgaccaattttgagttcttcttattcctatgattttgaagcactattaatagctggcaatggcgtcataggtacaactcactattacaagggcaaatttgaagcttatcaacgaacttacattcttagtgagtttagagctgtattcgtagcttatttacaccattggataaacttttacttgaagagagatgtagaccgagaaaagcaacatggagcaatgccatatatcaaagtaggaatgctgcaaaactttaaagttaagttgggtagttattctgaacaacaaaaaatcgcctcagttctcacttctgccgacaaagaagtcgagttattagaagccaagcttgcacacttcaagcaagagaaaaaggcgttgatgcagcagttgttgacaggaaaaagaagagtcaaagttgctgaaaccgaagccgcttaa

SEQ ID NO: 291937 - DNA, 1506 bp, Morganella morganii
atgccaaataccccaatcaaccaagatgaaatcaacaaagccgtctggtcggcgtgcgataccttccgtggcaccgtagatccatccatctacaaagacttcatcttgaccatgctgttcttaaaatacatctcagatgtacgccaagacaaagtagaagaactcaccactcagttcggtgacaacaaagatatggttgaagccatgcttgccagccaatcattcaaaattcccgcaggttcaacattctgggatttgtatgaagcacgtaataccgcaggtaacggtactcgcattgaccaagcgctgcacgcgattgaagaagccaacggcaccaagttaaaaggcgtgttccaagacatcagcttcaacaccgataaactgggtgatgagaagcaaaagaacgacattctacgccacctattggaagactttggtaagccaaccctaaacctgcgccctagccgtgttggttcgctggatgtgattggtaacgcctacgaatacctgatcaaacattttgccgcaggcagcggaaaatcggcaggtgaattctataccccgccagaggtgtcggatctgctttctatcatcttagagccacaacaaggcgacagcatttgtgaccctgcttgtggttcaggttcactattgatgaagtgtggtaagcaagttcaaaagaattttggcggttctaagcaatacgccctgtttggtcaagaagccattggctctacatggtcattggcaaaaatgaacatgttcctgcatggtgaagacaaccaccgtattgaatggggcgataccattcgtaaccctaaactgcaagatagcaacggtggcttactacactttgacgtagtaaccgcaaacccaccgttctcgttagataaatggggacatgaagacgcagaaagcgatcactttggtcgtttccgccgtggtgtgccaccaaaaaccaaaggcgactacgctttcatctcgcacatgatcgaaaccctaaagccagagactggtcgtatgggtgtagttgtgctattccgtgcatcaagtgagggcaaaatccgccaacaattgattgaagaaaacttgctagatgcagtgatcggtttacctgaaaaactgttctttggtacgggtattcctgctgcgatcttgatcttcaagaagaagaaagacaccaatgatgtgatgttcatcgatgcttcgcgtgaatttaagtcaggcaaaaaccagaacgtactgacacaagagaacatcgacaagatcgtgaagacttaccgtagcggcgacaacgtggataagtacgcgtatgtggcaaccctcgatgagatccgcgagaacgactacaacctgaacattcctcgctacgtggatacgtttgaagaagaagcggaaatcgatttgatggcagtacgtaatgagcgtttggcgctacaaactgaacttgctgacctagaagcagaaatggcaggctacctagaggagttgggttatggtgcctaa

SEQ ID NO: 291938 - DNA, 612 bp, Morganella morganii
atgcaatttgccatgatggttaagttagaagaaatcgccacaatcagagcgggtcatccttttaggggagcgatccaggaagttgataacggaaatggctatgttatccagacacgtgatctcgctgatgacggccaaattgcctgggaaaagttggttcagaccaacgtctctggacgaaaagagccggaatggttgaaagcgggtgacgtaatttttgctgcccgaggtatcaagaatcttgcatcagcgatatctggagaaatgctagaccagcttgagctaccagccgtttgttcgccacactattttcagatccgtctcgctcagaacgtgaaactactgccagagtttctggcttggcaactcaatcagttgcctgcacagcgtcattttcagcagtctgcggaaggttcagcacaagtgagtattcgacgaactgttctagagcaaacacctgtgatgattcccccgcctgagacgcaacgcagagtgcttgcgcttagccaaagcgcgaccagagaagagcagatatatcagcaattaatcgagctaaggcgtgcagaaatgcaggctatcgcgaatcaagttttaaccggaaaaataaaataa

SEQ ID NO: 291939 - DNA, 990 bp, Morganella morganii
atgccaacaactgtaaattctgcgtttagccagtttatggccgacagcgtcaatcttgatagtaagaaaacgatcactgcgcggtctagtcgagattatttgaaaagacaagtaaaaggattaactgatttctttccgctatacagcgacaaagacgtcaattttggttcttttgcgagaagaaccaaaattcgtcccttggatgatattgatatgattttcactctgtcagcgaatggatgtacttgggaagagagcttggacggcactgtgtatatcaatacgccgactgaatcccctgagtataagaactttcgccatgacagttcatatcgactcaattcgcgtaagatcatcaatcactttgttagcaaattggctgatctgagccagtacgacaaggcagagacacatcgcaaccagaatgcagcgactctcaagctctctagctatgactggaactttgatattgttccggcgtttttcacttccgaggatgcccaaggaaagaccttctatatcattcctgatggggcgggaaactggataaaaacagaccctagactagatcgccaacgcgtctccgacatcaatcagcaatgtggtggccatgtccttaacgcgatccgagcaataaagtattggcaacgcagagctacgatgccgtcaatgtcatcttatcttctagagaatttagtgcttaattactttgaggaaaaaggtgaagcaagcccgttcgtcgatctcaatgtcattaacattcttcagtacataaaaagcaacatttggtgggacgtcaatgaccctaaagaaatccagggaaacctgaatacactctcttgggacgaaaagacgaaaatttcgcaaaaagcggaatcagatttcaatacagcactagcagctcgagagtttgaggtcacaggcgatcacaaaaaagcaattggagagtggcgtaaggtatttggtaatgacttcccacaatatggataa

SEQ ID NO: 291940 - DNA, 918 bp, Morganella morganii
atgagttgtgttgtagcaaatcaaaaaacaatccctgctgttgaggcaggattggcattccgatacgcctacgatcgtgcaaagttctggaaggcttgtatttgggctttagcactgctactggcagttgttcagactggcgtttctatctatgttttttctggtcacaaaacaccatttgacccctcatatttgacggctgcgcctctactggcattcgttctgataagcacctttggcaagtacattgtctcaaaatggcaatctcttggatgcactatccaacgtttgcatgatcatctaaccatggaggtaggtacaaagccatcactcttagagcttccgaaaagtcgagttgctgaattaagtacgaatcgagagagacaagcccctcaagatcgagggcaactggagacttggtggtcatcaaacttgagcagtgtgccatatcctgtggctaagttagtagcgacctactcaacctttgcttgggaaagtgagcttcgaaaacgctaccagtatttgctatgggtttgtttattcacttgtgtcctagctccttttagcgtttcgatctttctagaacaaaccataccggagtccgttgtctttgtaattgggcctttcacacccatcattgcggttgttatcgacgaattgcttatgaacaaacagagtatgaaaattgccgagcagttaacaaatgacagtcataacacatggttaaaccttctatctgacaagctaaacttcacagaggtggagctattcaccgagcagcacatgaggtactggcaaaatttcagacagtcagcaacgccaatctttgaatggctttacaaggcatccagagagcgcatggaagggaatatgctggtcgatacggatgcgcttatagccgaattcaaaaagcagtag

SEQ ID NO: 291941 - DNA, 1362 bp, Morganella morganii
atgcgccacatcatattgacaggcgagccggcgtgttcgtttagttcacgggtattcggctccagtcgtttgtctctgcatcctttcctgacagcaggcatatcgcgaatcgctgaaatgtccggtgaaaatgcggataacctgttggtcagacaaacccttgcacctctgttcttcttttacttacctaaacatgcgaacgcactcaaagagaacttgctccgaggagatggcgccaaagcccttcgccatagtcagttaccttcttttggctgtggcggatctttacacttaaaatggtgcccacgttgcgttgagctagacatccatgaacgaggtgttgcctattggcatcgagcacatcaagttcccggtgtaacagcatgttggttgcaccaaatacgacttatgtctactgagttaaaagcaaggcagcggttaaatgaagggttgccgacagtggtgcattgtgatgctcaagcagcgtctgcgatggagatcgaggttgcgatattcggtttcggccttctagcccaactagagagaacgaaacctggctttgatttggaggagagataccgctcacgactcaatgagcttgggtttatcactcccaatgggagcgttcgaaggaaggcactaatgaaggtgttttcatctgatttggctatgtaccccatgaaggggtctctgtttcctcgtcaccaaactgattatcactacatttcagaattgctagcagcaggaaaaaactgccacccgtttaggcatctcttactcggagcatggttgtttaactctgcgaataagatgtttcaacacactgcaccgattgaagaggttagcctacatcaaccaaaaggttcaacgaagagagcggttgagcagcgttgcttgagtctactcagagaaggtgactctcttgctgcggtttacagaaagacaggtaaaagccgatgctatttaaagcgtttggcaacaatgcatggaatcaaactaaatttgagaccaaaacagttaaatgagaagctcaaacagagaatcatcaggctcgctcgattaggtgtgcaccgacggaaaatctctcaagtttgccggatcggaattggttcaattgaacaagtgatcgccagtgtttctgggttagttgaatggcgaaaacaatgtcattgggagtcgaaaaggcgttgctgtcgagttcagattcaacgatacaggcaaagatatcctgatgctctacgtagtgatattaaggctgactgtaatgcggcgtttttctggctttatgcaaatgacagggaatggttagagaattcgcttcccagacctaccagaccttgtgggcccagtaggttggtatag

SEQ ID NO: 291942 - DNA, 1461 bp, Morganella morganii
atgaatagagcaactgccgtttatcaaagagcaattctgcctgagcattgtggtaaccctctaatcgaggctcttcctcctaaattatgtgatagcgagttggcagaaaaactgagctactacccctcttgtcactatgaagagacacagttggatccgttagaaagggttgaatatgtatctcgcctcagagaattaagacagccattgcctgtttacttagaggtttttcgggctgttgaaatggcgataaaggaaggttattcagcgaagaatcctttgtcgccaaccacgatgaactttctacattattcgggagaggaacgtccagacatagaacctgtcacgggatactttaagccaaaaggctctggcattaccgtgattggagaaagtggagtgggaaaaacctgtatgctggagcaagttctggggtgctttccagatacagtggagcattcatattacgaaaacaaactgcttcccctgcgtcaagttgtatggataaaggtcgactgtcctgatgactcaagtgtaaagggactttgctatcggatacttgaagaacttgaccgaaaactgggcataccacagacgaaaccagcaagcaccatcgcagctttgatcagtcaaattgaagcaaagatgaaatcgagctttttgggtattctcgtcattgatgagatgcaaaacctcaatctagcaaaagcgggaggcgcagatagattaattggttttttgcacaatctcgtcaataacctcggtattccccttctgttctgtgccaaccctccgttcaacaacctgctaagcaaaacactcaaagcagcgcgtcgtgcagaaagcagtggatactttgatgtcgagttgatgaaaaatgatgaagaatgggagctgtttatcgaggagctttggcagttgcaatggacaaatgttcccacacctttgactgatgagctaagcgatacattgtttgatttgtcagtcggcaatatggatttagcggtaaggatatatcaggcgacgcaacgggcgctaataggcagtgatgatgaggtgttgactccaagtgctttgagatatggcgcaagtattgttatccgcttatcgaaaccagcagtagataaaatcaaacgagacagcaaaatttcggtgctcaaacggcgcagtgagtcttcagaaccaaaggctcctgtaacgtcagctaacgaaagtgcaggtaaacctaagcctcagttgacaacctcaaaaggaaaactagtcaccattccaggcgatttaaccaaagcacatcaccctgaattttctgagcgagtaattgagctaaagaatctggataacctttatgaggagattaaagactttgaccttttccagagagcatcggatgcgaagaacccgcttgaaatactgaaaaaagcaggcgttctatgtgatgaccctctggagatattcaagtaa

SEQ ID NO: 291943 - DNA, 2148 bp, Morganella morganii
atgcaggttgagatcaatagcgtttggagattagcaggtatagatggttttgatgatggcctttaccgagtattggcttgctatcctgattatgccacggtggtcctctttcaaattgtggaaggctcaaaactacaaagaccagctgctgtcgatttgccattttttctaagacaggctgaagaaggggcgatcagccctgaaaaatacccgaagccgcattaccaattgtctgatgatagaaacgtaccgtctgatcatctgcaaaaacgtgataaccgcctagagcaaatcaaaggcttgatattggatccttggtttcttttgaagcttgttacggactcacgttcaagaatagtagctgaacatgccaaaaaacagggtgtttatgttcaggcgttataccgttctctcaacctctactggaaatatggtcaggaatacaatgcgcttctaccggcttatactaactctggaggagctggaaaaacgcgagtcgcgggtaaagtaaagcgcggagcaccaataagactatctacaccaagccttgccgccccgccaagtgttaacactagcgagaaagataaaaccatattcctaaaggctatgaagcggttcggaatgaagggtaagaaagtgacattccggaaggtttatgaccagatgttaacggagttctatgcaaaggaactaattgccgctgatttggaaggtagggtagcgctcgttcctcaatatcgagcatttttatattggattaaaaggcttattcctcagcaggagttgattcggaagcaaacatcacctggtgattttgatcgtaatcgccgtggtcttcgcggtgcagctactgatcatacggctgttcctggcagctgttttgaactagatgcgactgttttggatgtacatgtggtttctgagttccgtcgtaatcatgtgcttggtaggccaactgtttactgtgtagttgataaagaaagccgaatgattgtcggcattcatgtgtctctcgagtatgcatcttggcgagctggccgtcaggcgttggtcaacgcgttcacatctaaaaaggaatactgtgctcgatatggtattgagattaaggacagcgaatggccatgtcatcacatacctcagagacttctatgcgatcgtggtgaatttatttgtcaggatgcagaaaatcttgcagttcctttgattggacacctgagcatagctccaccttatcgagctgaactcaaaggcatagtggagcatcgttttaacatattaaacgaaaagcttatccatgatttgatggggacaacccgaggccgtcactatattcgcggtgataaagatccaagaatggaagcggtattaactcttgatgaggttaatgcgttgttgattgatgcggttcttgaacacaacagtcaagtttttgagagcttagcgggtcaatgcagtctactcatcgagaaagagttagcacccactcctattaattattggaatatccatcttcaaaagcatcaacatgccttgagtacactggacgaggcaaccattagagcgcgcctcctacctgcagattgggtttcgatgacaagcaaaggggtgaggttaaatgacgatatgtactatgagtctgatcgccccgattttgaagactggaaagtcattgctcgcagtggcagtagttggcgtttagaagcaagaatagatcaggacaactcttcctttatcttcgttcgatttaagccagatgagggtttctcccaatgttggctccgtaaagcatcaaaatcatttgatgagcgtcatcacgcagatattttattttttgaggactggaaaaaactggaaaagcatcgtgccaagcctaccgccaagtctgttgagcgccatcaacgccgaaaagaaatcactcaaaatgctcaaaatgaatcagctaaagcgccccctttagaatcaaaagctgaaaagataaagggcatgaaagagcgccgcaggcagtctgtccttgaggcacgagtaacggcaaaaccggcggatgatatgggtcatgcccccgatatgcctgagtttgacaaacgcaatgacgaaaaaagaaagaatgtcgtctctctgttaaagcgcaagaaaggtgagtctaaatga

SEQ ID NO: 291944 - DNA, 828 bp, Morganella morganii
ttggctgggcgcagaaaactagattcgctatcagatttccagcgagcattgaaacagaggtatggattgggagtgcgagaggcctacaagccatggcttcgcgtccaagatgtaagttcatatggtcacagtgccaagattcaaggcataaaaactgggcgtattcatcacaccctttctgaacatgaatcttcgtttttttatctcgctgaattttgcgacaccatcattgatatccgagaacagttccctctaattcctttagatctatctaccaaaattgctcaggcactgggtgtcgaccatcctgtcatcccttactcaaagcaaaatgagtggaacgtggtgacaacagacttcttattgacccgatcggatggtgctaaacaatggtatgaggctgtaagcgttaaaccaactgctaatctcgtcaacaagagaacggctcaaaagctcgatatcgagagagtctggtggcaattgctcggtatcccctttcatgtttatgtcatgtctgaagataatcagattcagtcaaaaaacatccagtggttcacctctcctattcggcaagggtgtatacatccaagagcactgatgcataaagcaaagtcgttagttggtacaggcacatatttagtagaggacgtttgtgagggggttattgaggcgctagatatcgattcagacgaatcattgatgttgttgaagagccttttagccacaaaactagtaaccgttgaccttaacaattcgattgaggaaacaggcttaatcaaagtcacacgggtagatatgggtgattcggagcagaactatgcaggttga

SEQ ID NO: 291945 - DNA, 123 bp, Morganella morganii
atggacgagtattctccacgaaattacgatattgcggtactgaagtatctgtgtgatgaactttgccgtgaaggcacacaaacccctgatgaatcccctaatgattttggtaaaaatcattaa

SEQ ID NO: 291946 - DNA, 720 bp, Morganella morganii
ttggacttgggtgaaaagggcgtttattcttcctatacgtgccgcgttccaggcggcgactatgagggctatgtcgatgcccatgtgcgccggctggaggcgctacgccgggccggtatcgtcgagcggatcgacgccgaccaatggcgcatccccgatgatctggtcagccgtgccgccgcccatgacgccggccgagacagtcaggccagcgttcgcgtcctttccccggtcgatctgaacaaacagatcggatcggacggcgcgacctggctggaccggcggctgatccacggcgagacggccgaccttgcgccaaccggcttcgggcaacaagtccgcgaagccatggaccagcgccgcgagcaccatatcgaacagggcgacgccacccgcagccgggacagccgcgtcttctaccggcgcaaccttctcgccatcctgcgggagcgcgaggtagccggcgtcggatcggatatggctttgagtaagggcctgccgttccgcgccgccacggacggcgagagcgtcagcggcaagtttaccggaaccgtgcatctatcgagcggcaagttcgccgtggtcgagaaatcccatgagttcacccttgtcccgtggcggccgatcatcgaccgccaactcggccgcgaggttatgggcatcgtgcagggcgggtcggtgtcgtggcagttagggcggcagagggggctggaacgctga

SEQ ID NO: 291947 - DNA, 306 bp, Morganella morganii; identical to SEQ ID NO: 25146

SEQ ID NO: 291948 - DNA, 678 bp, Morganella morganii
atgcctcatgtggcggccaggacggccagccgggatcgggatactggtcgttaccagagccaccgacccgagcaaacccttctctatcagatcgttgacgagtattacccggcattcgctgcgcttatggcagagcagggaaaggaattgccgggctatgtgcaacgggaatttgaagaatttctccaatgcgggcggctggagcatggctttctacgggttcgctgcgagtcttgccacgccgagcacctggtcgctttcagctgtaagcgtcgcggtttctgcccgagctgtggggcgcggcggatggccgaaagtgccgccttgctggttgatgaagtactgcctgaacaacccatgcgtcagtgggtgttgagcttcccgtttcagctgcgtttcctgtttgccagccggcccgagatcatggggtgggtgctgggcatcgtttaccgcgtcattgccacgcacctggtcaagaaagcgggccatacccaccaagtggccaagacgggcgcggtcaccctgatccagcgttttggatcggcgctcaatctgaatggggtcgtttgcgggagggggcggaatcctacgctaaggctttggccagcgatattctccggtgagattgatgtgttcccatccgagcggcgaaacatgggccaagagatcgggcgatag

SEQ ID NO: 291949 - DNA, 1395 bp, Morganella morganii
gtgccattgcggccggaggaatggctggcagaccggcaagctcgcctcgacatgcggttgcgcgagcttggccgtgccgctcgcgcaggcacgatcccgggcgggtcgattgaaaacggcgttctgcatatcgagaaactcgaagccgccgcgccgacaggcgccgaagatctggtgctcgatctctacaagcagatcccgcccacgcgcatcaccgatctcctgctggaggtggatgcggcgaccggcttcaccgaagcgttcacccatctgcgcacaggagcaccctgcgctgaccggatcgggctaatgaacgttatcttggcggaagggatcaacctcggcttgcgcaaaatggcggatgcgacaaacacccacaccttctgggaattgatccgcattggacggtggcatgtcgagggcgaagcctatgaccgggcgctggccatggtggtcgaggcacaggcagcgttacccatggcccggttctggggcatgggcacgtcggcttcgagcgacggacagttcttcgtcgctacagagcaaggtgaggccatgaacctggtcaacgcgaaatatggcaataccccgggcctgaaagcctatagccacgtctccgaccaatatgcgccgttcgcaacccaggtgattcctgcaacggcaagcgaagcgccttacatcctcgatggcctgctgatgaacgatgctggacgccatatccgcgagcagttcaccgacacgggcggcttcaccgatcacgtctttgccgcatgtgccattctcggctaccggttcgctccgcgcatccgcgacctgccatccaaacggctctacgcgttcaatccgtcggccgccccggcgcacctgcgagcgttgatcggcggaaaggtcaaccaagccatgatcgagcgcaattggcccgacatcctgcgcatcgccgccaccattgctgccgggaccgtcgcgccaagccagattctgcggaaactcgcctcctatccgcggcagaacgagctcgcgacagccctgcgggaagtcggtcgcgtcgagcgcaccctgttcatgatcgactggattctggatgccgaactccaacggcgtgcccagatcgggctcaacaaaggcgaagctcatcatgcgctgaagcgggcaatcagcttccaccgccgcggtgaaatccgcgaccgttccgccgaaggccagcattaccgcatcgccggcatgaatctgctcgccgccatcatcatcttctggaacaccatgaagctcggcgaggtcgttgcaaaccagaaacgcgatggaaagctgctatcgcccgatctcttggcccatgtttcgccgctcggatgggaacacatcaatctcaccggagaatatcgctggccaaagccttag

SEQ ID NO: 291950 - DNA, 753 bp, Morganella morganii; identical to SEQ ID NO: 31906

SEQ ID NO: 291951 - DNA, 1026 bp, Morganella morganii; identical to SEQ ID NO: 31905

SEQ ID NO: 291952 - DNA, 777 bp, Morganella morganii
gtgcaatacgaatggcgaaaagccgagctcatcggtcagcttctcaaccttggggttacccccggcggtgtgctgctggtccacagctccttccgtagcgtccggcccctcgaagatgggccacttggactgatcgaggccctgcgtgctgcgctgggtccgggagggacgctcgtcatgccctcgtggtcaggtctggacgacgagccgttcgatcctgccacgtcgcccgttacaccggaccttggagttgtctctgacacattctggcgcctgccaaatgtaaagcgcagcgcccatccatttgcctttgcggcagcggggccacaggcagagcagatcatctctgatccattgcccctgccaccttactcgcctgcaagcccggtcgcccgtgtccatgaactcgatgggcaggtacttctcctcggcgtgggacacgatgccaacacgacgctgcatcttgccgagttgatggcaaaggttccctatggggtgccgagacactgcaccattcttcaggatggcaagttggtacgcgtcgattatctcgagaatgaccactgctgtgagcgctttgccttggcggacaggtggctcaaggagaagagccttcagaaggaaggtccagtcggtcatgcctttgctcggttgatccgctcccgcgacattgtggcgacagccctgggtcaactgggccgagatccgttgatcttcctgcatccgccagaggcgggatgcgaagaatgcgatgccgctcgccagtcgattggctga

SEQ ID NO: 291953 - DNA, 321 bp, Morganella morganii; identical to SEQ ID NO: 67344

SEQ ID NO: 291954 - DNA, 663 bp, Morganella morganii
atgcgtgatttattgaatcgtcaaggacatcatataggacgacgtcatacacgtactttaatgaagaaaatgggcattaatgcgttatatcgtaaaccaaatctaagtcaggccaatcaagctcaccgtaaatatccatatctgctcaaaggattggctattcagcgcagtaatcaagtgtggtctacggatataacgtatatccctatggcaaaaggctttgtttatttatgtgctgtgattgattggcatagccgcaaggtacttgcgcatagagtatcgattagtatggaggttacattttgcatagaaacattaaatgaagctattgaaaaatatggccgacctgaagtctttaatacagaccaaggcagtcagtttaccagtgatgcatttattgatgtattgaaatcaaatggcattcaaatcagtatggatggtaaaggtcgatgggttgataatgtgatggttgaacgattatggcggagcgttaaatatgaagaggtgtatctcaaagcctacagcaatgttttggatgcgaagaagcaattaaacgcatattttgaattttataatttgaaacgacctcattcgagtctggacaaaatgactccagatgagttttactatgaccagctaccacaacaaaataaggtagcttaa

SEQ ID NO: 291955 - DNA, 306 bp, Morganella morganii; identical to SEQ ID NO: 57884

SEQ ID NO: 291956 - DNA, 219 bp, Morganella morganii
atgacatgggcgcaacggctcaagcgtgttttcaatatcgacatcgagacctgcagcggcggcggcggcgccatgaaagtcatcgcctgcattgaagaccctatagtgatcaagcagatccttgatcacctgaagcacaaagccgaaaccagcgggaccagggcgttacccgaaagccgggcgccaccggctgagctgctcctgggtctgtttgactga

SEQ ID NO: 291957 - DNA, 294 bp, Morganella morganii; identical to SEQ ID NO: 279954

SEQ ID NO: 291958 - DNA, 2490 bp, Morganella morganii
atgtctgcatttaatcttgacttatcaaagatttccagtggtattgatagtaacactgcaattccaccgcgtgatatctttaccactctccccaataaagatacaaagtttcaatatccccgtgatgttcaatctgaggtttgggcaaaatggttcgattccagagataatgaaacaactgttataaaaatgaatacgggtagtggaaaaacttctgttggtctaattattttgaaaagctgcattaacgaaggtgtcggtcctgtagtatatcttgtacctgataattatctggtagcacaagttatagaagaagcaaatttgcttggcattccagcaactaacgatgaaagatcacctaaatttgtggctggacaagaaattcttgttacaaatatctttaaatttgtcaatggcaaatccgtttttggtgttggggatgaaggtgaaaaaatacaaattggttctatcataattgatgatgctcatgcatgcctttctacgattgaagagcaatttacattaaatatttcccgtgataatccagcttacagtcaacttttcaaaatatttgaaaattcactaaagactcaaagtacggcaaaaacattggaaataaaatcaggagatcaaaatgtttacgtcagagttcctttctggaaatggcaagatagcattgatgatataacaaaaatacttttaaataacaaagataaaaaagatttagattttaaatggtctttaattaaagaaaatttattactttcaaaatgtgtagttagtgcatcaaaaattgaaatatctccccattgtatacctattcatatgattccaagcttatcaaatgctcgccgaaaaatatttatgacagcaacacttgttgatgaatcaatcttagccagtcattttggaataaccgatgaatcattatctaatcccataacacctaaaacagtaggtgatattggcgatagaatgattttaatgccgcaagtgattaatccttacttgagtgatatagaaataaaaaaaatgtgtaaggatatctcacaagctcataacgttgtagttatagtcccatcaaaatacagagcttcattttggagtgatgttgcagatgaaattttagataccaagaatttacatcaaggcattcaagaattacgaaataaacatgttggtctagttattttaataaataggtatgatggtattgatttaccaaatactgcgtgccgacttttagtcattgatggacttcctgatgtccgtcgcttgattgataaagtaaaccaaggtatgttaatggggagtgaaaaaaacaaaggagaaatcatacaaaaaattgaacagggtatgggacgtggtgtccgttcaagtgatgattattgtggtgtaatcctattaggaaaaacattgaatagcaccgtatttcttggctcatatttagataaattctccccagcgaccagagcacaaatagaattatcacaaaaattagtaaatatcatgcctgacaaaaccatttcaacaattaaaggcacccttgattattgcttattacgaaaacaagattgggtatcaactagtaaaggcgcgttagctggtttatccgttactcaaaataacattgataaacacactattaataagagaaaagcatatgatctggcctcacgcaataatagtcaagaagccgcaagaattttaattgatgacagcaatgtaactgatagaaactataagggattcttaaaagaacatgctgctgaatacgtcaatttacatgacaccaatgatgcccaaatactactacaatcagcatcatcagataactaccgtattttaaaacctttatcaggagttacatacaatagattaaatggaatatcattagaacaggcaaaagaatgtagcctatacttaagaaataaattcagaacaaacaatgaaatacttatatatacaaattcagttcttgaaaatcttattttcatagagaacacatcaaatcaatttgaaaatgccattaatcaaattgctaggctaatagggttcagaagccaacgcccagagaatgacactgggaaaggccctgataatttatggtccctgggggataattattacttaataatcgaatgtaaaaatggagccaccacaaatagaattagcaaatatgattgtaatcaactaaatggttcaggtgcttggtttagaaacaaatatgaccaaacagctaaatttcacccaatcatgatacacccatctaattatcctgaacatgcagcaaccttaaatgaagatacgagaataatgtctactaatgaacttgaaaaattcaaagtctccatctttgattttattaattccatttgctctagtgataaaacacatgatgataaatttatccatgaaagattaatttcatataaattacgaaaatcagatattataaataattacacaagagactttagacgttcataa

SEQ ID NO: 291959 - DNA, 2163 bp, Morganella morganii
atgataaacaatatagtgctaaataaagttgcaagttataagtcaaaatcagaattaaatactgataaaaaagtaaatattatttatggtttaaatggaacaggcaaaagtactctctctaattatttctatgatatagagaatgaaaaatatcagcattgttctcactcaggtgagtatgatgaaatccttgtctataatcaaaaattcattcaggataatttttatgcaaaggattctctaaatggaatatttagtttatccaaagaaaataaagaagcaaaagaaaaggttgagagccttacattaaaaataataaaattgactgatgaaaaacgtgaaattgaaaatgaaatttcagcacaaaataccattatttctgattcaaaaaacaaagctcaaaataaaacatgggaaataaaaaccaactattcaggtggtgatagggtccttgaattttgtttgtcaggaaaaatgggaagtaaagaatcactatttaaccatctttgctccattcctttgcctagtcctaagccatcaaaaaaaatctctgacctaaaagaagaagcaagtgcggttgatggcaagacagcaattaaatacaacatgttagagaaaattgacaccattgaattatcatttgatgaagtgaaattacttcaagatgtcattgtgggaagtacagacagtcccgtttcatatcttataagtaagcttcagaactcagattgggtaaatgaagggctaaaatacttagaacaaacaggggattcccagtgtccattttgtcaatctcaaactattactgaaaacttggttcagcatattcgtaattatttcgacgagacatataaaaatagtgtagaaaaaataaagtatattcaaactaaatataagtcattgattgacggaattccttcactggataattataaagaatgcaaattttctgccaaccatataattaaattaagtgactattataaccaattaagtaaagatacagagaaaaatctagacctaataaagcagaaagtaataaatcccagtaatacagtaactctggctgatacatctaactctgttgataacttcaatttattaatagaattagtaaatgctgaaatagccacacataattctaaaatagataatgcaaaagatgaattagaaaaaataaagatatcgttttggcagatcttaaggtatgagtatgaccaaacaattttaaatttcaacgatataaaaaatattgcaaataatatcatcattcaaaaaaatacagaaaaagatgaaaaaaaagaaatgataaaggtcaaagataaagaacgtattgaatatcagagatctactgtgaatatagatgaggcagtattcaacataaatcaaggtctaaatgatatcggaattactgattttcatatcgaaaaatatgaagatactctttatcgtatagttcgcaacgaatctagttctaaaatattctcatcattaagtgaaggcgaaaaaatgattatcagccttttatattttagagagctattcagaggtaaaataattgccactgagggtaaaacaaggaaaatagcaataattgacgatcctgtatcaagtttatcacatatttttgtttataatattggtcagctgataaaaaatgacttctttaactctgatgaaatagaacaggtatttgttttatctcacagtctatattttttctatgaacttgctgatgcaaaccatgaaagaagaaaagaaactcaaaatttatttaggctttctaaaaactctaatggcagttcaattattttaatgaagtatgatgaaatacaaaatgactaccagtcttactggtcagtaatcaatgatgacaaacaacctccagccttaattgctaactgcatgaggaatataattgaatactttttcaactttgtacaaaaagcagatttaagcaacgtcactcaaaaaccagagttaaagaaaccacgatttcagtcctttattcgctacataaacagagaatcacattcattaggacagaatatttttgactttaaggagtttaactataatgatttcaaagagggacttagattagtgttcgagcatacaggttattctgcacattacaaaaaaatggcaaaaataaaaaactaa

SEQ ID NO: 291960 - DNA, 3681 bp, Morganella morganii
atgaatacgaacaacattaaaaaatacgcaccaaaagcgcgccgcgaatttatggatgcggtagctaaacgattaaatacctttggtatcaccgcgaataaaaagggcgagctacaaattgcagaagcgaatctacaaggttctgtgcttcaaatcgccggtaacagttttgacggtaaactggctgagcccagaaaacgcatagtggccagaagccagaagctggggtatgcacaacttattgaacaagtagcttatacctggttcaaccgtctgtgtgctattcgctatatggaaatccatgactatctaggtcacggttttcgtgttttgtcgcatccagacaaccctaaaggctttgaaattatcgaccatgcgccagatgctgcggatgaactcgggttagatagagctcgcattatcgaactcaagcttgcgggcaacaaagacgaagagctgtatcgtgaactgttgttaggtcagtgccataaacttcatgaagcgatgcctttcttatttgacgcattggacgatgaaacagaacttctgctaccagacaacctaatgcgtaccgactccattctgcgtggattggtagacggcatccctgaagaggactggcaacaagtcgaagtgattggctggctataccaattctacatttctgaaaagaaagatcaggtcatcggaaaagtggtcaaaagtgaagacattcctgccgctactcagctatttacacctaactggattgtaaagtacctggtacaaaactcagtcggtcgtcaatggctgcaaacctacccagactctgccattaaaagccagatggaatactacattgagcctgcgcagcaatctgacgaagttaaccaacagctaaaggctattacgccagaatctattgaacctgaaaccatcaaagtacttgacccagcttgtggctcgggccacatactgattgaagcttacaacgtactaaaagccatctacgaagaacgaggtttccgctctcgtgatattccaaagatgatcctggagaacaacctctacggcctagacatagatgatcgtgcagcacagctatctggctttgcgctgatgatgatggccagagatgacgataagcgtatttttacccgtaatgtgcgactcaatgtactgtcattgcaggaaagtaaccatattgacctgccgaccttatggaaagcactcaatctatcgggaagttggcaaagcggcacatcacaaggcttgttctcagatgatgagcaagatttaagctcgttcaatgcagacaaccgctaccaactgctgacgcgaacattggcaagatttactcaagccaagacctttggttcattgattgatgtaccaagcgatgaccatgaacagctaaaagagttgatgagcacgcttgtcgagcttcaagagtcaggagactcaatgcagaagcctgcggcgaagcaattgattgaatttgttcatcaggctttggttctatcggttcgctacgatgctgttattgcaaacccaccatacatgggtagcaaaggcatgaattcagagttgaaagagtttgcaaagaaaaatttcccgaataataaatctgatttgtttgccatttttattgagcgaggatttagctggctgaaagaagcaggttttaactcaatggtaacaatgcaaagctggatgttcttatctagttatgagcagatgagggactccatattaagccataaaactattgaaaacatggtgcatatgggaaatggggttatgaaaattgcatttggtacgagtgcgactattttccgaaatattcaattgaacggttataaaggatttttttcatatgctgataataaagatataaatgaagatggtgttccttatgagtttccagtaaaaaataacagattaaagaccataattgcagaggatcttaagagaattccagggaatcccatcgcatattgggctgaggattcagtttcaaggctgttcgatgatcgatccattgatcaatttgcttctgtaagacaaggaatggcgactaccgataatgagaggtttctcaggtactggtatgaaattgatacttctaaaatagtatttgatgcggtaagtactggcgaagcttgtagtcaaggatacaaatggtttccatataacaaaggtggttcatatagaaaatggtacggtaactttgaatatgttgtgaattatgaggatgatggaagtgtcttgattgacctggtcagaaataaatatcctaaaatttccgatccagaatttgtcattaaaaatagaggttattattgtaaagaaggggtgacttggtcagatgtgacctcaggagttacatcttttcgatatttgccgcaggggtttatttttgatggtcgaggctcatccatattcagtggattaattaaaccttatgcattgttaggatatttaaatacaccagcaacaatctattttgctgaaatgttaaatccaacatccgttttgaatcctggggaaataaaaaaattaccagcagcagggctggaatcttataataatattagtgctattgagcgagctgttgaaattacaaagcttgattgggatgagtctgagttttcttgggggtttgaatgccacccgctgctcaaaagaaatgcgcacttgttatcaagtgcatttgaagattactcaatattatcacaaaaaaattctgaagagatcctcagtatagagaaaagtaataatcaatatgtttattcgctgttagggatggatgctaaagaatttccagaagttaatatcaaaaatattaccttaaattctaacgtctattatcgttatggtagcgattctgaatttgggcaactgaacgccagattctgttctgatgtgctctcagatcttattagttacagcgttggatgtatgatggggcgctattctcttgatcgtcaaggtttagtcttcgctcactctagtaatgatggctttgaccttcttcttacagagggagcttacgataccttcccagccgacgaagatggaatcattccactaaccgaccaagaatggtttaaagacgacgcaaccaatcgtttccgtgaatttgttcaagtcgtttggggtgaagaacatttgcaagagaatcttgattttgtcgctgagtcactgtgcttatatgccataaagcccaagaaatcagaatcagctcttgagacgatccgccgctatttatcgacgcagttctataaagaccatctgaagacttataaaaaacgccctatttattggctatttagttctggcaaacagaaggcttttgagtgcctggtttacctgcaccgttacaacgagggtacgctttctcgtatgcgtactgagtatgtcaccccgctactcggcaaatacgatgcttatgcagagcagcttgagaagcagattgaaacggctgactcgaccagtgaagcgaaccgctttaagaaagagttggatggtttaatcaagaaacaggtcgagctccgagagtttgatgacaagctaaaacactacgctgatatgcgtatttcactggatcttgatgatggtgtgaaagtgaattacggcaagtttggtgatctgttggctgatgttaaggccattaccggttcggccccggaggttaactaa

SEQ ID NO: 291961 - DNA, 357 bp, Morganella morganii
atggaattatcaaaaagtatcaatatccggtgtagcagtgctgttctggagactttcttcattcagcgcatgtttgaaatcggtaatgacggattagcgaaagagatcgggattcacccgtccacagcaagccgggataaaaaccgtattttcagattagcgtgtgacctgataacccacttcggattgccggaggattcagtggaaatagccggtaagccaccacgtttagtggtcgagggcgcagatgccgaatggctgatgcagatgctggagattaagggaaaggtcaaaagaaaagccccggctgtaaccgaggctaagagtcaaatcaatttagtacttgatgaggactaa

SEQ ID NO: 291962 - DNA, 261 bp, Morganella morganii
atgaaagtgacaataaaagtaacagatggagagctttttgaaatggatatgacgaaggaagagcttacggcagcagtaattcatgatttagacgctgggcgtgactatgcgggatttaatgtcgatgttcgcgttgttgactgggacgaccctgaagtatttgcagattacgagcccggaaagacgggcatccagtcagtattgggattggtgaatgcgcaggctgattcgatatcaaaatgcgctgtcgccagtcggtga

SEQ ID NO: 291963 - DNA, 342 bp, Morganella morganii
atgaacaaatatcgtgacaaatcagactttgagattaataaggctgtggctgttaatattaatggcactgacgctgttttagaaaagttcggtagaatatatatcagtgatggagatagaggagcgatggtgagcttctccccctgcaacaacccagctgacgcaatgccgattgttattgagaatggaatatgcatgaattatatcgataaagatattggttggtgcgcatatcattttgatgaagaaaaaggcgagctggaaatttacgataaaaattattatcgcgcagctatgatttgctttctaatcatgaaggacgaggagaatgaaaaagtatga

SEQ ID NO: 291964 - DNA, 198 bp, Morganella morganii; identical to SEQ ID NO: 25167

SEQ ID NO: 291965 - DNA, 600 bp, Morganella morganii
gtgcaatatgcctacatcagggtaagctcggccgatcagaatacggcccgtcaggaagaggcattgtcaaaggcgggttttcagcctgataaaatttgtgttgagcatgccagcgcgaaggacacaaaccgcccggggttacaggaactcctggggcaattacgccctggtgatacgcttctggttcattccatcgatcgcctttgccggaatatgtcggatatgtgcgctgtcaccacccggcttcgtgaccagggcgttacccttatttttctgaaagagcagctgacgttcagcgccggcacaaacaatccgatgcaggaactgcagctgcacatgatgtcggcattcagccagtttgaacgagccttactgaaggaaaggcaggccgacggcatcgccgcgaaaaaagcacggggtgaaaaaacagggcgccccggcgccgatatcaaaaagatccaggaaattgacgcactcagaagcagaggggtcaggctcaggatcgcctgcgaccatgcgggccttggcgtttccacatattataagcttcgtcaccagatgaagggggaaccgcagaattcggaaaaaatcgtacgctaa

SEQ ID NO: 291966 - DNA, 546 bp, Morganella morganii; identical to SEQ ID NO: 109948

SEQ ID NO: 291967 - DNA, 258 bp, Morganella morganii; identical to SEQ ID NO: 122179

SEQ ID NO: 291968 - DNA, 615 bp, Morganella morganii; identical to SEQ ID NO: 122178

SEQ ID NO: 291969 - DNA, 657 bp, Morganella morganii; identical to SEQ ID NO: 21682

SEQ ID NO: 291970 - DNA, 474 bp, Morganella morganii
atgtcaggaccaccaagaaccccgacacatctgcgtttggtcaggggtaacccatcaaaacgcccgatcaataaaaaagaaccaaaaccaccgtcaggggtacccccaactccgaagcatttttctaaacaggaaaaatactggttcaggcggatggccgaagaacttaatgatatcggcgtaattaccagacttgacgggatggcactggaattaatgatcggcgcatacatcgagtggcgacatcaccgtgatgtgatcgctgaagtcggggagtcttatcagaccacgaccagtacgggtgacattattatccgggcgcatccgcaggtggctatgcgggaccgggcatttaacaatatctgcaaaatgatgtcagagtttggtatcactccggcatcccgggccaaggtatccggtaacacaccagccgaagaagatcctttcgaggcatttctgaaacaaagaaaatga

SEQ ID NO: 291971 - DNA, 408 bp, Morganella morganii
atgggcgcggacgtgcttgatgttgagcgtgccgccgatcatgggtttcagcgcgtcataggcggcgtcgcccttcgggatgtagagcttggtgtcgcccaggtcgcggatgcgcggcgcgaagcggaagcccaggaggtgcatcagggcgaagacgtgatcggtgaagcccgccgtgtcggtgtaatgctcctcgatccgcaagtcggactcgtggtacagcaggccgtcgagcacgtaggtcgaatcgcgcacgccgacgttcacgaccttggtgtgaaatggcgcgtactggtcagaaatgtgggtgtagaacgtccgccctgggctgctcccgtatttcgggttgatgtggccggtgctctcggccttgctgccggtgcggaagttctggccgtccgacgatga

SEQ ID NO: 291972 - DNA, 357 bp, Morganella morganii; identical to SEQ ID NO: 199679

SEQ ID NO: 291973 - DNA, 792 bp, Morganella morganii
atgcgtcgcctggcaaaaaaagccaaagagcagattgccgcccggcctaactttctgaccaaacacctcaatatgtgggttaacgcggagtcgatctggatggactcaggaaaatgggactgctgcccggagaatgcgccggatgatgaactgaagaactatccggtctgggtcggtgttgacctgtcgaataaaatcgatgtaaccgcagcgattaaggtatacgaagacaatcacggacagactcatatcaagtgcaaattctggctgccggaaggccggatagacaccgcacctaagcatattgccgaactgtaccgtaagtggggggctgccggttatcttgagctgactgacggtgaggttgttgaccatgacattatcaaagccgacattctggcatggtgtgagggtgaggacttgcgtgagctcggttttgatccgtggagcgcagtccagttctcccgccgcctggcggaagagggtatcccgttggtggaagttgcgcagacggtgaaaaacctgtctgaagcgatgaaaattgttcaggccgatgtgtattccgggaaatttcaccacgatcataacccggtgatgtcctggatgatgtcgaacgtgaccgtaaaaccggacaaaaacgacaacatttttccgaataaatcgacaccggaaaacaaaattgacgggccgcttgccctgtttactgccaaatcacgccagatggtgaacggcggggagcaggaacaaagtctgtccgatgttttatcttccaggggcttgcgctcactctga

SEQ ID NO: 291974 - DNA, 792 bp, Morganella morganii
atgcgccgcctggcgaaaaaggcaaaagagcagattgcggcccggcctaatttcctgaccaagcacctcaatatgtgggtgaatgccgaatccgcctggatggataccggtaagtgggacagctgccctgaaaatgcgccggatgatgagctgaaaaattacccggtctgggttggtgtggatctgtcaaacaaaatcgatgtgaccgcagccgttaaagtgtatgaggatccgcgcggacaactgcatatgaagtgcaaattctggctgccggaggacagagtagtgactgcaccgaagcatatcgctgacctgtaccggaaatggggagctgccggttatcttgaactgacggacggtgaggttgtcgatcacgacatcatcaaagccgacattctggcatggtgcgaaggtgaggatttacgtgaactcggttttgacccgtggagtgccgttcagttctcccgccgcctggcggaagaaggtattccgctggtggaggtggcgcagacggtgaaaaacctgtctgaatcgatgaaaaccgttcaggccgatgtatattccggcaaatttcaccatgaccacaacccggtaatgtcctggatgatgtctaacgtgacggtaaaaccggacagaaatgacaacattttcccgaacaaatcgacaccggaaaacaaaattgacgggccgtttgccctgtttacggccaaatcacgccagatggtgaacggcggggaacaggaacaaagtttgtccgatgttttatcttccaggggcttgcgctcactctga

SEQ ID NO: 291975 - DNA, 294 bp, Morganella morganii; identical to SEQ ID NO: 22504

SEQ ID NO: 291976 - DNA, 249 bp, Morganella morganii
atgatcatgcgctcagaaagcaaagagatttacggtgtgagtgttgttcctgtgatggcggttctgcaccagtttattcggtggtgggtgttgcgcgacctgaaccgagcctggtcagatgaccgcttttttaaaaagcacattcagcgccgcggctggctgcatattgcggatgcgttcacattccacagccggtatcagcgcttgcgtgaagtggtgaaagcatatcaggggaagggcgctatctga

SEQ ID NO: 291977 - DNA, 222 bp, Morganella morganii
gtgtacatccggggaaccaacgccgccggaaccaacagtgataacacactgaaaacggacgacccgcgtaatgcgttttactggcgtttcctggaaaacggtacatccaaaatggcatcacaaccgtttatccgtccggcatttgacggcaaagcggatgaggcagcagatctggcgctgagcaaactcagtcaggctatcgataaggtgctgagcggatga

SEQ ID NO: 291978 - DNA, 222 bp, Morganella morganii; identical to SEQ ID NO: 281792

SEQ ID NO: 291979 - DNA, 1767 bp, Morganella morganii
atgcgtgttttactgccgtttttagccctctaccgccgccactggtttttactgacgctcgggatcctgctggcgattgccacgctgctcgccagtatcggcctgctgacgctgtccggctggttcctggccggtactgccattgcaggtgtgccggggattgccttttttaactatatgctgcctgccgccggggtgcgcggtgccgctatctcccgcaccgccggacgctatgcggagcgcctggtcagccacagtgcgaccttccgtgtgctgaaacatctgcgggtatttgcctttgagaaaatcctgccgctgacaccgggcggtattgcccgcttccgtcagggagaactgctcaaccggctggtcggggatgtggaaacgctggatcacctctatctgcgggtgatttcgccgattgttgccgcactggtggtgattgcggtcctgaccttcgggctgggttttctcgatctgactatcgcttatgcactgggcgggtttatgaccttcctgctgtttgccctgccggtggtgttctattacgccggtaagccaatcggcgtgcagctgaccacactgcgggcacagtaccgcaccctgctgaccagcgcattacagggacaggcagaactgactattttcggtgcgcagtcccgcttccgcgagcaactggcggagactgaacaacgctggctggtgcaacaacagcgccaggccggtctgaccgggctttcccaggcgattatcattctggcgaccgggtttgccgtcgcgctgatgctgtggatggcatccggggtcagctggccgtaccgcgaaagcggcgccattatcgccctgtttgtattctgtgcgctggctgcattcgaggcattgggcccggtggcagtggctttccagcatctcggccaggtgatgacctccgcagagcgtgtatcgcagatagtggacaccaaaccggaagtaactttcccggccagtggtccggcagcctccgcacaggtcagcgtcagcctcagcggtgtcgggtttacctatccgggacagccgctgccggtactgaaagatatctccctgacactgcgtgccggtgaacaccttgccctgctggggaaaaccggctgcgggaaatccactttattgcagctgctgacccgtgcatgggatgtcagtgaaggtgaaatccgcctgaatgaccagccgattgccgcttatgatgaaaataccctccggtcactgatggcagtggttccgcaacgtattcatgtgttcaataacacactgcgcggtaatctgcggatcggaaataacgaagcaaccgatgcacaactgaatgcggtactggcacaggtcggactggaaaatctgctggataacgaccaggggctgaatgcctggatcggcgaaggcggccgtctgctttccggcggcgaacagcgccgtctcggcatcgcccgcgccctgctgcacaatgcgccgttcctgctgctcgatgagccgacagaaggactggatgcagataccgagcagcatattctcgccctgctgcgggatatcggccgtgaccggaccatgcttatcatcacccaccgtttacagggcctggaacacatggacacgctgtgtgtgatggatggcggacagatagccgaacaaggctctcacgacgcgctgctggcgcgcagaggccgttattatcagtttgtgaaccgtattccggtcatgaccgggggatctgatgccgttttatcagctggatga

SEQ ID NO: 291980 - DNA, 309 bp, Morganella morganii
atgattgataacaaaaagcgtccgggtaaagatcttgacagaatcgacaggaatattcttaacgaattgcagaaagatggccgtatctctaacgtcgaactctccaaacgtgtgggtctgtctccgactccgtgtctggaacgtgtgcgccgtttagagcgtcagggctttatcaccgggtataccgcgctgctgaatccgcactatctggatgcctccctgctggtattcgtggaaattacccttaaccgcggggcaccggatgtgtttgaacagttcaacaatggtaatttcagcttacgactatag

SEQ ID NO: 291981 - DNA, 252 bp, Morganella morganii
atgaccaagcgtgaccagtccggcgtttaccagcgcgccggtggtctgggtatggcccgccagatctgccgccgcgttagcgctgacgttcagcgacgaggtctgaccgagagcgttgtcactgcccagcgccagcgtacccgtacggacaagagtattaccggtataattattaccggcattatttattgtgagtgtttctgcacccgcgtcaattgccagggcaccggctccgctcaggcgtgcggttaa

SEQ ID NO: 291982 - DNA, 420 bp, Morganella morganii
gtgaatactgccgctcaggttactgaggatcagggcggcaccggcgttatccagatgcaccgtggcgctgtctgcacccagattctgtgcctgcgacatggtcagtttaccgctgccgttcaggtgatgttcaccggtgaagctgcggttagcaccgctgagggtgacagccgcctgtgtgctgacccggccgtcgccgctcagggcattcaccagggtgagattatccgccagcaggttcagggtgccggtgaccgccaccgccgccgtaccgagggtgccgttatcgcgcagggtgacggaggcatttttgccgatctgcgtggtgcctgccagaccgctgttggcggccgagacagacagatccccgccggtgacactgagggtgccgttaccggtcaggccgccggtcgccgatga

SEQ ID NO: 291983 - DNA, 333 bp, Morganella morganii
atggtcaaacccggccagatcgctgagggtcagggcgctgttgtccgcgatccccacggccagatcagccccgagtttttgggtgctgtccagcgtgacggcggcactgtcggtcaggctgagccgtccgctgccgctgacattattggcaaaaatgccctgataccccgccagttgcagggtatcgccgcccgccgccagattgacgctgctgtctttgccgaggttgttttcggcggccacacgcagcaggctgccaccgctgacctgccagttaccgaggaagccgctgttatcggcggtcatctccgccttgctgccgccggtgactga

SEQ ID NO: 291984 - DNA, 594 bp, Morganella morganii
atggaaagaaaaaatagtgacgatgtttctttgcccttcacacctaaagaaacactagtagatagaattcaaactctaatcaaaggtcggagcataagagctgtttcttcggcttggggactaccgtattccaccttaaacaactacttgaacaaaggcactgacccttcattcaaagcaatacaggtaatagctgaagcagaaaaagtcagccttgactggctggcatttggctcaactcagtccaaatcagaaccgcctatcgatacattaaaatacaacaaaactagtccagctataagaaatgcgtgggacatggtctatgaatcactttcagaccatgaaatcaatgagttactcaaagttatacataggaaaggcattgaggggattttgcaaatcactaaaacaaattcattggaaagtagtattgataacctacatatcaggccaacgctgaaacaagctatcaaattggctatggctggtgatgaatcactagaccaagagattttgcgccgcattgaagagaagaaaaacatcgatgagactggtcatttaagccaggaagaagatcaccaaaaggtgggatga

SEQ ID NO: 291985 - DNA, 426 bp, Morganella morganii
atgaaaatatatttttcaaaaatcgaaaatggtttttttgctgagtcactgaaaccggattacatcgcagctggatcgtggcctgatgatgccgttgaattgaccgagaaggaagctgaaacgtacatggcaaaaacaccaccagaaggaaaaaaactgagcggaaacaacaaaggccgccctgtgtgggttgatgttccgccaccaccgaaagagcaacttattgaacaggcagaagcagaaaagcaacgcctgctatcagaagccgccgaagcaattgccccgcttcaggatgctgttgaccttgatatggcaacaccaaaagaagaagcactgctgaaagagcggaagaaataccgggtgatgctcaatcgtgttgatacatccctcggagctggtgtggtatggcctacaccgccggcttga

SEQ ID NO: 291986 - DNA, 291 bp, Morganella morganii
  misc_feature (260)..(269): n is a, c, g, or t
atgaatattaaaaaagttgctgtatttacgggaacccgtgcagaatatggattgctatattggttactgaaagacatacaaagtgattctgaattatcattacagctgattgtttcaggtatgcattttgcaccggagtttggtgaaacatataagcaaatagaaaaagacggatttcacattgacgaaaaaatagaaatattactatcatcaaattcctcagtgggtgtcgcaaaaagtatcggacttggtgtattagnnnnnnnnnntctgatgcactttcccgtctga

SEQ ID NO: 291987 - DNA, 666 bp, Morganella morganii
atggaattaacttcaatgaaacaaccattgctcaatgcgatggacggaaatcagataaccgcggaaagcaaaaatatttttcaaaaggtagcggataaggttgttgccgttgtgaacagttgcaggacattttccacggagtgcagtacacagaaagatcataatatacaaaaagcctgcgaacgattagctgctctgacgttggtgtcaccggaaacctacataacaggaaccatgaaagaaagcgcagtaaaactggacatagtattgcccggtaatacggcctctgtcagcaggcaaacagatacctctgctgccgcatccatcggtaagttatcaatgatgaaaacgtcacagtgcaccgcacaggaattgtataacatgctcagtaaacagcagagcaagtccggaacatcagaggagatgaatgaaaaaataaaggtgacgctggatatggtggataaaaaattaagccacgaagatattatcaaagcaggacatgccggaatagttgaaaacggtgtggacagaatcagaaaaaatatcatgtctaatataataatgcagcatcgtatgaacgagattaataatgaaaccggcttaaacgataaagatatttcagaacttgagttggcacgaaatacggcgtttgaattaaaacaataa

SEQ ID NO: 291988 - DNA, 669 bp, Morganella morganii
atgcaattaaatggaatagtacagcaaagaatggatgaaaaatctgtaaatcagattacagagcaaggccgcgatgtttttcaaaagacagcggataagtttgtcgctgttgttaacagttgcaagacattctccacagggtgcagcacacagaaagatcagaatattatgaaagcgtgcggtgtattgctggcgcaaacgttggtgaaacaggaatgctataccgggggattcaccggagagtgtgtaaaaaaactgggtatgacactgcctgataagatcttcgccagaagtgaaacaggtgtacccggcagcgcgtctattggcaaattatttgcgctgaaagcatcggagtgctccgcacaggagctgtatgacatgctgagtaaagagctgcataaacaggaatcctcaccggaaatgctggaaaaaatacgaactgtgctgaagatggcagaagaaggttcagatagtgaatctatccgggggacagaatacgcagagatagttgaatgctatggggatgagataaaaaacgccgttatttctgacatattaatagctcatgatattaatgaggctgagaacggcccggtattagaagagacagatgttattcaactggaattaatgaaagatatttcatttcgttcattgagtaattactga

SEQ ID NO: 291989 - DNA, 771 bp, Morganella morganii
atgaatatagaaggcattgcaatggaagatatttgcaataatatgattaaggatttttctcattattttgattgggataatatcggtgtgaattattctattgttaatgtgaatgagaaaaccgtgcatacgatatcaagtaactatgaatggttgcttatgttttggggtgatgaccttgatttattcatgggtgaaagattaaataccgggattcaatattggagtaattattcagatgctttctctgaaacattgcggaggagcaaaaacagtaaatttaaagtggatttttgttcaaggtatggaaatgtatttgaaattttatctatcaatgccggaaagaaattgtctgtcacagatatgatgtctgtatataaatggaaaccggtaatgtcagattatattcatcgggtgtggaaaaaaacggaaaatattattttaccactgcgggcgaaaatagataatggcaataatcctttaacaggaaggaatgaaacggaaatattagatatccaccaatatatgcgtttcggtaatatccgctttacccgcaaagaaattctcaccatccggttattattatcccatcgtaaagtaaaagaaatcagcgcggtgcagggatgttcggaagcatcagagcataaacgtattcagcggataaaagaaaaactgggctgcccgcatgcctcgtccggcggggtatttaatgcgctgaaagaaaacgggatcacactggcgtgtctggatacgctggtaagtctgccgtaa

SEQ ID NO: 291990 - DNA, 369 bp, Morganella morganii
gtgactttttttgatggcctttcccgtcagttgcaaatatctgtcagggtagaagccaataatacagctatgaaaaataaaaaaatagggcaccctctgaaaataaatgactccgattctcgctgggcagtaaccggccgtaaagagtataataataaaggctatattattcgtgagtatcagccttattttataaatgattggcgatatgcccgtgattatgtcgtacaaaatgatcagtggtcagatactcattattatgacccactgggacgtcttatcagcgttgaaacagcaaaaggttattttcgtaacagcatatatacaccatggtttattgtacaggaggatgaaaatgatacagagtaa

SEQ ID NO: 291991 - DNA, 123 bp, Morganella morganii
atggaaatcgtttgtgggaaatgtgacgtcggaaataacgttaacaatgtaaaatgtcgtagcaatggttcatctggtaaccacacaacctcttacacctactccgccaaatttgtttgctag

SEQ ID NO: 291992 - DNA, 615 bp, Morganella morganii
atgaagcaaccgtgggagctaaacccagctctaacaatagagcgacttaaacaacttgcatccctaattcgaaatgtcagggatgatgtgattgatttacataatgaagagcttggtgattctgctcgttcaactgggttgagggcctatgaatgttgccgaacgaggataattcgtgctgcaactcaatatgaagagtggccctggcttggcatagtgaaagacgatgggaaatttaccttttctattgattcagtgccagtccgtttgtaccggggaggccctaatcgcccggaagagcgtaggctgataccttgcgtagaagcgctgagtcagatgagtttattgcctgttgaagtaggcaacgctgcttcagttatttggttttttgctgttgaagttgatgatttccgctatgttgagcgtgtaacctttactggctttttagaaggcgtgcaggtttcatgctgggaaattcctttggatgaaagggttcctgctttcagctccattgataccgaattacctgagccagtcaaaactcagaaagcatcaatctctgttaaaaggaaagataaaaaggccgagaatgatgactcgaataatggttcgtaa

SEQ ID NO: 291993 - DNA, 1128 bp, Morganella morganii
atggctatagaattttatggcgagcggcttcggctcgctcgtttgttaaaagggtatactctgcaagagcttggtgatgctgtttgcgtgacccggcaaagtatacatcagtacgaaagtgacgttcgggcaccagctgatgacgtgcggaatgcattggcagagtttcttcaggtttccaccgatttcttcgggatacctctttctggtgacgttaagccagagcaatgccattttcgcaaaagacagacaacgcctgcaggtgttaaagagcgggttcaggcatacagtactattcttgagcaactcgttgctgagctgcatgaacacctagatatgcccgagaacggttttaatttgattgataatagtaagattgtagaattaacacctccattgatagaaaagattgctgagggggcccgtattcgttgggggctaacacctgatgcccctatagataatatggttaatgttgttgaaaatcagggagcaattgttacctgttttgatggcgtgtctgaaaaagttgatgctttatctgttaatagaaaattccctataataattcgcaacactgcgaaagaaagtgcctgccgaatgcgttttgacttggctcatgaatgtggtcatttaataatgcatgatggtattgagactggatgtaaaaaaacagagcgagaggctgatgcttttgctagtgctttcttatttcctagaaagtcttttgccagagaatttccgtcctgcttaggtgttggcggaatgattgactggaaaaaagtgtatgctttaaaagctcgatggaaagttagtgctaaagcaattatttatagagcacatttcttgggatttattaacgcccagcaatatagaagcgctaatgtttggttcagtcaaacacgacaaacaaaaaaagaaaaactggacgatcaaattccgttagaagaacctcatgttcttgaggaaagtttaactattttgaaagaacatctgggtatatctttcggcatgttagctgaaaagattaaaatcaaaccagaattattggcagatatatcaggtgttaaatacgtacctgacatagatgatggctatgacgatattgttgttccattcaagttttga

SEQ ID NO: 291994 - DNA, 1797 bp, Morganella morganii
atgcttgagaagttagaattaaccaaaaatgcacaattttatatttccaagggaaatgaaccactacctccaatagaagatgtatttatcttggatatattaaatgcttctgatgacaatattgaacctgatgctctatatatactaaatgaatttagaactcgaagccatttaattgatgaagatatcccttatttatattcagtcaggatattccccacgatcaggccagtttacttcattgggaaagatgaaggtgagcttggcctatatgacagaattcatgcgtttattattatttttgaatttgaaaatcacattagtataatcaaaaaaagctgctctaatatatctgaaaaaattgagaaaaactttgacctgattactaacacaatgatagctgagactttcaatgattctgatgtttctttccaaagaatatccttaagaaacatgacggtatcggacaaagcaataaggcagcgatcttatgaagctccggatttaaagggcactttctctactcatgctgctggaagatcaataccgctattcttgaaattcagacaaggatcaactgtaagaactatttcaggaaccgggcgtttagtcgagtcatctaatagaattaactttgataacttagctctttgggtttacaatcaactttctctaataaaagatggtgggggcgaaaaggattttttagatgcatttgctaagcagaagaaacttcatgaagtgcttgagcactcaaaaccaaatgcaattttaattgaaagctcatctttatatgaccaactcatcgaagatgatattaaaattagatatgaaaacaaaaaaggaatagaggttgaactaaaaacgaaggaattagagcgattgataaagcatctcgaaagagtttacgccatcgattcagaaggaaaaataacaactaaatttggccgggcatttatcagaataaataataaaactttaaccttcgactcctcattcttgagatcattaaaagtaaatgtatcaggaagtaatgttacgctacaaagctatataattaaaaatggattttatagtataacttttgatgatccccgctatatgtattttattggaaactgttttcaagatgattcaggcatcgcagaaataaatagtatattagatatgttaagacccgtggaaaatatggattccgtaactagtgaaaaaggtaatttcaggaaaaccagtgtccaattttcgaaagggtcaatgtttaatctagttgagaagatacataaaaatgatgactatgttttttgcgatgatttaggtaatgaatgggctgatcacataacctttaataaaggtgactcatgcatcaatttcattcattcgaagcatggaccggttagtacttccgctagtaacttgcatgatgttgtcggacaagcggtaaaaaacttaggttacatgaattttagtaaagctgattttatgaaaaaattcgaagctaaatttgtagagaaatataattcaactaaaggtgagacaaatataaaaaggaccagaaaaggcaactcaaatggtctggatgaatatatttctaatcttttaaaggattttaaattgcatagaaaatgcattctgagctgttcctttgtatcaaagaatgaaataaaggatgagtttaataaaatatccagaggtgagaaggtgaatgggcacattactcaattgctatggatattgtcatctttttctcatgcagtaaaagaagtaaacgcaatcccaattatctactgctcagagtga

SEQ ID NO: 291995 - DNA, 543 bp, Morganella morganii
atgacacttccccgagacgtccatgcgtcccgtcagggccagcatgactacttgtgtggcatctacagcctgattaacaccctcagttatctttatgacggcagagttcggcgagaaaaattgatgtaccacctacttagcagctataaacgacgatgggatttatttgatctactgacgcttggcttggatgaagagcaaatggaccacctgattggtgatgtcctgttgaaagggcattacgcccgacattatcctctcaatattcatacccctttccgttaccgctcccgacgtacccgacagattctcagcgacatcaacgactggctggcaccatcggaaaatcaggcgcagcgcgtggtgattctgggcaccacctggcactggtctgtggttattcgcacggattccacccggctgttcttgtttgacagcttggggatacatagtcagcgcagggacaccttctccattcagccagagctgaaacggcatacgctgctgacggatgcaatttactttgttgaacgtgaattctga

SEQ ID NO: 291996 - DNA, 381 bp, Morganella morganii; identical to SEQ ID NO: 23168

SEQ ID NO: 291997 - DNA, 495 bp, Morganella morganii
atgaaaaaaacattgatggtctcactaccgagtatcctactgcttacattatcagcagaagccaaagtgttaccgatccagtcatacaacgtcttaacggagcagttcagtcttttgaacacttgcagagctgagggatatattgtcgatacagcagtacttaagcggcttgataaactcatcaaacgctttgaataccaggatgcctccggtaccacaacccgcatcaccccggcaatggagcaggaatatcacaatcgagcggatatggacgtactgaatgcacgaatgcttggtcagcaggatcaggcctccattgtatgcaataaagtgcttaaagatttcactgaccggttcgatgagcttgaggaaaagatctcagccacgaactcgccgcaaaccgaatcccctgctttagcacccgcccctaccgagccggaagaccgcccgatgaaatgggaaaacagcccggttcagggtattccaattcagtga

SEQ ID NO: 291998 - DNA, 324 bp, Morganella morganii; identical to SEQ ID NO: 23165

SEQ ID NO: 291999 - DNA, 765 bp, Morganella morganii
atgattagtatttgcgaatatacgtcattggattgggtatatatttggatgagatattttattatctcatttatcacatattcaatatttgcatacatcattaagagaatattatacccgttcagaaaagagttttcttctcctcctattgcaagatggcagaatggacatgaaagcacattttttatcagtcctgattactggtgggcatttcgcttcaaatcccgactaaaggcaaacgttacgggtgaaaaagtgaaggaagagttaaaagattatgtggatataaacaataaggttaacttttgtattagtgttattatcatggtgcttaattttcttgtttatgaatatgctcatgattacttttattcaaaagcgttaatgtgtatagcttttattcgatttatttctagaagttatgagatcacatatgcttttgtttgtgacatatttcagcagcatgaatccgttacggggttaaacaaacatgaacgtattcggttagctctatttagctatttagagatatttttttattcagcggcggcatatatgctattaccgcaaataaattctgtatatgatgccgttacaatgtcgttgagtgttggcacgctaacgaatgtggggtatgcatttaatttttgtgggcaaaatacacctttcattacaaacattgtgtttgttcaggtttttgctacattaagtcttgtagtactaagtcttgcagtatatctttctaggaaggatggtgacacgtaa

SEQ ID NO: 292000 - DNA, 498 bp, Morganella morganii
atgaggaacccgcaggtaaaaaagcgtgaggctgccaagatcaggaaaaaaattcagcgtgatacgttggttaaaaaatttggtaggttaatggaaatttatatccataaagatatggagaaatgtcttgaggaaattatcaggggaggagggtttcccgctttagatgttgatatgttgaaaacaactgaaggacgttgttttgttatagcagaattgattggattcacttatttgcaacaatgttctaccgtcaaaaataagaatgaaaaaataattcgtgaaattcatcaaaaggtatgcaaagagagagttagaaaagataaaacagtcaaggccgttgcgttggaattgaataataatagcgttttttcaataggtaaaaaagacggtgatattataatagatgacggggagtggactgatgccaaggttaaaaaaatgagtgaattttcaacggtagctaagattattattaatctggataaaaatacatga

SEQ ID NO: 292001 - DNA, 198 bp, Morganella morganii; identical to SEQ ID NO: 23162

SEQ ID NO: 292002 - DNA, 1062 bp, Morganella morganii
atgaataatatcgacaatgggaagaagtcattaaaaattggggtaagcaaagatgggcacccactgagaatgcgtgtggatgcgattactattgtaaccatggcagaaaacaagaatgagagaatacttattaaacgttgggttgagagtgtttttgaagatccaacgccctattctttaagacctgcgacaatatcgaagaatggaaaaaaactctatcaaaaggggtttgttatatactctggaaataccatgctgctgaggtttgaatataaaccagtaagaagaaatgttggcaacataagaatggagtttcgccctcagcatttggatgaaaagggcatggacagccttattctttggatggctgaaagtggcctcggtgagtttattttcaaactcttaaaaagagcgtggattacacgcttagacgtggctctagatttgtataagtgtacccttgaggactatttttttgggatgaaacgctgctatacagggaaaatgaaccttggcacggaaactaggggattaacgctgggaacagtaaattctcatattcagatgtctatatatgagaaaattgatctgtctgatgctgagacatcctttaaaacagtaaaagccgagggcaaaaacactctcagcgtggatcagttcgcgggtttccttcgtatcgaggccagaattcgcccaaaaagtatacctcactcaaagcagagtaagaatgctctgcttctggctgatataggcaaagtagagaacccgtatgaagatctacagatctatcagaaaggtttgaacgaaacgctgtatctcactgagagtcgctttaaatatgaaaaggggcataatctggtgaaaaataaacacgactttttgaagtctgttaatctcaggaaaatgccgaagcgtcttgagaatgtgttcagaatgtatgaatatgatcttctgaataagtctgaaatatggtgtgcttggcccagttgcgtagctaaactcggcctgttaagcaacgcgccgttgtgggtcaacagcaacagaatacgccgatttggttaa

SEQ ID NO: 292003 - DNA, 1269 bp, Morganella morganii
atggcaaagctaacggacattcagatcaaagcatgggtgagggctggggaacgatttaatggtcgatctgatggcaatggcttgtatctatgctttcctaaaaactacgctataccattctggcgtttccgctatcggtttgtcgggaaacagagggcaatggttattggaacctactctgaattttcactcgctaaagcgcgagaaacggcgaaagagctttccgcacgtgttgccttaggctatgacgttgcaggagaaaagcaggaacgtaaggccgaggctatcaaaaagattgaagaacaaaaaaatgcgttgaaggtttcagatctggcccacgagtacttcgaacgccagatcttagggaactggaaacatccagatatcctgcgccgtcgtatcgacaaagacatcaatcctagtattgggcatcttaaaatcgaagatgttcgcccccgccatattgatgatatgttgcagaagatcatcgcacgaaacgcccctacagtggctaatgatgtcctccgctggacccgccgcattttcaactatggtatcaaacgccatatgctggagagtaaccccacaacagcgtttgagatcgctgatgctggaggtaaggagaaatcccgtgaacgctggctgagcagagaagaattgattaaattctttcaggccatgcgggtgactcaaggattttcccggcaaaacgagctgactatgaaacttctgcttgcactctgctgtaggaaaatggaactctgcgctgctcagtgggctgaatttgatttaaataactcagtctggcatttacctgccgaacgggtaaagaacggtgatgctatcgatatccccttacccgcgataaccgttgaatggttgaaggaactacaccagatgtccctcaatagccagtgggtgctacctgcgcgtaaaatgcaacacagaatgatccctcatatacaggaaagtacactgcccgtagcactggcaaaagtgcgcagcaaccttcctgatataccaaatttcaccatccatgatttccgacgtacagggcgctcacacttagctgctttaggcgttgaccctgttgttgcagagcgttgtttaaaccaccgtatcaagggtgtagaaggcatctataaccgttatgaatattttcaagaacgtaaagcagccttagagcagtgggcagcattactggcctcactggaacgcggtgaggattacaatgtgatgccgataaaaaacaacaaaaaaatcagttag

SEQ ID NO: 292004 - DNA, 399 bp, Morganella morganii
atggccagcagagtaattacgttcggtacatttgatgttttccatataggacatatcaaaatattagaacgagctaaagcacttggaggttaccttattgttggagtctcttccgactcacttaattatagtaaaaaaaacagatatcctatttatagtcaatcagaaagaattcatattatctcatctcttcgttgtgttgatgaggtatttattgaaaactctttagagttaaaagaatcatatattaaagaatataacgcagatattcttgtaatgggagatgactggaaaggaaaatttgatacttttggtaatatttgtcaagtaatctatttacctagaacaccatctatctcaactactgaaatcattgaaatagcaagaactattaaataa

SEQ ID NO: 292005 - DNA, 639 bp, Morganella morganii
atgcatatctatgcttttggttcgatatgtcgtggagagattgattcattttcagacattgacatgttagctattgtcagtggtcgggatgaaaggtttaatccgagagattactcgatttattcgtatgaacgaataagtgaactctggaaagaaggtaatccatttgcatggcatctttttttggaatccaagattatttattcacctgataacattgattatttgcggagcttaggtaaaccgagtaactataattcagtcttagctgattgtgaaaaatttctagagatatttattagcgctagacgttctattgaaacatctgatcttactgagatctttgatctttcttcagtatttttatcgatacgaaattttgcaacatgtttttctttaggttgcgatgtaaggcccgacttttcgcgaaattctgcacgtaacttgggtattcatagcataccaatatgtgatttgacctatcaattattagaaagggccagagtgctttgtacgagaggtaccggtgaaattctgaatgctgatgacattaagaaagtcaagactcaattaggtttaattgagtcttggatgcgaggaataataaaattaactggtggcaaatatgagcgagtttag

SEQ ID NO: 292006 - DNA, 276 bp, Morganella morganii
ttgaaagtggtcaatggttcagggcaattccgtgaaccattattaagtctgaccgagaaagctatagaacgatggtctaataacaataatctcagtaatgttgatcacgctactctcttgttgaaagagatgtcaggtaccttattcttccttgcaaacaagagtcaggagcaggttactgaagactataagattctttctaagaaagtaagtgaccagttatctaaattggaaattgaattgaaaaacagagtcgttcctaagacaattcgttga

SEQ ID NO: 292007 - DNA, 333 bp, Morganella morganii
atggtaatgccattgaaacctgacaattctttctttaataaaattgatccattttcatctccattggaagtttgggaaaaaagggagccaacagcagaagaaaccgaagagttattatcgagaggagagtggaaaccatgtaaccaaataaatgtaagaatagattcaatattaaattccgcatatgatgctgcaaagttaattgcagggaacaaagatgagaataggattaatcatcatgttattagttatcttaaaaaaaacatggaatataaaaaatggcgtgacggcatgccttacccaacacctaaacaactagttgattatcaataa

SEQ ID NO: 292008 - DNA, 642 bp, Morganella morganii
atggaaaaagattccaaacgcggttcagcattgataagtgctatcaaatcagaatcagtcgtcgatctcagcaaggagtacgctgagtacggtctggatatgttgattgactcagatgttctaaaagatattccttttattaatactgccgttgggatatttagtgttgtaggttctgcaagagactatatatttactgaaaaactcattcgtttcttgactaaattttctgatctttcaaaatctgagcgagtagctatggtcgataagttgaatgaagacgataaatttagcgggaaggctggtgcaagaataatcgaaataatagaccgcattgagagtgaagataagccagagttagcagcaaagttttttaaggcattcgccagtgaagagattaatttctttgagtttcgtcgtgtgcttgtcgcattggaacgtattccagcgtttgacattcctgcattggctgcgttttcgatgtgtaatatttctgaatccttaagaatggaacagtctcttctgcttgcatttgttaatgcgggacttggacaaaataatggcggcttcgatggtggtgcaatactaccaacagaactttgtgaaatattcgtaagagccggaaaactaaaatcagactaa

SEQ ID NO: 292009 - DNA, 576 bp, Morganella morganii
atgacattaattaaaaaatcattttttatttttctgttgtcacttggagtgaatttttcagtattaaattccgggaaggcagcaacttctgcatcaactgaattcaaggcgactattgttggtggtgcatgtgatattactgcgccattaacaattgttataaacggaggtaccgttatttcatcagaggaaatagcatctaaggctaatccggctgaggtttttgaactaaacctttcaggttgtcagggttatggacttactcctgcaattacgctggaaggtaatgtcagtaatatctccgggacgccattgttcctcaataataccagtacgacaaaaggttacggaattttgctggcaacagtgggtaatggtaattttaaaaagaatgacaatcttgctgcagatatgaaaattacagcaacagataaaccatggtcagttacccagacttcgatattaaacggatcgcttcttatgattgcatccgtcagttgcggggactgtaccggctctgatatgcagggtggtgaattgaaagcggcagttgcatttaaatttgtatataactga

SEQ ID NO: 292010 - DNA, 198 bp, Morganella morganii
gtgctggagcatgactggctcacgcatatccaggacgggctggatattccgaaagcactggggcagcggatagcgctggattattatccgccgcagcatgcgcattccgttttgcagaaactggttctcggcgtgaaggcacataccctgtcgcaggtggttaccgcgatggaacagatggatgaaacccgggagtaa

SEQ ID NO: 292011 - DNA, 426 bp, Morganella morganii
atgaatgaaattaccatttatcacaatccaaattgtggcacttcacgcaatacgcttgctatgatccgcaatagtggtgttgagccaacgattatttattacctggaaacaccgccgtctaaggatatgttagtacaacttattgccgatatgaaaatcacggtaagggcgttactacgaaaaaatgttgaaccttatgagcaattaaacttagaaaaagatatttataccgatgaccaactcattgattttatgttgcggtacccaatactgattaatagacccattgttgttacgccaataggaactaaactttgccgaccttcagaagtcgtattagagatattacctcatccgcaacagcgtgagtttatcaaagaagatggcgagcttattatagacaaacaaggtgtcagagttaagtaa

SEQ ID NO: 292012 - DNA, 1479 bp, Morganella morganii
atgctgttgtcctcctctcgtcaggactggctaggtaacatccgtggggatgtgcttgccggtattgttgttgctttagcgttaattcctgaagcaatcgctttttcaattattgccggcgtcgaccctaaagtcgggttatacgcagcattttctatttcagtgattattgctgttatcgggggacgccccggtatgatttcctccgcaacgggagcaatggcacttttaatggtcgttcttgtgaaagaacatggccttcagtatctattagccgcgacggttttaaccgggatatttcaagttatcgcaggatatttaaagctcggtaatttaatgcggtttgtttcacgctctgtcgtaacagggtttgttaatgcgttagctatcttgatttttttagcccaacttcctgagttaacccatgtgagttggcatgtttatgcgatgaccgcggcaggcttagggattatctatctgtttccattaatcaataagaccattccttcaccattagtgtgtatcgttgtattaacggtcatttcaataggccttggccttgatatccgcaccgtcggggatatgggggctttacccgatagcttacctattttccttttacccgatgtgccaataaacgtagaaacactcattatcatactaccttattcgctcgctcttgcggttgttgggttacttgagtcgatgatgaccgcaacgattgtggatgatttgaccgatacaaccagtgataaaaatagagaatgtaaagggcaaggtattgccaatattgccaccgcttttattggcgggatggcaggatgtgccatgataggtcaatccatcatcaatattaaatcgggtggtcgaggtcgattatcgacactggttgcaggcgttgttttattgctaatggtagtttttcttaatgattgggtatcaaaaattccaatggcggccttagttgctgtgatgattatggtatcaattgggaccttttcttggcaatcgcttgctgatatacgagtccatccgctatcaaccagcgttgttatgatagccacagtaattgttgtcgtttggacccataatctggcttatggggtacttgtcggagtgctcattgcagcgcttaattttgccaataaagtggcgagatacatgacagttacatcaacgctagataaaaaagtgcgccattatggagttcgggggcaaattttctttgccacatcagaacgctttgttaatgcctttgattttaaagaagacattgataaagcgattattgatgtgaatcaagctcatttttgggatatcacctcagtcagtgcgttagataaagtggtgattaagtttagacgtgaagggattgatgttgaaattaaggggatgaatgaagccaccgcaacgttggttgataaatttggtattcatgacgatccgaaaaaaattgaaaaattcatgggaggtcattaa

SEQ ID NO: 292013 - DNA, 858 bp, Morganella morganii
atggcagcagatatcattcaaaaaaattgcgtaattgggtgtattgaccgttcgtcctcggcaattgctgtatgtcacgccagtgcttggatagctcaaacactcgacctaccactgacactgttacacatgaatgaaaaaatctcgacatcagcacaccatgatttaagtgggatcatcggatttgatacccgagaaactttattgaatgaactcgtggatattgaggaaaagcgagcgcgtttaacccgtgaggaaggccgacaattattgatgagtgcaaaaaaaatcactcaagatttaggtcttcatgatgttaatacacttcagcgacaaggaacgttagccgaagtgctaaatcaagaagatacgcatattgttgtacttggtcgtcgaggcgagcaatctgaattaacgggccatattggccgtcaactcgaaggcattattcgacttcaaaaaaactcagtgcttatctgtaagcgaaactttaccccaccgaaaaagataatgattgcatttgatggcagtgaggaaggtgaacgagtcattcatcggttaacacaagtgaaattattagctggtagtgattgctatctggtgatgcacggtaaccaagactgtcagctcaaaaaagcacaaaaccaacttcatcaagccggtattcaggtgaaagtcaatttacttgagggtgacaatagcatcgttgatgagttgtgtaactttgcagtacaacaccatattgatttgatcatcatgggggcttttggtcattcgcgattgaggcaattttttaccggaagtcatacgacagagatgatacataaaacgcccgtgtcattactcatcattcgttag

SEQ ID NO: 292014 - DNA, 1998 bp, Morganella morganii
atgtcatcatcaccacaaaagtctcaaacgtgggggaagataaatccgcccgttttctttgtttccgcttttattattttatgtgtcgttgcaatagccgctatttttcctcaacgttctgaaattttgctcaaagccctacaggcacaactttttgagaatgccagttggttttatattctggctgtcgccttaattttattaactgtcgcctatttaggcctctctcggtttggtgaaattaaattgggccctgaccattcccagcctcaattcagttatctttcctggtttgctatgttgttttctgctggaatgggtattgggcttatgtttttcggggtcgcagaacccgtgatgcattatcttgctccccccattggagacccacagacagttcaagctgcaagagaagcgatggaaattacgtttttccattggggactacatgcctgggcgatttatgcgattgtcgccttaattctcgctttttttagttatcgacatggcttaccgctcaccttacgttcagcactttatccgatcattggtgaacggatttatggacctattggtcatgctgtcgatatttttgctgttgtcggtaccgttttcggcgttgcaacttcgcttggatttggtgttttgcaagtgaatgcaggattagcacacctctttggttttcccgttagtccaacgatgcaagtgattttgattgtggtgatcacgggattagccacgttatcagtggtcagtggtttagataaagggatccgaattctctctgagatcaatctcagtttagcgggtttattattattattaattgggattttaggcccgaccgtactgttactcaaatcctttgtccaaaataccggtgcttatctttcagatattatcaataaaaccttcaatctttatgcctatgaaccgcaatccagtgaatggttagggggatggacattattgtattggggatggtggctttcatggtcgccttttgtgggaatgtttatcgccagaatttctcgagggcgtaccattcgcgagtttgtcactggcgttctgtttgtccctgccgggtttacgctactttggatgactttttttggcaatagtgccatccatctgatccgcgataatggtgcagaaatgttggcgcaagtggttcaaaaagacgttgctctcgctttatttgaatttttaaattactttccgttttcatctgttctttcttttgtcgctatgttgatggtcattgttttttttgtgacatctgcggattctggggcgatggttgtcgatacgttagcctcgggtggtgaaatacacacacccgtttggcaacgtattttttgggcctttttgatgggggccgttgcaatcacacttttattggccggcggattaacagcattgcaaaccatgacgatagcgaccgcgttaccctttgcgattattttattgattgctatcgtcggattgctaaaagctttacggattgatgtgtataaaaaagacagtcaacagcttgctactttagcaccgaataccggacgtggggggttatcatgggagcgtcgattacgtaaaatagcgttctttcctaaacgtaatcaggttaaacgtttcatgacggaagtgattgagccggctatgcagtcagtcgtcactgagttggaaaagcaggggaccgaggccgctatccataatgagaaagacgatagggtgactcttgaagtacaatttggtgagaacctcaattttctctatgaaatacgattacgagactatttgacgccttcttttgcattagtgggtatggatgatgatgaaaataatgagtctcagaaatattaccgtgctgaagtttatttaaaggaaggtgggcaagactacgatattatgggatggagtgaagcgcagattattcatgatatcctcgatcaatatgaaaaacacattcattttattcatattgtcgataaatcgtag

SEQ ID NO: 292015 - DNA, 291 bp, Morganella morganii; identical to SEQ ID NO: 140041

SEQ ID NO: 292016 - DNA, 390 bp, Morganella morganii; identical to SEQ ID NO: 140042

SEQ ID NO: 292017 - DNA, 360 bp, Morganella morganii; identical to SEQ ID NO: 140043

SEQ ID NO: 292018 - DNA, 639 bp, Morganella morganii; identical to SEQ ID NO: 25154

SEQ ID NO: 292019 - DNA, 990 bp, Morganella morganii; identical to SEQ ID NO: 25157

SEQ ID NO: 292020 - DNA, 324 bp, Morganella morganii
atgctgaatgtgcgctatccctaccagtttccgtttgaaaactatctgaatcagatttatgccgtattagatgaatatgatttatccataggtgatattaagcggtgttgtgatcccgaagcaccttatttcacacaatctggtttacacggaatgcattcagattccgcactctggctggatagtcgcttaggtccgggtctgcgtgacattttactggcggtaccacaagtaaaaaatggtcagacagaagacagtactcagtattttaaacaaaattttggtgttgaacagcacggttttttgtcagcaattaaaacttga

SEQ ID NO: 292021 - DNA, 285 bp, Morganella morganii
atgcaatcactagatactgtgcgattttttgtcgaatatgacgccaataagtatttgggagccttgttacgtctgagaagaaaagaactgggcataagtggtcaggaattatcccgttatgagaacggattaactaatttcaatatcgttatccttttccggtttttttcctcattaggaatgacgtcagaagaggttgtcaggatctttaaagaactgggactgttctattctgatttaaatatgagtcaatatcagaaattaagaataaaggagggaagctga

SEQ ID NO: 292022 - DNA, 165 bp, Morganella morganii
atgctgcgccacatgggctggtttgaggccgctgacttaatcgttaaaggaatggaaggggcaattgctgccaagactgtaacttacgatttcgaacgcctgatggaaggcgctaagctactgaaatgctcagagtttggtgacgcaatcatcaaacacatgtaa

SEQ ID NO: 292023 - DNA, 1893 bp, Morganella morganii
atggctgaaattgattctcgttataaactaagcgggtccttaaatcctaattcgctccctatccttgctgcagacattcttaaatggtctcttggtcatactaaggttcgcattcttgatggccctggtgatggcagaagagatatcctttcaataactcctgaaggaatacaacatttaacccagtgtaaacaccactctgatgactcaaagtctgttagctcacgtgaaacagatgagattgttatagctttggcaaagtttggagttaagtctgctttattttttacgaatggtcgcatctccccacagggaaagcgtgaatacattgataattttccagactattctctggactatattgacggcgatttaatgctgcaatatgttgaagaaagcccgctgctatcgcgcatgtggctccatggttctaccttgggaatgactactcattgcttgcttattcccttcattattcgaaatataagtgatgatagcattgtaaaattaaatacaactcagtatgaaggtattgctaactttcggggaccacgtgaattatttgaaccattccgaccttcaattaaatctggaggagttggtgatttgttggctaattcgattagcggagagcgtaggctatccttgacagaactacctaatgctattgctaatatgaaacaggatgtattgcaaacattaaaaggtaattatactggagtgactgttagatttggtaaatccgctttgattaacccaaagtctaagaatgaggacgacaatatttggataggaggaattgagccagagagttacatcataaattttaatggagagataaagactgagaaggaatggcttcttcctgaaatgggagaggactggcaatttcctgaaaatatttcagttgctgaagttgagtgggcgggttggttttcagaaaatcatgatgcattcttgatgtacgaacttcgatggccttatgtcaccggaagcaatcaattagttgaaatttatgaatattctgaacgggaggccgttaatcaatccctttttgtagctgttaatgacgaacaacttgaattgatacatcaagatctagttcctcaacctgattggtttgaaagcttgggaggagaaactgttctaggatggctacatccttatttgtgtcataatgaaaaagagcaacaaagaagcgttaaaattgaagatgaaaagtatattccttttcatcctgatgcagaaagattttttgaagaagcagaaaatattcgtcatcagcttaaaaaaataggtattaatgagtttgatcccgctcgagcaattcatttggccgctgcattagcaagaccgctggtctatacagagtcatatgatagagcacctgcagtacagattttagaatattacgataatataccgtcaccctgttacttactcgatcggagcatgacttacttacaaatgtgggaaagtgttgatgaatccgtttttgaagtggatatagatattaaaaccatagaagctcaacttccagatgggttgacgcttaagctagatgtcaaaatgggaatgcgcacagaacggttatttgcagcagtgatgttaacagctaaaagtataggtcctgaaagtgccacccatcatgctaatcaattaattaaccttgtgagcaatatgactccctcattgaaagaaatagttgaatcaatttggcctggagctgtgttagcgacaaaacgtttttggcgcgacgaagtaggcatgttttttgaaaacggtaaatttataggccgtccatgggttatgttgatgcctcctaacaacactaccgaccaaacgccgaagctatatattattcgccccgaacagttagcagaaaacaaatag

SEQ ID NO: 292024 - DNA, 171 bp, Morganella morganii; identical to SEQ ID NO: 230894

SEQ ID NO: 292025 - DNA, 441 bp, Morganella morganii
atgctcagcagcttctggggtgagttcatattgattttcaacgctaacccgcgtctgattaccctgatttggactgcttgttgggcggtaatctctttcggactgggtgtttgggccggtcactacctcgccaaaaagcgggaccgaagaaaggaatttaatgctgtcgctgatccgctgttcctcaggctcgacaaatttctcgacgaatgcagggaagataaacgagacatgccgaacatcaccagagatgacttcagaaccctgcgcccgcacttgtccaccagtcagtgcaatcgctataacgcagccgtagacgcattttttggtgctcttgaccaattttccgagtacgacggaagaattgttccgatcatcagtgaccccaagagagtgatccccaccattaccgacttgcttgtttttgttaaacaccgctaa

SEQ ID NO: 292026 - DNA, 588 bp, Morganella morganii
atgatcacagcatgtgtagcgatcgatagcgatggcggttttggtgcccaggggacgcttccatgggcaataccagaagaatttgctttttaccaagagcatgtcaggggtggtatctgtataattggcggcagatcgtttaatgatctagttcacttatcgctatcaccaaagggtggtttgtataaaaaatgtctactccggaccacgccacatatcgtagtatcatcatcacacgaattggtgtacgatccgtcgataatggcacttatagaggctgacaggagacatcttgatctgtacttcgtgaacaccgtggacgctgctgttaaactcgcaaaagggttaggtggaatgcacgcgaataaagatatccatttcattggcggtaaacgcatatatgatgccggtctcgattattgtgacgaggtatacacctcaatattaccggctgtgtatcttaactgcgacacattctttcctgtagaaaaactgtcgcgcatgtttacaccagaattatacaagacgattcctaaccaagttcatgcggatattcctgtaattaaatggacccgcaagcgcgcataa

SEQ ID NO: 292027 - DNA, 321 bp, Morganella morganii
gtggataatatcgatgaagccattggcataatccagcggctaacggatgaaggacgattgaccatcgccacatatgaggtgccaactgccccaacagggtccaaattccaaggtaaaggcgtgcttttcactggtatacgtgatgcgcagttggaaacacaaatcatagctgagggcggtgagatcaaatcgggcatatcgagtgcggttcacatactggtatgtaaggatgtgaacacgtcatcagggaaagccaagaaagcacgcgagatgggcatcgagattatcgatgtcttggaattacggagacggttattatga

SEQ ID NO: 292028 - DNA, 990 bp, Morganella morganii
atgacaaacgaagaatttaagaaaacactgtgggatgccgccaatagcttgcgtggatcagtttctgcggcagcgtacaaataccctgtattaggattggtattcctgaagtttgtctctgacatgtttgaggctcaggcagagatcatcaagaatcgtttagctgaaccacaatcagacttgtacattgcggatgaagatatccgcaacgaaagcgtgagtgactttattcaagaccgcactttttatgagacagataacgtattctggatccctattgaggcacggttctctactcttcttgaaaaagcaacagcggcagattttgcacagcaacttgataaagccatgcaaaaaatcgaagtcgaaaacgtacagctttccggagtcctgtaccgtgaattctctcgccttgcgcttgagccaggtaagcttggcgaactgatgaacatcgttgctaaactcaaattcaacccgaaggatcatggcagcagagatattttcggtgaggtttacgaatatttccttggccagtttgccatgaacgaaggccaacgtgccggtgagttctatacaccgaaatctgtggtgaaccttctcgttgaaattctcgcgccatttaaaggcaaaatttacgaccctgcctgtggctcaggtggcatgttcgtgcaatcggttaaattcaaagatgcgcatcagaagcagctcggtcgtaaaggcgacttggccatttatggccaggaactgatggcggaaacacgtaagctgtgtttaatgaaccttgctgttcatggccttgatggtgatttgggtgaatcatacggttcaactttcaccaatgaccaacataaaaccttacgtgcggactatatactggccaacccacctttgctgcttacaatcatttctgtggcgatatcgactgcatgcgcgatttggatcggttattatctgttccaggtttcgaactcgcaacatcaaaaccgatag

SEQ ID NO: 292029 - DNA, 585 bp, Morganella morganii
atgatagttggatatgcgagggtcagtacacaagatcaatccctcgaacttcagctcgatgcacttcgcgttgcaggttgtgagcagatcttcagtgaaaaaatcacaggtaagtcccgtgagcggccagaactgaccacatgtctgaagatgcttcgaaaagaggatgttctggtcgtttggaaactagaccggcttgcgcgttcactgaaagacctcgttgaactgatcaatgaactcgaatcgagacaaattggcttccgctcagtgaccgaggccattgatacaacgacagccggcggccgactcgtatttcacatttttggcgcgttggctgaatttgagcacaacctgatcagggagcgaactatcgcagggttagctgctgcgcgagcaagaggacgcaaaggtggacgaaaaccctccatgagcaccgcagacactcgtaaggctgccgccatgctgaaagacgacaagatcacaaagaaagaggtggccgaacattttggggtcagccgtctcacgttaaataaatcacttgcgagggaaggttttgatgggctccccgatcgcgccggtaagtag

SEQ ID NO: 292030 - DNA, 543 bp, Morganella morganii; identical to SEQ ID NO: 84313

SEQ ID NO: 292031 - DNA, 429 bp, Morganella morganii; identical to SEQ ID NO: 84312

SEQ ID NO: 292032 - DNA, 588 bp, Morganella morganii
atgcgaagtgctggagacagatctgctgaaataataaaaaactggtttttgttatcgaaaaaactacggccaacaatatccttgtatactcaattaaaatcaggaacacatcagtatacagaagctgccttcctatcacttgcacaagctgctgaagcactgcatagacgtacatgtaacgacacccccatgtcgaaatcagattatcgcgcaatggttaaagatataatagaaaaggctggagaaaaacatgaaatttttttgaaagaaaaactatcttatggatatgagtattcattcagacagagactagaactgatgctatcagtttgctggtctgacgaaaaaataaaagaaagagaggatgatattaggaaaatagttcaagccagaaatatcttcactcactacccaagcaaaggagacaaaatactcaacgagaaattatctaaagatctacacgattacaccaagttgctagaaaacataatagtatccaatattttatttatcatatcttcgaacgataaagaatggactttatcaataatgcaaaggataaataaatttagatatagagatttttaa

SEQ ID NO: 292033 - DNA, 327 bp, Morganella morganii
gtggacttcagcgatcttgaaaaagcggcactacagctaaacgagctctacgaagaactcgaggttaagcggtggggtcgcgtctggaccacccaggagcttgcgcttggcttcgtcggagacgtaggtgatctggcaaagctgattcaagcgcatgctggcgtacgagacattgatgactgccaggccaagcttggccacgagctgtctgactgtttatggtcgatcattgtcctagccaaaaagtgcggcattgatctgcaagcggagttctccaagaacactggagagctaattgagtatgtatccggcgagttggccaagtaa

SEQ ID NO: 292034 - DNA, 555 bp, Morganella morganii
atgtccgcgagcaccccccccataactcttcgcctcatgaccgagcgcgacctgccgatgctccatgattggctcaaccggccgcacatcgttgagtggtggggtggtgacgaagagcgaccgactcttgatgaagtgctggaacactacctgcccagagcgatggcggaagagtccgtaacaccgtacatcgcaatgctgggcgaggaaccgatcggctatgctcagtcgtacgtcgcgctcggaagcggtgatggctggtgggaagatgaaactgatccaggagtgcgaggaatagaccagtctctggctgacccgacacagttgaacaaaggcctaggaacaaggcttgtccgcgctctcgttgaactactgttctcggaccccaccgtgacgaagattcagaccgacccgactccgaacaaccatcgagccatacgctgctatgagaaggcaggattcgtgcgggagaagatcatcaccacgcctgacgggccggcggtttacatggttcaaacacgacaagccttcgagagaaagcgcggtgttgcctaa

SEQ ID NO: 292035 - DNA, 1995 bp, Morganella morganii; identical to SEQ ID NO: 278663

SEQ ID NO: 292036 - DNA, 972 bp, Morganella morganii
atgcaaatgatgcaggcagtaagtccggtcaaactgaagtcagttatcaaattgattattgttgccgttattctcctcttcgcgggaatagttacttttaattcatataccattgtgcaggatggttcggtaaaagtcggaacctttttaggtaaggtcaacccggtcgcttatgatgccgggctgcattttccgattaacccgtttatgacatttgatacctattcaacaaaagatatccgcgtatcactgaaagagttacgtgtaccctcacaggacaaactgaaatccatcgtggatattactgtaatgctccagttcgatggcgctaaagcccccattctccgtattaacggcggtacagaaagtgaagcactggataaatatgtccgccagaaactgatttccacaattctggaattcgggaaagatgttgccaacgcacaggatctgtataccgccgatacgcaacggaaattgcaggaatccatccgtgatgccattcagggttatgcttcaccttacggctatacgatcaaagagattatgatccaggatattacgctgccggaagtggttcaggaacaggtcgtgaataccaagatgcgtcaggagcagataaaccaggcaaaagcggaagctgagaaagagcgtgaactggcacagaaaaaggtggttatcgcacaggcagagcgtgagtcctcagaacagcaggcgcttgcccgtgagcgtaatgctcaggccagctcttacgcaatgcgtcaggaagccgatgcccgtttatatgccgctcagaaagaatcagaagcgaacgccgtattacagcagacaatcacccgtgaaatgattaactggaagcaacttgaaatagaacaaatcaaagctgagaaatacaaaggcgaagtgccgaacattgttgttggtgcagactatgacggaaaaatgatcatggatatgcgttcacagcagtaa

SEQ ID NO: 292037 - DNA, 855 bp, Morganella morganii
ttgccaaacttgtcggtactcactacgtcgtcagacgattactatcaacagcgtattagcccgcaaccagccttcagcagcaatctatttccgcaactactcgaacctgagaatctacaccgagcttggcgacaagtgaaagccaataaaggcgcgtcgggtatcgatggcatgaccatcgaagccttcccgcgctggatgcaacaaggcggctggcaacagtgtaaatctcagcttgagcgaggagaatatcaaccctcagcggtcaggcgcgtggagatcgataaacccgatggcggtaaacgcaaattggggatccccaccgtgattgatcgtgtgatacaacaagcaatcgctcagatactcacgccgttgtttgacccctacttttcagtcaatagcttcggctttaggccgaacagaaacgcccagcaggcggtactacaagtcaggaatatcatcaaacagaagcgcaaatttgccgttgatgttgatctgtccaagttctttgaccgcgtcaaccacgatctgttgatgactcagttaaggagtaaggtgcaggataagcgtctgctagcgcttattggcaaatacctgcgagcgggcgtcatggtcaacgaccaatttgaagcaagcttcgaaggtgtacctcagggcggcccactctcacccttattatcaaacatcatgctggatagtttggataaagaattggaaagccgaggacatcacttcgcccgctacgctgatgactttatcatcttggtgaagtctcaacgggcgggagaacgtgttctcaagagggcactgttgcaaatagtcggtggtgataaacttatcatccccttttgctga

SEQ ID NO: 292038 - DNA, 420 bp, Morganella morganii
atgaatactgccgctcaggttactgaggatcagggcggcaccggcgttatccagatgcaccgtggcgctgtctgcacccagattctgtgcctgcgatacggtcagtttgccgctgccgttcaggtgatgttcaccggtgaagctgcggttagcaccgctgagggtgacggcagcctgtgtgctgacctgcccgtcgccgctcagggcattcaccagggtgagattatccgccagcaggttcagggtgccggtgacatccaccgccgcagtgccgagggtgccgctgtcgcgcagggtgacggaggcatttttgccgatctgcgtggtgcctgccagaccgctgttggcggccgagacagacagatccccgccggtgacactgagggtgccgttaccggtcaggccgccggtcgccgatga

SEQ ID NO: 292039 - DNA, 246 bp, Morganella morganii
atggcctttgaagataacggcaaagtgcagtccctgccgccgctgaccttcggctggcagtcctttaatatccctgaatctccgcagtggtctcagccggagatgagtaaactgaatccgcacagccgtggcagtatctggatctccacggtgaaggcatttccggaattctctatcaggacagcggtgcctggtattatcgcgcccctgtccgtgataccggaagcgatgatgtcaacgcggtaa

SEQ ID NO: 292040 - DNA, 2886 bp, Morganella morganii
gtgaagctcccaagtgaaagtcataaacagaccatcattgtaaacgtcagttatcagggtatagagccactgagtgccagttcatattatcatttaacactggaaacaccgaaaatcagtgaaagcgttatatccctgcataccaccgcagacggtgcccagtatatggaatgggatgcttaccgcacccgcctgaataccctgtttgcccgtcagttaattgaaaaggcaaacaacggcattgatgcggtactgtcaccggaaacacaaaatctgcgtgaaccgaaaccgggacaggggacctatgtcacactgacactgaagccgtatgaccaggcaattcacggcagtgaccggacgtttacactttattacggtgatattttcacgagttccgacaaatttccggtttgcaacggtacactgagtgcggttagtaatacagaggtaaaattatttgttccgcgactagataacgcgaatggcaataaagataatttctatcttcagatggaataccagaaaaccacaacaaaccagatccgtctgcaccgtacaactgccgatataaaaaatccgcacggctggacactggataaaagctataacagcggcaccttctccggcctggaatccgtctccggcctgtcacaatccgatgaaccgatggatttcagcggtgccaatgccctctatttctgggaattgttctattataccccgatgatggtggccatgcgtctgttacaggagcagaactttactgaagccaaccgctggataagctatatctggcgccctgccgccagcggtgccggggactggcgtgtgcggccgctgaaagaagatacttcctggaacgccgatccgctggattcggttgacccggatgccgtcgcccagaatgacccgatgcactataaagtcagcaccctgatgaaactgctcgatctgctgattgcccgcggggacagcgcttaccgtatgctggaacgcgataccctgaccgaagccaaaatgtggtatatgcaggcgctggggctgctcggggataaaccgctgacccttatcagcagcgactggaacaatccgtcactgagtgatgcggccgaccagaccaaaaccaaacaacggcaggatgaaatcagccgtctgcgcagcggtggcctgctgccggaagtccgtaccgccaataccctgaccgggctgttcctgccgcagcagaacgaaaaactgctcggctactggcagaccctggaaatgcgcctgtttaatctgcgcaataatcttgccatcgacggtcagccgctctccctgccaatctttgccgcaccggccgacccggcggcgctgctcagtgccgcatcagccgcctccggcggaagcaaagccttaccatccgctgacggcattccggccatgcgcttcccgcaggcgctggacagtgcacgttcactgaccggacaactgatgcagttcggttccaccctccagggcctgattgagcgccaggatgcggaggccatgagtgaactgctgcaaaaccaggccggtgaactgatgctctcctccctgcgcatgcaggagcaggcactcgccgagctggatgccgagaagaaaaccctggaacagagccgtgccggggcacaatcccgctttgacagctaccgcacgctgtatgatgaaaatgtcagtgcggcagagcagcggaccatggatctgaacctctcatccgcagtactgagcacctccgttggcgtactggatatggccgccgctgccgctgatatggcgccgaacgtcttcggtatggccgtcgggggcagccgctgggggggtatcccgaaagcgattggctccggtatcggcctcgccgcggccgccaccaaaatcacggcggataatatcagccagtctgaagcatggcgccgccgccgtcaggaatgggaaatccagaaaaataatgcggattctgaagtcaaacagattgatgcccaactggaagccctggctgtccgccgtaccgccacagaaatgcagcgcgaccatctggaactccagcaggcacagacgcaggcacaactggaattcctgcagcgcaaattcagtaataaagcgctctacagttggttacgcggccgtctggcggctatctattaccgcttctatgacctgacagcagcccgctgcatgatggcagaagaagcctacaaatggcagaccggcgaagccacccgctacatcaaaccgggcgcatggcagagcagtaacgccgggctgatggccggtgaatctctgctgctgaacctggccgagatggagcaggcatggctgaaatgggatcaccgtgcactggaagtgacccgaaccgtttcgctggcagaagtgtacagcgctgataaggttgatctggccgcgaaaattgctgacctgctgaaaggcagtggttccggtaatactccggcggcaaccgggctctcaatgaccacggataaacgtctgcatgctgcatttaacctggaggcactgaagatcgcggaggactatcctgccgacctgggtaaaacccgccgtatcaaacagatcagtgtgaccttaccggcgctggtcgggccgtatcaggatgtgcgtgccgtgctcagctacggcggcagcacgaaactacctgacggctgcaaggccattgcggtctctcacggtatgaatgacgacggccagttccggctcgatttcaatgacggccactggctgccgtttgaaggcattgcggtggatgataataacagcctgtttctgagtttcccgggagcaacgggtgataagcagaaagccctgctgctcagcctgagcgatatcattatccatatccgctacaccatccgttaa

SEQ ID NO: 292041 - DNA, 228 bp, Morganella morganii
atgaactactcagccataataaggatagtgctgtattttcatcacagtgatgtggtgtcccggaaccccggtgcagcattatccgcttcaatggcagatatgccggatgacggttataaaaccatggtgtgtgccgaaagtgcgcggattaaccgccctatggcaccacagggcgataaaccgtcccttctctccgtccgtatccgtctgaacccgaaaatcggctga

SEQ ID NO: 292042 - DNA, 1944 bp, Morganella morganii
atggcgctctctgatctgaccgtccggcaggcgaagaccaccggaaaacgctacaccctctccgacaacgactgcctgggcctgatggtctcagccgcaggcggcaagtcatggcaattccgctactactggctgggcaagcaaaagcgcctgtgcctaggcggctatcctgccctcagcctgcgtgaagcccggaccgagcgagacaaggcccaggccctgcttgccagggggatcgatccccaggtcgagcgcgaccagaaacggcacgcggccaagctggcaggcgaatacaccttcaagaccgtcttcgatgcttgggtcgagcatcgccgtaaggaactcaaggaaggccgtcagagcacgctttcccagatcctacgcatctttaacaaagacgtgctgcccactctggggaagatgtcgatctatgacattcgccgccctcagcttctgggcgtcctggcggcgatcgagaagcgcaaggcgttcactactgcggaaaaggtccgcacctggttcaaccagatgttccgttatgccctggtcatcgccgaggggctggaggtcaacccggccgcagacctggacgtggtagccgaacccaagcccccggtagcccacaatccctacttgcacctgcccgagatgcccgagttcctccagaagctccggctctacaacccccgtggctggcagacccagcttggcgtccggctgctgttcctgaccggggtgcgcaccggcgaactgcggttggccgaacccgaacagttcgacctcgaccgcggcttgtggatcatcccaccgcagatcgtcaagcagctccaggatgaaatgcgcaaggcagggaagcggccgcaggatgtgcccccctatatcgtgccgctatccctgcaggccatcgagatcgtgcgctatcttctgggggtgatgcggccggcgcagaggtacctgctgtcacaccgcagcgaactcaagaagcgcatcagcgagaacactctcaacaaggccgtgcagctcatgggctatgaggggcgcctgaccggccacggcatccgcggcaccatctcgacggcgctcaacgagattggctacccgaagatttgggtggacgcgcagctttcccattccgaccccaacaaggtgagttcgtcctacaaccacgccaagtacgttgagccgcgccgtcggatgatgcaggactgggccgatcggctcgacctgctcgaacagggcgaagtggaagccgcgagcgcgcacctgaccatccgtatcgacggagtgccggcgatggcggaagcggaggaagcggtggagacggcccccacggtggccgagcccactctcaccagcgtctcgcccgttgtagcaacacccattgtcgtgacctcgaatggcggcgggatcacgttccagcggctgtctcaggtgccgccgcctccgacgcatgccccagagccggaagtgtccgcgatccagcgcgagcgcgaggaaatgctgaccatctacgagtctccaagcagcttgccggtcccgctgttcggcaagctggccggaaagtccaaggaccagatcaaccgcgaactgaaagcgggcaagttgctgtccatcagtttgggcaatcgggggcagcgtgttcccgattggcaactggtgccgctcaagcacaagctggcccaggtgctcatgaaccagtgcccgcacgcggattcgtgggatctgtaccgcatgctgacccagccgcaccctgacctgggggatcgcgcggccattgatgcggtcacgccgaccaacgtgccggcaatcatccgggtcatcatgggcgactaccagcaccatgcggatatgcccgaggccattgccccgtaccccatccccgaggatgtgcggcaaagcgttcgtcggctggtggatagcgcagtagttctagacggagcatag

SEQ ID NO: 292043 - DNA, 969 bp, Morganella morganii
atggttggaagtggttgggaccgagtaccaattgactcgcaaagcatcgatgcgccgctgtcgcgcgcggcggtgtttctcacgttgacggtcgccgagggccacgaggcccttcaggtggtcgccggcgtcttggacgggctggacgacctgatcaaaacggtgggcttccgcgatctcaacggccggctgtcgtgtatcactgcactgggatcggcgctatgggaccgtttccagaccgggaagcgcccgaaggaactacggcccttcctgcccatcgagggtgctaagcacaccgcgcctgccacgcccggcgacctgttctttcacatccgtgccgaacgtgaggacctctgttttgaattcgagcgcctgctgctggaccaactgggcagcagcgtgacggtggccgacgaggtggtcggttttcgctacttcgactcccgcgacctgcttggctttgtcgatggcacggccaacccgaccgggcacgacatcggcgcctcgacgctggtcggcagtgaagatcaggcgttcgccggcggcagctacttggtggtgcagaagtatctgcaccaaatgcagccgtgggctcggctcgccaaggacgagcaagagcggatcatcggccgggagatcgtcagcaatgtcgaattgcccgacgcgacgagcggccagaaatcgcacaagaccctcgccacgatcgtggacgacgacggcaccgagcacgacatcctgcgcgacaacatgcccttcggccgccccggccagggcgaatatggcacctacttcatcggctactccaggcatctgtgggtgacgcagaagatgctggagcgcatgttcctcggcgatccgccaggcatgcacgaccgcctgctcgatttctcgacggcgcacaccggcgccgtgttcttcgctcccgcaccgcgcacgctgagcgaactcgtggaggcggtgcaagcgtaa

SEQ ID NO: 292044 - DNA, 816 bp, Morganella morganii
atgtgccagaaggacggcctggctgaattgttgatttctgcattagcagaagcgtcaaacaatctgccacaattaaccacgttaaagataacgacgttaaacttcactctttcctgcaacgctggtttgcctttctggacagatcgcttattgggggccctcatgcatgacgccaccagccagttttcccatttcaggcttgctatcgcgcccggagtgccatcctcttgcctcacaacgcttcttgccctacagcgcgcggaggaaccagaagtcaccatcacgttctttgagacctcagccgatgatctgttgacgggccttgaggaaggccgctacgacgctggaatgtcgcttcggaacgctggtgctccggccgtgaaaagccaaccgctctgggtggagaacgtggctgttgcagtgccgctggggtcccccttagttgcccaggcgaagatcacgcttgccgagcttctggactatccggtgtttcgctggccggcggagacttgcctactgctggatcagcgactgtcctttcttccgttgagccagcagagcattcagcatgtgacttcgttcgagatgatggcgctttgggtgaccgctggctacggagtggggctctccgcgcaatcgcgcattgagcgtgcccatgcgtgggggatcactatgcgaccgctttcagacggcccctacgagatcgtgacatacctgcagcggccccacggacgagccaatgttgtttctgagcggttcgagcacagggcaatgctggttgccagggacagcgcggcttgctcgaacaacccatag

SEQ ID NO: 292045 - DNA, 891 bp, Morganella morganii
atggagctgcgccatcttcgctgcttcgtagttcttgctgaggagctacatttcacgcgggcggctgagcgcctgcatatcgaacaaccaccgctatcacgagccatcaaggaacttgaggacgagttgggcgtagtgctcttcgaccgaaaccgacgaggaacagttctaacggcggcgggcgcggtcttcttgcaagatgttcgccgtctattcacagtgctggaacaggctcgtgaaaatgccaaggctgtggcatcgggcttgcgcggtagcctgcgcatcgctgtatcagatggggctatcgatccacggctgtcggcatttctggctcgttgccgcgccgaggagccggagatcgaaatacgcttgtcagaagtgcctctggcagagcaagtgcgtggcttgcgttcgggcgacttcatgatcgggttcgcgcacacggccgatgtcggcgacggtatcgctgccgaaccaatctggcatgacccgctggtgattgcggtgccagctcgtcactcattgctcacctacaaggaggtgccacttcaagaacttcaaggccatccacttgtcctgtgcgacccgcaggtatgcgagggctattgccgcgaactcaagcggctgctcaacacgttggagcacaagctgaatgttgtcgaggaagtgtcctcgctagacatgatgctcacgttggtcggcgccggctacggcatcggctttatgacggcgaccaagattcccatctcccaacggccggatgtggtgatccgccccttggcgatggattccgccgtgatcaccacctacctgcttcggcccgacggcggcaatttatcggcttcggtggagcgttttatcgttcgccttcgcgactcttcggacggttga

SEQ ID NO: 292046 - DNA, 279 bp, Morganella morganii
atggttcagtgcggcattaagcatccggcgcgggctaagcatcaggatgtctcacactttctggtgagaggcattctggtcccgccagtctccgggcagcaacttgagccggcgaatattttcgccggcatttgccgtctgccccaaggtacttgccttggctcggaccaggagcagagcctcagcaatccgcaggtgatgatcaaccgcaagcgtgttcaagcgcttggttcgcaatcggccaagggtcagacggggacgatgcacggcatccattga

SEQ ID NO: 292047 - DNA, 1215 bp, Morganella morganii
atgactccgaccggtaaccgaatcgtgactttcgagaagcccttggaaatgaaggtcaacaccttcaaatttccagagctgataacccctcaagggaaaagcgcaccccatggcgctatcctcaaaatagttaccacaaatatctgtggcagcgaccttcacatttatcgcggttcgtttgctgttcccaagggaatgaccatgggccatgaaatgaccggcgaagtgatcgaagtgggatcagacgtcgaagtcgtgaagaagggcgacatcgtttccgttcccttcaatgtggggtgtgggcgttgctacaactgcaagcatatgcgctccgatgtatgcgagaacaccaaccccgaaatcgactgcggagcctacgggttcaacctcggtggctggacgggggggcaaggtgattatctcttcgtaccgtatgcggatttcaatctccttcgcttccctgacaaggatgccgccatggaaaaaatccgcgacctgacccttctctctgacgtattacccacagctttccatgggttcgctggcccggactggccagccgcaccggcctacgtcgtcggcgaaaacatcctgatcttcggtgccgggccggtcggcagagcgggtgccgcctgcgccagacttctgggtgcaggcgccatcatcgttgccgattacattcaagagcggctggaccttctcaagccacacggcgtggaaaccatcaacctttccgacggcgtgccgatcgaggagcatctcgaacgcattaccgggcacagggaggtggatcgcgtcatcgactatgttggtgtggactgccgcgggtttggcgcggaggctgacaagatcgtggagagcgctgttaccaacgcaatgctcaaatatgtccgcttcggcggaatgaccagtacggtcggtgtgtactgcgcaaacccgatctcgaaagacccgaaagccaagaaaggccatatggatctggaatggtccaacgcctggatcaagtcgccgcgaatgtcggctggtcaatctccgacggccaactacaaccacgcgttaatgcgggcgatactgaacgatcgcatgccttacctttcgccgatgatgaacactaaattcatcaagctcgaagacgcgcccgccgcgtacaaagagttcgacgcgggttctgcatacaagtacgtcatcgacccgcatggttcagtgcggcattaa

SEQ ID NO: 292048 - DNA, 816 bp, Morganella morganii
atgggtgtcgagatcgtgcgtcatgggcgacgctatgacggcctcacttctgaagggatgcgcgtactgtcttgggctcagcagatgtatgacgactgcaaagggctggagcgagaactctccgcattacggcgaggtatagaggggcaattccggctagggatactcccaggaactgccggtgtagcgcccacattaagcatcgcccttgctgaaaaaacacccttacttcaacaatcagttctggtttccggcgcttcttccctgctacaggcgattcgagaaaacaatttggatatcgcactcatgcatttggaggatatcccaggggaagacttcgatactcaccttctgtaccgtgaacgcattttcctttttcacgccgcgagaacacagcaaccccgaagcacaacgtgggaccatgttctcaatagacaactctgcgtgctgaactcggcagtacctgaacccattcaagataggctgatgcaatgtaccgcgcagactattcgcactgattcaattgacgtgctatcggcacacgtggcgacaggaaaatattcggcagttcttccgcaatctctcgccggccaactcgcgcacattccaaatctccacgcaatcgcaatcaatggaccaatgtcgcactcaaatgtcggattcgttgccgggaaaaatgcgttcgaggcaccgtcatcgcgtgcattgctcgaaatggtgcacacccccgaactcgccgccactcttcaatccgttatatcgatccatcgtcggttccagcccaaagcagactcatctcaaagccccctgaaatag

SEQ ID NO: 292049 - DNA, 432 bp, Morganella morganii
atgaaaatattcacgattggattcactaagacctccgcgcggtccttcttcaccaagttaagtgcttctggtgccaagcgccttgtcgatgttcgcctgaataatgtttcgcaattggccggcttcgctaaacgcgaggatcttcgatatttttccgaggcgttgtgtgggatggaatatgaacatctaccagcacttgctccaaccaaagacatgttcgaggaatataaaataaaagggggagattgggatatctacgccaggaaatttctggatttaatgtcgtcccgaaggattgagtcaatcgataaagaaaagattgataacagttgcctgctttgcagcgaagacaagccccatcactgccatcggaggctagtggccgagtaccttgcaggcaaatggccgaatgttgagatcgtgcatctttag

SEQ ID NO: 292050 - DNA, 1977 bp, Morganella morganii
atgtcaaccggtatgtttattctgcactccaactatacgccggcgggggaccagccagaggcgatagcgcgcctgctgtcggacatagaagacggtgcgacgcaccagacgctgaaaggtatcaccggctcaggtaagaccttcaccatggccaatgtgattcatcgtctgaagcggcctacgttgatcttggctcctaacaagacgttgaccgcgcagctttatggtgaaatgaagcacttctttcctgagaacgcggtcgagtacttcgtttcctactacgattattttcagcccgaaatctatatgccgggcaccgatcgtttcattccaaaggactcggccatcaatgaccaccttgagcgcctgcgcctgtccacgaccaaatccttgattgagcgtcgtgacgtgatcgtcgtcgcttcggtgtcttcaatctacggcctgggtgatccagatgcataccgagcgctacagatcgctctgtcccctggggtcaaactaaaccagagagagctaattcgtcgcttggctttgctgcaatatgatcgcacggagcgcactctcaagcgtgcaacgttccgcgtccaaggtgatgtgattgacattttccccgctgattccgagtacagggcggttcgggtggaactgttggatgacactgttgcgtctgtccaatggatggaccctgttaccggcaagacgttgggagagatagaccattatttggtttcgccaaaaacgcttttcgcaccgcccacgaacaaaatagattccgcgtccaaaaagatactcgctgatatggaagagcgggttgccgagctgaacaggaataatcgcttggtcgaggcaaacaggctgtacgagcggatcacgcatgacgtggaaatgatgcgcgaggtcggctattgctcggggatggagaattattcctgctacttcagcgaccgagacgcagcttctcctccgatcacgttgctggattatttgccgaaagacgggctgctgttcgtcgatgaatctcatgtcatggtgccacagatatccgcaatgtaccggggggatcaggcgcgcaaggacacgctgatcgattacgggttccgtttgccttcatcgaagaacaaccggccattgaactttgacgagttcgagaaggtcaagcctcagaccatctttgtttccgctactccgggcgactacgagctgagggtgtcgaaaggcagggttgtcgaacaggttatcaggccaacgggactgcttgaccccaaggttgaagtgcggaaagcggatggatacatagatgacctgcttgccgaaatatcgaagtgcgtgaagagaaagaatcgagtgcttgtgactacgctgacgaaggtcagtgcagaagagctaacggatttcttgacggacaacgggattcgagcgcgctacatgcattcggacataaaagcggaggatcgtgttgagatcatcaatggcctgcgcgcaggagagttcgatgttttgattgggattagtcttttgcgcgaagggctggatattccagaggcatcattggttgccattctcgatgcagaccgtgcagggttcttgcgttcggcccatgcgctcattcagatgatcggtcgagtcgctcggaatgaaaacggcaaggcgatcttgtacgccgacgcggtgacgccggcgatgaagcaggcgatcgatgagaccaataggcgcaggcagcttcaaattgcctttaacgaggaaaatgggatttctccagcctcgtctgtgcgaaaactagcaggggaagagacgaatacggaggagcccaccgttcattccgaggctttctgcgagaacttgtccgacctttgcgatcagatcactgccaaggaacagcagctactcgaatttaccgataccggtgacgagcagcgcgtcgaagacattcgtcgtcagttggatgggttgtaccggcaattcatttacatctaa

SEQ ID NO: 292051 - DNA, 906 bp, Morganella morganii
atgaacaaggaaatggaactactgcgcatctttcgggtggcggccgaaagcagcagttttcgcgatgcggccgtccggctggggacttctccgcaaggtgtaacccgtgccatccagcaactggagcaacactacggcgaggtgttgtttcatcgaagcacgcgccaggtgcgcatcaccgccttcggcgaagggctgctagaccaagtgcgccccgcattggagcggttcgaggatctgtggcgaccgcctggctccgaccagcaggcctctctgtccggtacggttcgcatcaccgcaccgcacagcttgggcgccagagcggtgctaccggcactggagcgcgtggccgcgcgtcatccaggcatcacgctggatgtgcgcctgtccgatcgcatcagcaatacggttgacgaagggattgacgtcgggatcagggtcggattcatgcgcgatagccgcttcgtcgcacgcaaggccgccgacatgagactccccatcgttgccgctccgcgcctgatcaagaaagtgggcgtacctgcaaacatcgatgcgctaagcagcctgccagttaccgtggccttggatatcaataccggccgtccctggccttggcacttcaaggcgggacgccagtggacacctaccgcacccactctcgtcgccgacaatgccgacatggaaatgggagcggcgctggccgggatcgcgttcgcgcaactggcggactacatggccgccccctacattgccagcgggaagctcgtgcgagtgctggagaacgaagaacctccggcatgggggttgtacgtctatcggcctcagcgtggccccattccgggaagggttcgagcggtatttgatgaaatgctggtcgccgttggatcgttgccagctttgcgctga

SEQ ID NO: 292052 - DNA, 408 bp, Morganella morganii
atgaacgctgcgactctcatcactgcctactacgacgccttcaaccgcggcgaccgcgaggccatgctgtcaatgttgaccgatgacgtcgcgcacgacttgaaccagggcgctcgtgaggtcggtcgcgaagccttccgcgccttcctgcagcgcatggaccgctgctatggcgagcaactgcgcgggatcgtggtgatggtcagcgccgacggcctgcgtgcaggcgcggagtacgtggtgcatggcgaatacaaggtgacggacgacgggctgccggaagcccagggccagcgctacgtgctgccgggcggcgcgttcttcgagatccgcgatggcaagatcgctcgtgtcaccaactactacaacctcggcgactggatcgcacaggttggaggggacgcctga

SEQ ID NO: 292053 - DNA, 609 bp, Morganella morganii
atgaccagcgacgtgcaggtgctggttcgtcgtggcgcggacattgccgaatggttcgatgccgtggcaggcctgcgggcgagcgtcttccgcagctttccttacctatacgagggcgacaccgaatacgagaagcactacctcgccatgtacgcccgttcggcagacagcctgctggtactcgcgctcgctgatgatgtggtcgtgggtgcgtccacggggttgccgctcggcgatgcggagccggccttccatgtgccgttcgccgatcgaggaatcccggtggaggcagtgttttactgtggcgaatcagtcctgctcccggccttccggggccttggcctgggccatcgcttctttgacgagcgcgaagcgcatgcccgttcgttgggcggcatgcagtgggcatcgttcgcgtcggtggatcgtgcagacgacgatctccggcgtccttccaactaccgcagtaatgaccccttctggacccgtcgcggctacgtgcggcagtcggacatgaaggttacgctgccctggaagcaggtgggtgagccgagcgaaaccgagcagacgctcacgatgtggctgcactccctggagaacgcgaaatga

SEQ ID NO: 292054 - DNA, 891 bp, Morganella morganii
atgaaagtagcagttgcgaaatactcagtgggtcagcccgcggacttcgaggcatttgctgcgcggcagcggctggctctggaggaggcgcgccgtggcggggcggaactggccgtgttgcccgagtatctatccctcgaactggctgcaacgttcgagcctggcatccgccatgatttcaacgcctctctggccgcgctgcaggccttgcagcctgcgtggctggcactgtatgccgacctgtcgcgcgagttgtgcatgaccattcaggccggtacgtttttgacccaggttggattggaccgctaccgcaaccgggcttggtggtttgcgcctgacggcacacgcgactaccaagacaaattgcagttgacggggttcgagaaagacgccggcgtcatcgagggtggcgacgaactcaaggtgttcgatttgaaaggcgtgcgtgccggcatcgctgtttgctatgacagtgagtttccattgcccgtgcgagcccagcgagaggcgggagtgcgcctgctgctggttccgagctgtaccgacacccaagcaggtgcaacccgggtccgtgtgggctgcatggcgcgggcactggagaaccgaatgttcatcgcgcaggccgtgacgaccggagctgctgactggagtccggcgctggacacgaatactggcgaggccacgatctatgcacccatggatcgcggattccctgaggacggcattctcgcgacgacgtgcggcacgcaggcatgggcaatcgcagatcttgacgtcgatgcgctcgaacgaaaccaggaacaggcccaggttgccgtcgatcgcgactgggacggccagatgttgcctgcactgcggaaggctcggtactcgggtcgtcaggtcgcctag

SEQ ID NO: 292055 - DNA, 276 bp, Morganella morganii
atgccacatagcccggaagaaaagaagcaagccctgacgcgcatccggcgcatcaaaggtcaggtcgcgactcttgagcaagcgctcgatgcaggtgcggaatgccctgcaattcttcagcagcttgcggccgttcgtggggcagtcaacggattgatggcgaccgttctggagagctatctgcgggaagagtttccccgtagtgacatcaggagcgattcgccgaacaagtccattgacgagaccatctctatcgtccgctcctatctgcggtag

SEQ ID NO: 292056 - DNA, 1110 bp, Morganella morganii
atgaaatcacgtgcagcagttgccttcgggccaggaaagccgctggaaatcgtcgagatcgacgtcgagccgccgcgcaagggcgaggtgctcatcaagatcacgaacaccggcgtttgccataccgacgccttcaccctgtcgggcgacgatccggaaggtctcttcccggtcgtgctgggtcatgaaggtgcgggtatcgtcgtggaggtgggtgaaggtgtgaccagcgtgaagcctggcgatcacgtcattccgctctacaccgccgagtgcggcgagtgcctgttctgcaagtccggcaagaccaacctgtgtgtcgcggttcgcgcaacccagggtaaggggctgatgcccgatggtacgactcgcttctcgtacaacggtcagccgctttaccactacatgggttgctcgaccttcagcgaatacacggtcgtcgccgaagtctcgctggccaagatcaacccggacgccaatcccgagcacgtctgcctgctgggctgcggtgtgaccaccggcatcggcgccgtgcacaacacggccaaggtacagcccggcgactcggtggccatcttcggcctcggcggcatcggtctcgctgcgattcagggtgcgcgccaggccaaagcgggccgcatcatcgccatcgataccaatccggcgaagttcgagctggctcgtaccttcggcgcgaccgaatgcctcaacccgaaggacttcgacaagccgattcacgaggttctgatcgagatgaccggctggggtgtcgatcacaccttcgagtgcatcggcaacgtcaacgtcatgcgttcggctctggaagctgcccaccgtggctggggccagtcgatcgtcatcggcgtcgccggtgccggcaaggaaatctcgacccgtccgttccagttggtcaccggccggacctggaagggctctgctttcggcggggtcaaggggcgtacccaacttccgggcatggtggaagacgcaatgaaaggcgagatcgatctcgccccgttcgtcacccacaccatgggtctcgacgagatcaaccacgccttcgacctgatgcatgaaggcaagtcgattcgcacggtgatccactactga

SEQ ID NO: 292057 - DNA, 399 bp, Morganella morganii
atgtccaatcctgtcatttccggcgacggcatcttctcgcacgtcttcatcggcgccgccgacgtccagaagtcggccgcgttctatgacgccgctctgggtgctctcggcatcaagaacctcggtcctttcggcaacggatgggtgcttttcggtcgcgaaaagccggctttcatcatcgcccgtccgggcaatggtgaagcgccttccagcaacggcgtgacgatcggctttgctgccgccactcccgccgaagtggatgccttccacgccgccggccttgccgcaggcggcaccgacgagggccagcctggcgcacgtggtcacctgccgggtgcctatgcggcctacctgcgtgatccggcgggcaacaaggtctgctcgtacaccttcgtctga

SEQ ID NO: 292058 - DNA, 1335 bp, Morganella morganii
atgaaagagccggccaacatcaatacgacgaccgtacaacctgccccgaccgccaccgtgtacggcatgccggcctacaccgatcgtgctgccgccgtgggggaagtgcatgcgcgcccgcatctcttgattcaggcccctcgcggcatattgcagctcgctttcatgaccgaaggcgaccaggccagggatcagatggcgatgagcgagttgtctcatcgcttcggcgttgccgagcccgaccatgctacgccgctccacggtgtgacatgggatgaaggagacctgcactgcgaaaagcacaccgagttctcgacgtatctctggtgcgcttccctagattccgagacgggagagccgtgcggcgaaaatccgttcaagcatggatttgttcctcccggcccggtcgtatccggcatccgtttgagacttcttccgtggacgccggaaacggagaaggaggtcgatcgcttcgatcctgccagcctgtgctactcgctggtggagaacggctctgccgccatcctgaccgatttccgacaggatgcggatggcctgacgcagatcctcgtcctggcccgcgatttgaccccggcgcgggcgggtgcgctggctcaacgtctgctggagatcgagacttaccgcaccttggcgttgctgtccctgccgttgacacgatcgatgacgtcggaactgcgacgcatggagtcgcgccttgcggcgatcaccgacgagatgtgtacgagcttggtggaacggcgcgacagcgacgtgctgctgtccgaattgaccggcctggctgccgagctggaagctggcgttgcggcgaatctctatcgcttcggcgccagccgtgcctactacgagatcgtcgaggaaaggctggcagcgcttgcggaagaggccgtatccgggtactgcacctgggcggatttcctgcagcgtcgcatcgctcccgccatgcggacatgccaatccgtaaaggagcgccagaccaagctctccgacaagctgacccgggccatcgcgttgctgcgttcctggatcgacgtcgagcttgaacgccagaaccgcgatctgctggcttcgatgaacaaccgggccaagatgcaattgcgccttcagcaaaccgtcgaaggcctctcggtcgcggcaatttcttattacgtcgtgagtcttctcggctacttgctcaagggcattccgatggttcacgacagcgtggcgccggtgatggcggttctggtgcctgcggtgatgctgacgatctggtggatcgtgcgcaggatcagacacgcccacggcgacacggcagcggaagagaaatcttcctga

SEQ ID NO: 292059 - DNA, 831 bp, Morganella morganii
atggaacgcatcgaacatcacgccagctttgatggttggcaggacgtttatcagcatgaatccacgacgctcggttgcacgatgaaagtcggcgtctatctgcctccgcaggcacagcacggcaaggtgccggtgctgtactggctttcaggcctcacctgcaccgagcagaacttcatcaccaagtccgccgtccagcgctacgcagccgaacatggcattgccgtcgtcgcgcccgatagcagcgctcgcggcgaaagcgttgccgacgatcccgcctatgacctcggacagggggcgggtttctacgtcaacgccacacaggaaccctgggctgcgaatcatcggatgtatgactacgtcgtgcaggaactaccggcgctgatcgaggcccactttcccgtgacagcggagcggagcatcagcggccactccatggggggacacggtgctttggtcatcgccctgcgaaacccgggccgttatcgcagcgtctcggccttctcgcccatcgtcgctcccacccaggttccctggggacacaaggccttcgaggcgtatctgggtagcgaccgggaggcgtggaagcagtacgacaccgtggagctgattcgcaccgtgcaggagcgtctgccgctgctggtggatcagggcttgggcgacgagttcctggagagtcagcttcagcccgatctgctgcgcaaagcctgcgacgagacgggacacccgctcacgttgaatctgcgcccgggctacgaccacagctactacttcattgccagtttcattggcgagcatatggcacaccacgcatcggcgctgaaacgctga

SEQ ID NO: 292060 - DNA, 1308 bp, Morganella morganii
atgacaaagacctccaaaaatcgacatcacgtcgtcattatcggagcgggcttcggcgggatcgaggttgccaaccagcttgctggtgccgaggtcgatgtgacgatcatcgatcggcgcaatcatcacctgttccaacccttgctttaccaggttgcaggggcgtcactttcgacatccgagatcgcctggcctattcgctatctcttccgcaatcgcccggaagtgaacaccttgatggcggaagtggaaggtatcgaccaggacgcgcgtcaggtcattctcaacaatggctcgcgccaaacctacgacacgctcgtactcgcgacaggtgctacccatgcctatttcggacacgacgaatggggggctttcgcgccggggttgaagacgctggaagatgccacgaccattcgaggccgaattctcgcggccttcgaggaggccgagcgcacgagcgatcctcagcagcgtgccgcgctgcagacgttcgtcatcatcggtggtggtcccaccggggttgaattggccggaaccatcgccgagctggcgcgagacacgctggcgcgtgacttccgctcgattgacccgagcacgtcgcgggttgtactgatcgaggcgggcccgcgtctgttgtccgtctttccagaggatctgtcggcctatacgcgccaagcactcgaaaagctcggggtcgaggtcgtgctgggtacgccggtcaccgaatgctcggccgacggcgtggtgtatggcggcaagcccctttcggccaagaccatcgtctgggccgccggggtccaggcgtctcccgcggcccgctggctgggtgctgcgtctgatcgtgcgggtcgagtggtcgttggtcccgacctgacggtggccggccgcccggaggtcttcgccatcggcgataccgcctcgtgcaccatggccgatgggaagtccgtaccgggcatcgcccccgccgccaaacagcaaggcaagtacgtcgccaacctcattggacggcgtttgaaaggcaagctcgctgacgggcctttcaaataccggcatcaggggaacctggccaccatcggccgcagcctggccgtaattgacatggggcgggttaagctgcgtggagcctttgcgtggtggatctggaagctcgcgcatatctactttctgatcggtacgcgaaatcgtctcagcgtcgcgttgagctgggtatggaaccatagcatcggctaccgcggctctcgcatcatcatgcatgcgattagcgacaaagagcccacggcgttggataaatccggctctctggattga

SEQ ID NO: 292061 - DNA, 1314 bp, Morganella morganii
ttgaccgatctattcacgacaaagcccaagcctcccttggccgaactcctgcggcccaagacgctggatgaattcgtcgggcaacggcacttgctcggccccggcaagccgcttcgtctcgcgttcgaggcgggcaagttgcactcgttcatcctctgggggccgccaggcgtgggcaagaccaccttggggcgcctggccgccagtgcgaccgacagccgattcatcgccatctcggccgtgcttgccggggtgaaggacatccggcaagccatcgacgaggcccaggcagaactggacaaccatggtcgatcgacggtgcttttcgtcgatgagatccaccgcttcaacaaggcgcagcaggatgccctactgccccatgtcgagtcggggctcctgaccctggtgggggggacgaccgagcatccggggctggcggtcaattccgctctgctctcgcgcgcgcaggtctataccctcgaaccgctgtccggcgacgaactgaaccagctctacgaacgcgcactgccgcatctccagggcgtcacgttggacgcggacgcgctggatctgctcaagggctttgccgatggcgatggcaggcgcttcctcaatctgcttgagcaggtgacgaatgctgcgtcgggcgctggcaagaccgtggtcgatggcgagttcgccaggctgtccaccagtccatcgctgcgcaggttcgacaagggcggcgacgagttctactggcagctctcagccttccacaagtcgctacggggctccgaccctgatgcggccctgtattggctggcccgcatcctcgacggtagcggcgacgtcagccaggtgacccgccgcatggtggtagtggccagcgaagacatcggcaatgccgacccgcaggcgctgcaactggcgctcaatgccgcgctggcttatgagaggctgggttcccccgaaggcgaaataccgattgcccacgcagcgacctaccttgctgccgcccccaagtcgaacgctgcctatgccgcctggaacaaggcgaaggccttcgtcaagaacagcggctccctgcctgtgcctctccatcttcgcaatgcgccgacgaagctgatgcagcagatggggtatcacgaaggctaccgctacgcccatgacgagcccaacggctatgccgctgggcaaagctactttcccgagggcgtggcgcggccgggctggtatcagccaacggacagaggtgttgagcgcaggctgggagaaaggcttacttggctgcgctcgctggatgatgggacgctgccagaggcggacgcctga

SEQ ID NO: 292062 - DNA, 1866 bp, Morganella morganii
atgtcagccacttctttcggtgcatcctcggcgaatatcagccggggacgcgttgcccgctatctgcgcacggagtctggtgctgcggtgctgctggtgatcgtcacggtcgtggcgctggcgtgggcgaactcgccgctatccgatgcctatttcgcgttgtggcacctggacgtcgggtttgacttcgggccgctgggcctgcacatggatctgcatcactgggtcaacgacggcctgatggtggtcttcttcttcctgatcggcctggaggtgcgtcaggagtttgcccacggatcgctcagggaccgcagccgtgcccgtctcgctctgatcgcgggtgtcgcaggtgtcgtgcttcccgcgctggtgtatgtcctgatcgtggggctggccggaagtgagggcctgcacgggtggggggcggtggtcggcaccgatacggcattcatgctgggcaccctggcgatcgtcggcccgcggctatccggtcagttgcgcgtgttcctgctcaccctgaccgtggtcgatgacttcctcgccgtgtccatcatcggcatcgtctatagcgaggagattcggatcgtcccgttgttgatcgccctcgccagtctcgttgcgttgtggtggctagggcgcacccgccagtggcgggcaatgccgtatgtgctgatcgtgatcgtgctgtggctcgcaaccgtgtactccggcatccatgcctctctcgccgggatggccgcggggctgctgatccccgcctacgcgacgcaacgtcacaaggtcgtcgcggcaaaacaactgttccgcgacttctggcagtctccgagtgccgcatcggcccgcgcggtggactgcgggctgtcccggggtatctcggtgaacgagcgattgcacgagttcctgcggctgccgacggcgctgctgatcgtgccggtgttcgccttggcgaacgccggagtggacgtgcgtggcgggctgctcgccgaggccttcggctcgccagtcacgtggggcgtcatcgcagggctcgtgctcggcaagctcctgggcatcgggctcatcactctcgtcgccgtccgtctcggcctgggccggctgcccgagggcgtcggggtggggagcgtgttcggtggtgcggcactgtccgggatcgggttcaccgtgtcgctgctgatcatcgggctcgcgttcggcacgacctccgacctgggccgccaggcgacggtcggcgtgctcgtgtcgatggtgttcgccacgttgctcgggtggctgatcttcaaggtcgccgcccagcggtggggtgagaagaccgctgacctgccgatggtgcttgagccaccggtcgatccggagatcgatcacatccgcgggccggaggacgcccagctcacactcgtcgagtacgtggacttcgagtgcgcgtactgtgcgcacgccaccggttcgtgggacgatctgcgcgcccacttcggggacgacctgcggtatgtggtgcgccatctgccgcaccacccgcacgggccgattgccgcgcgggcgtccgaggcagcggcgaaccaggggatgttctggccgtggctggacttcgtgttcacccgtcagcatgcgctggagcgcgagcatctgatcggctacgccgccgagcttgggctcgacgtcgaacggttcatcgcggatctcgacagcaccgcggtgatcgagcgtgtcgagcgcgacctcgccagtgcggtcgccagcggtgcgcacgccacgccgacgttcttcgtcgagggtcgtcgtctgcgcggcagctacgacgcccgcactgtcaccgcggcgctcgaagccagtcgccgcggcccccgaactcaggaagtcccgtcctga

SEQ ID NO: 292063 - DNA, 2652 bp, Morganella morganii
atgccaaacaattctttcggtgaatcctcttgtacggctgcggccagcggcatggtggaagtgcgcggcgcgcgcgagaacaacctcaaagaggtggacgtttccatcccgcgtaacgcgctggtggtgttctccggcgtttccggctccggcaagtcctcgctggccttcggcaccatctacgccgaggcgcagcggcgctacttcgagtcggtggccccctatgcgcggcgcctgatcgaccaggccggcgtgccggacgtcgatgcgatcgacggcctgccgccggcggtggcgttgcaacagcagcggggctccagcaacgcgcgttcctccgtgggcagtgtgaccaccctgtccagcctggtgcggatgatgtattcgcgcgccggcgcctacccagccaaccagccgatgctgtacgccgaggatttttcgcccaacacgccgcagggagcgtgcccgacctgccacggcctgggccatgtgtacgaggtgaccgaggccatcatggtgcccgatccctccctgagcatccgcgagcgggcgatcgcctcctggccccccgcctggcaaggccagaacctgcgcgacatcctggtcagcatgggctacgacgttgaccgaccgtggaaggacctgccgaagaaggatcgcgactggattctgttcaccgaggaaacaccgacagtgccggtgtacgccggcttcacgcccgccgaaactcgcgtcgcgctcaagcgcaagatggagccgagctacatgggcaccttcaccggcgcccggcggtatgtgctgcacacctttgccaatacccaaagcgcactgatgagaaagcgcgtgtcccggttcatggagggcaagccgtgccccacctgccacggcaagcggctcaagcccgaggcgctgtcggtcactttcgccggcgtggacatcggcgcgttcatgcagatgccgctggaccagttggctgccttgctcgaacccattgcccagggcgatttccgcgcccatgcagcgggggaggctacggacaaggaagcgacccgacgcgaccgtgccgaacgcgcggcctccggccgtgccgtccatgcggtatcgcccgacgtgcgccgcacctccgcgctgtcggaagaaaagcgcctcgccgcgcagcgcctggccggcggtgtgatggcgcgcctgcgtcaactgcgtgggctgggcctgggttacctgacgctggaccgggccacgccgacgctttcggccggcgagttgcagcgcctgcggctggccacgcaattgagttccctgctgttcggtgttgtgtacgtgctcgacgagccctcggcggggttgcacccctccgacagccaggcgctgtacgacgcgctcgaccggctgcgtgacgccggcaactcggtgttcgtggtcgagcacgacctggacctgatgcgccgcgcgcaatggctggtggatgtggggccggatgccggggagcgtggcggccgcgtgctctacagcggcgagccggacggcctgcgcaagattgccgaatcgcgcaccgcccgctatctgttcgacgaaatcgccgcgccgggaagccgggcacgcgaagcgaccggctggctggagcttcagggcattcatcgtcacaacctgcatggcgtggacgcacgcattccgctgggcgtgctgacggccgtcaccggcatctccggctcgggcaagtccagcctcgtcgcgcaggcgctgccggagctggtgctactgcacttgggccacgagcccgaggacgacgcggccgaaagcgccaccagcgaagggccggcagtgatcgaagcgactggcggtcatctggcgggcgacgtggacgccatacagcgcctggtgcaggtggaccagaagccgatcgggcgcacgccccggtccaacctggccacctacaccggcctgttcgaccacgtgcgcaagctgttcgccgccacgcccgatgcgcgacgccgccgctatgacgccgggcgcttctcgttcaacgtggctaaggggcgttgcgagacctgcgagggcgagggcttcgtcagtgtggagttgctgttcatgcccagcgtgtacgccccgtgtccgacgtgccatggcgcacgctacaacgaggccacgctgaaggtgcgatggaacgggcgcaacatcgccgaggtgctgcagatgaccgtggacgaagccagcgaattctttgcgggtgaagacgccgtggcccggcccctgcaattgctgcgcgatatcggattgggctatctgcgcctggggcaaccggccacggaactttccggtggcgaggcgcagcgcatcaagctggcgaccgagcttcagcgcagccagcgcggccgaagcctgtacgtgctcgacgagccaaccaccgggctgcatgcatcggatgccgaccggctgctggtgcagttgcagcgcctggtcgatgccggcaacaccgtggtgatgatcgagcacgatatgcgcgcggtggctcaggccgattgggtgatcgacgtggggcctggtgcaggcgctgccggcggcagcatcgtggtggcgggctcccctcagcaggtggcccgaacgtctggcagccgaaccgctccgttccttgcgcaggagttggcgcgggccgagtag

SEQ ID NO: 292064 - DNA, 1839 bp, Morganella morganii
atgctctccctgttccagcgaaaacggcccccggtcgctgccgcaccgacgccaccacccgtcaccgacctcccgaaagggctgctgcgtcctgagtcggccgcatcgctgctggccaccccacgccggcagaagctgctggagcacatctggcagcgcacgtcgctctcacaccggcaattcgccaccctgtaccgcacgcccctggaacgctacgccgaactggtccaagcctttccggcctccgaggcgcatcaccatgcctatccgggcggcatgctcgaccacggcctggagatcgtggcctacagcctgaaactgcggcagtcccatctgctgcccatcggtgccagtcccgaagaccaggcggcgcagtccgaagcctggaccgccgccgtcgcctatgctgcgctgctccacgatattggcaagatcgccgtcgatctacacgtcgaactggccgacggcagtacttggcatccgtggcatggcccgctgcaccaggcgtaccgatttcgctaccgtgacgaccgcgaataccgcctgcacagcgctgcaacaggcttgctctatcgccaactgctcgaccgccacgtcctggactggctcagcgactatccggctctctgggcaccgctgctctatgtgctggccggtcagtacgaacatgccggtgtactaggggaactcgtcgtgcaagcagaccgggcgtcggtggcccaggagctgggcggcgatccggcgcgcgccatggccgcgcccaagcacgcactgcaacgcaagctgctggacgggttgcgctacctgctcaaggaacagttgaagctgaaccagccggaagcctccgatggctggctcaccgaggatggtttgtggctggtgagcaagacggtctcggacaaactgcgcgcacacctcctgtctcaggggatcgatggcattcctgcgaacaacaccgccgtgttcaacgtactgcaggaccacggcatgctccagcccacctcggacggcaaagcggtctggcgcgcgaccgtcaccagcacgaccggctggtcccattcgttcaccctgttgcgtctcgctcccgcgctgatctgggagtctggcgagcgaccagcacctttcgcaggcacggtagagatcgacgcgacgcccgcggaaaacgacgccagcatgtcggctcccgcgccaaccgtctcggtgaacccagcgcagggaggtcaagagcctccaatttgggaggacgacagcaccaccatcgtttcaccgcccgcggcccagcccgtgcccgacgtcatggaggacttgctcgcgatggtgggcttgggtgagtcggccggcgttggtcaggatgccgaagagttcctccaccctcccgcgccagcaacagccgcgacgtccattccatcacctgtacccgcgcctacgcctgggtcatcggcaacgaagccatccgcggaacagttcatggtttggctgaagcagggaatcacctcacgacggctcatcatcaatgacgcgaaggcgctcgtgcatacggtgaatgacacggcctacctggtcagcccgggtgtgttccaacgctatgcgcaggagcatcccgaagtggccgcgctcgccaagcaggagaatcaacaggattggcagtgggtgcagaagcgcttcgagaagctgcagctacatcgcaagcaccccaatggcctgaacatttggacctgtgaggtcacgggcccgaggaagtcccgccgactgcatggctacctccttgaagatgggtccttggcattccccgaaataccgcccaacaatccctatcttgctctgactcaggaaggatga

SEQ ID NO: 292065 - DNA, 627 bp, Morganella morganii
atgcccactgccattgaattcattgccgaccgtctgccgcgcgtcacggtggaagatgtacgccgcttcgcggataccgtcgaaatccgggatgccacggctttcgcggccgagttgcaggcgttcgtccacgagcgcgtggaagcggtgacactgcccgccaacttgcagggggagaccgttgggcaggcccttgcacgcaaggcggccgcgctgcgcgccgacacgcgctgggcaccgaatgaaaccgacgtccagcgaggccgtgccgtgctgctggaaaccttcaaccagccgcacaacctgccgcccgcggagttcgccaagctggcggacaagtcgcgccagcagatctacaaggacatcctcgcgcgtcggctgctggcgctgaacgtggggccacgcggtcagaagctgcccgactggcagctcgacccggtgaaacagcagttgacccaaaccgtgcttcaggaggtcgagggtatcgatcactggacgatctaccgcgcactgtccgaaccgctcgaaggcttgggcggtcgctcgccggtggatgcggtgacgcatggcacgatcgacgacgtggccgaggccgtgttcaacgtgctgggcgttcaggtgcattga

SEQ ID NO: 292066 - DNA, 633 bp, Morganella morganii
atgagccacgagctgccttcgttcctgatcgatgccggtgaactgctccagcatgtgagccgcgtcgtctatcggggcagcccgctgtactatggtcgcagcagcaccaatcgctacgacgaccctgcccgaacctacggcgtgctctacctggggcgcgacctgcccacggcgctgatggagtcggtgtttcacaagcatcagtggcttgatgacgcgaagcgctcgatcgcattgaaagaagtccagggcaggatggtgcgcgccgtaggggtgatggccgacgtgcttctggccgatctcacggcaccaggcgtcatggcgggctactttggcctgaacctggagcagttggccagccgtggctacacgcacacgcagcaggtgtccgctcatgtgcatgcgatggtcggcgacgacggccaacctctgtttgacggggtactctatccgtcgcgcaacaactatcccgccaagagcatcgccctgttcgagcgtgcggaaacgaaggtcagcgtcatcgaggacatcgatctggttgaccatgtggactggccgcgtttcgttgccacctaccgcatcggcgtggaacccgaccccggcccgatagaaccggatgacgaagcgtcctga

SEQ ID NO: 292067 - DNA, 366 bp, Morganella morganii
atgaacaccacaacccgcaccagcaccgcagaacgtatcggccgcgcctttggccgtggatggcgtgcctatgcgcgtggcgaacggcgggtatcgaattggttggtggccacaggggtgccttcggttggtgtcacagtgctgctgtgggcggtcaagctggctgtgctgggcgcgctgctctacgccgccttctggttcgcactcgtgttgctgggagtcgtggtggcgggatgggcggcggctgccaatacctcggaagaagacgagtggccgttcaccgacctcaccgaactgcgcaagacacccggctacgatcccaatctgtacaacgatacgtcgcacgagttgtacaccgacgactga

SEQ ID NO: 292068 - DNA, 1521 bp, Morganella morganii
atgacgcttttcacgaccgactacctggagtactacctgaccctggtgtcctggatcgtcaacaacggcatctgggcggtactggtatccagcggggtattcgcactgcccttcgtgacgatcatcgtgcaggaatggctcaaggcccgtgcggagggtgccgacgaaggcaacaagggcgtgctctcggccgcacgcatcgagaaccgggtgttcgtcgccatcgtagtggtgatgttcgccggcatccccttcatcgacgtggatctcaacaccattcagtacgacagctcgcgctcggcccagtgccaggtcaacgtgccgcagcccacggataccggctggtcccagtccttcagcaccatcaacaaccagagtgccaaggtgccggtctggtgggccttcatgcacgcgctctcgcgcgccgtcaccagcgcctcggtggcggcaattccgtgcgggacagacctacgacagatgcgcatggagatcgacgctacccgcatcaacgacccagttctggctcaggaagtggccgatttcacacacgactgctacggacctgcacgcgctaaattgttcatggcgcggccggagctggacgaagctcaaatgaacgacgtgacctggatcggttcgaggtttttcacggataccggcggctactacgacagctaccgttccagcacggcgcgcgagtcatggccctatgacgacacccgcgacgcagggcttgcgcaggtggccagtggcggcggttacccgacctgcaggcagtggtgggccgatggcagcaacggcctgcgggcacggctgctgagccaggtggaccccagcctgttgaatcgcttggcgggctgggccgggttcctgagccgtaccgaggtggacgattcggtggtccgtaccatcgcgtcaccgcgacagcagaagctcaaccagggttcggtctataccgactacggcggccagatcgacaagaccctgccgaacatcgtgacgcgggccacgggggatgtaggaatggcggtcggggcacttgccgcatttcccgccatggacgtggtgcgccaggcgctgcccatggtgcttgccttgctcaagatggcactggtcatctgcatcccgctcgtactggtcgtcggaacctatgacctgaagacggtcgtcaccgtcagcgtcgtgcagttcgcgctgttcttcaccgatttctggttccaactcgcacgctggatcgacagcaccatcctcgatgcgctctatgggtggggcttcggctggaaccggccacacactaacttcgatccactggtggggctgaataatgcctttggcgacctgctcctgatgttcgtcatgggcacgatgttcctggtcttgccgggcttttggcttgcgagccttacctgggttgggattcgggccgggcacgtcatccaggggctttcagatggcagcaagagcgccggccaagcaggcggtaagggcgctggggcccttaccggaggtaagctgaagtag

SEQ ID NO: 292069 - DNA, 357 bp, Morganella morganii
atgagcctgatgcgtgcgacctggctgcgcccgcgctggctgttcagccggcgcgcagcgaaggcgctgctgtggacggtggtactcgcggccgtcgccgtgagcgccaacatcgttggcatctacctcgtcggaagcgtcgcgggctgggagcgttggctggcggcagcagcgggctacttcctggtctggcggctgtgcctgtatggcgcgacggcctacggctgggtctggatgcgtcgccggctgcttgcgcgtgaggacgacgcgcaagcgcggcgccgcctggtgcgcagcgagatcgccggcgtcgttgccatcgtggcgcttgaagccagcctgttgatgcagggttga

SEQ ID NO: 292070 - DNA, 1395 bp, Morganella morganii
atgaagcgttccgaatctatgcagttctccccaccggctcgtggcaagaggatctgtttggcgcttaccggcgcgttggttctggcaagcggcgtggcctggggccaactgggctaccagaccagcggcaacgtcatcggcgatgacgtcatgtattccatcggcggcggcagcgccgtttcgatgggtcgcgcagccggcatgcgctcgctcggcgtgggtgtcggctggaacagcaatctgatctgcggcgacatgagcatccagaccacgttgaagaatcaactcaacggtgtcaccaatggctttcagcagatcatgtcctcggtgatccagagtgctacgagtgctgtggcgtccctgccggcgttgatcatccagcgggcagatccaggcctctacaacctgctcaccaacggcgttctgcaagcgcggctggatttcgaccgctcgaagctgacgtgccgcgccatggccgaaaagatggccgaaacggcgggcggccaactcggctggagccagatggccgaaggcatggcgttgcgtgatgcagtgtcgagcacggatgccgtctcggccatcgagcaggccgagacgcgccgtggcaacgatggcgtgccctgggtcgggggaagcaatgccggcggctccggtcagcccgcgatcaaggtggtcggtgacgtcacccgcgcgggctacaacctggtcaatggccgcggggtgaccgacacgtcggcaatcgctccggccagttgcacgagcctgtcgtgccaaacctggaccacgccgcaggcggccatcgagtgggcaacacgggtgctcggcgagaaggagcagcgcacctgcgacgcctgcaccaagacggagacggtgcccggcgtcgggctgacgcccctgatccaggaggagtacgacgccaagctgcaggcgctccaagacctggtatccaaggcgaagaacacgacgcccgaaaacctgcgggaggccggcagtgcgtcgctgcccatcacgcgcggcgtggtcgaggcactgcgcgacgagccggatcagcacctcctgtcgcagcgcctggcgtccgaggttgcgctggcgtcggtgctggagaaggcgctactgctgcaacgcactctgctgaccggcaagaaggaacccaacgtggcggccaaccagctcgccgtggaggcggtgaaccacgagagcgacacgctcgatcgcgagattcgcaacctcaagaccgagctggagctgcgccgggagctggcgaacaactcgcccatggcgatcatccagcgccacggcacgcgcgcggcgggctcgcgtggcatctacgaaggcgatccagtgcctgaccgcctcgatcagttgcagaagggcaatccgggaggccggccatga

SEQ ID NO: 292071 - DNA, 948 bp, Morganella morganii
atgaagcggccattcgaccttatgcgccgcatgcgggctggcgtggcttccttgctgctgctcagcgccacgggtagctacgccttgaacaccaccgccatcgttgcctcggtggcctcgcccgattgcttggagtaccgggtggtgggtatctgctactggctctactgcacctggggaggctgcacggtgcgcacctctgtcaaggtgcgccactacattcccgatgcggtcgtctccagctacagcaacacgggcgagaacccgtgggtcgaagtccgggcgatgagtacggccaacccgtccgcccaagcgggcggcgatggaacgacgaacgaggatcacgaaaacaatctcgcgaaattcaagaacgccgacgtgatcggccatcccggcgtcgaggtgttcaaccagtttgtttcgtcctcgggctacttctgcgagggcgcgggaacggcattcatgccgtatctgctcagcaccttggacacgcttgcctggcgctacaacgtgcccgagatggcctacccggaggcattgattcccggcatgcgcgaggtcggcgcacgcaccacgatgaacctttggggcaacgtgtatccccgcggcggcttcctacaccagaccgacgaccacaaatcgggagccgtggtggcccagcgtgcgggcgatgtcgtcacgcgccgcgggcagttgcacgtgtaccagccgctgcttgccaatgcccgcgatggctactggcccgccggcgcgctgatggagggtgatgcctcgactggcaagtggcaggaactcacgcccgtcctgtcctcgtcctgcacggttttcccacgcaccggcttcctgacccaggcccagcaaggcgactacgcctgggcgctgtggcggccgtatgcctgctgcgaacgccgtggacaggtgttccttggcagcgttgatttcctttga

SEQ ID NO: 292072 - DNA, 447 bp, Morganella morganii
atgccggcatccttttccacgttcgcgtcgggctggcgaacccttggcctggttgtggcgctgccggcgtccctggccgtgttcagccccgtcatcttcgcggccgacgtattggtcgtcaccgacagccaccacccggtcaagaccatgggcggcgagcggctgatcgagctggacgaagcccgccggattgaagcggagctttctgctgaactgcccgccgcccccgaacaggcggcggccaccgtcaagcgtcggctgaaccaaggcggcgccgacctacagcgccgcatcgcttccgcataccaaggcgtcaccgacgcatggagcctgggcatcaccagcatcccggctgtcgtggtggatcagcgctacgtggtctatggcgagccggatgtggcgcgcgccgtcgcgcgcattgagcagcatcggagggcccagccatga

SEQ ID NO: 292073 - DNA, 597 bp, Morganella morganii
atgaccgccgtttcgactgccggcaccgcgccgcgtcctcgctcgccccgcgcacgtttgcgcgctcgcctcgtgctggcgggcctgtccgcctgcggcctcgctgcgctggcctgggcgtccttcgtgcaaccgatgccgcggctgatctacaacccatccgacagcgtggcggtcggctggtatcacgtggagccgctccaccagcacaccggctcgctgctccggcctttgtccgttggcagcatcgtcctgaccacgttgccggcggacaccgccgcgctggctgcgcagcgccgctacctgcctgcgcgcgtgccgttgctcaagcgcgtgggcgcggtcgcgccgcaatcggtgtgcgtgttcgatgcgctggtctggatcgacggcgtgccggtggctgccgtcctacccaccgaccggctgggccgtccgctgccctcatggaggcagtgccgccagcttcggcctggcgaactgttcctcttgagcgtgaccaacccggcgtcgttcgatagccggtatttcgggccggtcagcgcatccgccgtgatcggcgttgcgcgcccggtctggctggagtcgcgcccatga

SEQ ID NO: 292074 - DNA, 792 bp, Morganella morganii
atggtcaaccctcatcacgttgcccactggtatcccaccgccgcctatctgtacatcctgggattggacatgctggcgctggcctgggagtatctgcgcaggcatcccgattaccggctcgactggatgcgccaccgtcgccggtcacaggccgcacaacatgcggcgctgcgctggggcttgcgcctgctggaagaccctgccctggatgcgcgcgacgcgcacccggcctggctgcccggcaatgccgccgtggtgcagctccatcccgatcccgatccgccgccggatgcggccgtgttcgcgttctggcgcatccctggccacaagcaactgctgcacgacggcaagggactggcgctgatcgtgcgcagtcccggccattattcgcgcttcgcgctcgctccgggtctggaggacggcatggcggtcgtccatgctcatcgcggaagtggtgacggcggcgctgccgcgcctgcccgctgccatgcgctcgtgccggacgccgcgctggcccatgccatgcccaggccacctcctgccgcactgttggagctgcacaccttgcaggcgctcgacgcgaccctggcgggtgcgtccttgcgcgaagtgggcgaagggctgttcggtgccgacgccgtggccgactggtacagcgacggcggcctgcgctccaaggtacgccgccttgtgcggcgcggcgatgcgctaatgcgcggcggctatcgccgcctagcacaattgccgccgcttgagaagggtcgttttgataaggacgcaaaacgaccctga

SEQ ID NO: 292075 - DNA, 348 bp, Morganella morganii
atgaaccgactcatcaccgaggacgagcgcaggcagttgctggcccacggccaggctcgcgcccgtggcgaggccatcgacccgctgcccgtggcgcggctattcactccggacgcgcatctcatcttgctgctggccgcgctcgatcctgtcgatggcgatacggcctggggactgatcgacctggggctggggatgcccgaactgggctccgtgaagctgtccgatctggcatccatcgtcgggccgcgccagcagcccgtgatgcgggatcggtatttccaggcagcgcgcccgctgtcggaatatctgcggctggcccaggagaacggttccatcctcgattga

SEQ ID NO: 292076 - DNA, 294 bp, Morganella morganii
atgcagaagcgaaccgtccagcgcggccgaccggccggctccaccacccacgacgccgagctggctcacgccttcggcgcggcggtgcgtgcgctgcggatggagcgcggcatcgcgcaggaatcgctggcgcaccaggccggtatcgagcgctcccacatgggcaagatcgaacgcggcgagcacatgcccacgctggcgatcatcttcaagatcgccggcgcgctcgaatgcagcacggccgtgctgatgagcgaggctgaaagccagctcgcagcagcggcccagccgtag

SEQ ID NO: 292077 - DNA, 819 bp, Morganella morganii
atgaacaaagaacatcgtccgcatggcaaggctcctaccgcatgggaagccgacattctcaaaatccgggcctttgagatggtgctgatccttttctacatggaagatttgcggcgcttcatcatgggctccatcgaggcgaccgacaaactgcatgggctgaatcggctgagtgatggcaaacccaagaccagggaaggcaagaagctggagctggcccgcgccgtgctggtttccgaaggggtcattgaccaggcggagagcgatgaactcaaggaattggtggactaccgcaacatcattgggcacacgatccatgacctgaccgtggatgtgggagcctattctgatctgaccagacagcgagaccccaagaccttcaaaccgatgcctttgtatgactacacggcagccaaacgggccaaggcgctgcggcagaaggtgagcaaaggcatgatgaagaagttcatgatgatggcgtcgctcgacttcctgacctttgaagcggcggagaagacctacgttgcggagatcgagcggctgaagaagcgggtcaaccgaggcatcgtgaaggccaacaaggtgattgcggaaacgaatcgcatcatgaaggccatcccggagtcggtcatggaatcggcccagcccggccacccgaggaacgtcaaggaaaacggaaccttgagcaagcgcggcgtggagtgcgttttccagctctttgaagcccaagcaaccccgttggctgcggcttacctgatgaggatttcgcagcgctcggccacgcattggtttgccaagtggaaggccagcaaggcgtag

SEQ ID NO: 292078 - DNA, 498 bp, Morganella morganii
atgaacccgccgaggcgctggccgcttgagccgcgccgaaggcaagcgccccggcctcgaccggggcgcttcgctggaaggagaagtccccatgacccgcaccaccaccagccgcccgtgcatggcggcgatctacgcgcccggcacggtgcgcgcccgccgctggcacggcgatggcgacgtgcgcggctaccgcccgccctcgggctggtcggcccgcgccgatctcaccgacattcatcccatcacgggccgcgccttgccgcgtgccatgtggtggatcatcgagacgaaggaatagccacgttcagcaccgcgcccaggccgttccgtcctgggcgcggtgaacttcaaaaatccgggcgcggcggtggccgcgcccggtgtcgaaggcgaacagccggaacaccacgccgccgccttcgcttgtgctcaggcggcggcgttgaaggcatcgcaataccgcgagatgccttctttcattgcccccataaatga

SEQ ID NO: 292079 - DNA, 2070 bp, Morganella morganii
atgaacgccatcacccaaaccgaagcccgcgccgtcaataccgccgcagctatcccactggaagccgccgacccgaccaagaacctgattctggttccgctgtcacggttggtactgcgccccacgggccgcaacgtgcgcaagaacccgcgcatgtccatccccgaactggccgcgagcatccagcgcgtgggcctgctgcaaaacctgatcgtgattgcatccgccgatggcgagcattacgaagtcgtggccggtggccgtcgcctcgccgccttgaagctgctggcgaagaagcaccgcatcagcaaggaatgggaagtgccttgcctgctggtggccgatggaaccgcacgcacggccagcctcaccgagaacgtgcagcgcgaggccatgcacccggcagaccagttcgaggcattcgccgcgctggtggccgaaggccgtcccatcgaggacattgcggcggatttttccgtcacgccgctggtggtgcagcgccgcttgaagctggcgaatgtctccccgcgcctgatggcagactatcgcgccgatgccgtgagccttgaccagttgatggcccttgccatcactgacgaccacactgcgcaggaagccgcgttctacgatgccccgcaatggcagcgccatccctcgcacttgcgcgaacgcctgaccgaacgggaaatcgacgcctaccggcatccgctggtgcgcttcgtcgggctggacagctacgaagccgcaggcggcggcatccgccgcgacctgttcgccgaagatgacgcaggcgtgtatctgaccgatgccgcgttgctggaacggctggcgcaagaccggctggcaggcattgccgccaatgttcgcgccgaaggttgggcatgggtggatgccacgccgggaatgacccattccgacctgcacgctttccaacgcgcaccgaaggagcgccgcgaaccgaacaagcgcgaagccgcacgcatcgagaagctgcaagccaagctgcacgaactggccgaagccgtggatgccgcgctggacgccgaggacgaggacaaggccgacgcgctgcaagaggaaggcgaagccgtgggcgagcaattgcaggcgctggaagatggcttgcaggactacggccagaccgtgaaggccgcagccggggccatcgtcaccatcgaccgcaacggcgaagccgtcattcatcgcggcctgatgcgcgaggccgaggccaaggcgctgcgcacgctggaaaagctgcgccaaggtttcggcagcgtggaagacgaaaccgagagcgacgacgagggcgagagcgaagaagcgcccaaggccacgatctctgaccggctggcccagcgcctgagtgcccaccgcaccgccgcgctgcaaatcgaagtcgcccagcatccgcaagctgcgctggccgctgtggtgcatggcatggtgcagaccatcttgcaggaacgccgctacggccacgatctgccgctgggcgtgagcctcaaagtgcaagaccggctggaaggcatggccccggactggcccgagtcgcccgctgccgtagcgctgcgcgaattgcagcaggcatggcgcggcaagctgcccgaggacagcaccgcactgttcgccgcgctgctggcgatggagcaagccgaactggtcaagctgctggccgtgtgcgtggctacgaccgtggacgtggtgacgccgcgcaccacgccacaccagcccggcgcggaactggcgcaggccgtgggcctcgacatggccgcatggtggaagccgaccgcagaaagctacttcaagcacgtttccaaggccgtgattctggatgccgtgggcgagttcgccccggcccacgtcacccgactggcgaagttgaagaaggccgacattgccagcgaagccgagcggctggccgatggtacgggctggatgcccgccatcttcaaggccgaaggcccgcagcaggtagtgaaggaaagcgcgcagcaggcaggcccggagcaggacgccccggacgatgccgaggcaatggcggatgaacccgccgaggcgctggccgcttga

SEQ ID NO: 292080 - DNA, 927 bp, Morganella morganii
atgcccatcggcatttccgaccttgcccattctgttcgcaagaacagcgcttccgtggccgcacctgtgcagcttggccacgcgcagcaactcatcgttgctgcacttggctacaagagccttgccgcctaccaggctgcgcaggtagccgcgctcgaaccccaggatttgggcaacgtccaccacgttgtagtcgactacgaccagctcgatcagcgcgccagcgaacttggcgcggcccccacgccaagccaactgcacgagttgatcgacgcagccttcaaagagcgggcgcctcgtacacacattcacgcctctcatgcggacttcgacaactacttgcgtgagcatgtggatcaggtggtcatcgaagacgatgacgtgaacagcgagatggtcaacgccaattacgatggcattgatgaggtctatttcgatttcgaggtcgagtctgaaaacgtacccgttggcggctcgctggaaatcaacctggatggccatgttggcctgggaatcgacactgagcgcccctacgcgggccacaaagtgaacgtggaaggcttcctgacagtggatcgattgggtagccagtgctttgggtcagtggactgccaagtcaccaaagcggaactcgatacgaactggggagatgacgactacgatggcgagccaccgccgcgcagcgtatcgcaagcctatgccgaactgctgggcctcgaactgcatgaggttggcaatctcgccgatgtagaagcaatggagctggacggcagtagcggtgaaatggtctatggctacctcctcgacttcacggactacgcatcgcccgagatagcgcagaagatcttgcgccgccactcctcactgcgtatcgaagtcggccctggcttctttgaaggtgttcgcagcgacgactggcctcgctga

SEQ ID NO: 292081 - DNA, 507 bp, Morganella morganii
atgtcgcaactttccctctctctcgatactccgctgatggtgcgcgatggccgtggccgctatcggccggcggacgccgaccagattctggaagctgcgcgtcaggtcatcgaacagaagatgcagcgcggcgagacgttcacgtcgccggaggcggtgaaggactacctgcgcgccaagctggccggctacgagcaggaagtctttgcgatgctgttcctcgacacgcgccatcggctgatcgactacgtggagatgttccacggcacgatcgactcggccgaggtgcatccgcgcgaagtagtgaaacaggcgctgcggctcaatgcggcggcggtcatcatttcgcacaatcaccccagcgggaaccccgagccgagcgcggctgacaaagctctgaccgcgcagcttcggcaggcgctggcgctggtggaggttcgcacgctggatcacatcatcgtcgcgggcagcagcaccacgtcattcgccgaatgcggcctgctttga

SEQ ID NO: 292082 - DNA, 1797 bp, Morganella morganii
atgaagctatctaaactctattcaaacaagccggatgtgttcgagcccgtggactttgctcctgggctgaacgtcgtcatggctgaaattcgtctgccggagaatcgaaacaaggacacccataatcttgggaagaccacgcttgggcgtcttttggatttttgcttcctggcaggcaaagaccctaagttcttcctcttcaagcattttgacttgttcaaggatttcgtttttttccttgaaattgaactggaagacggctctttcatcacgatccgacgcagcgttgaagacgcaaccaagattgccttcaagcagcatgaagcaggccaccaggacttgtcggctttggcgctcgcggaatggggacatcgggacgttccttttgaacgcgcacgcgaactgcttgacggcctgctcgactggcgtgctctcaagccgtggtcgtaccggaaagcgcttggttacctgctgcgttcgcaagaggattttcgtgaagttttccaacttcgcaagttcgcctctaaacacgccgactggaagccattccttgcacatcttctgggcttcgatgccaagctgatcgctgaccactatgcgaaagagcacgaactcgccaaaaagcaggagacagcgcaaaccatcaaaaatgaactaggaggctcggtcgaggacatcagcaaaattgaaggcattcttctgctcaagcaaaaagacgcagagaagaagcaagtgctgttggatgctttcgattttcgcgcccaagacaaagatcgcaccaaaaaggtggttgatgaagtcgatgagcgaattgccgctctgaattcggaacgttattccttgagtcaaaacaggaagaaggtgcaagcatcgttgcaggaagatcaaatccttttcagtcccgatgaggcgcagaggttgtttggcgaagccggcgtgttgttccaggggcagatcaagaaagatttccagcagttgattgctttcaatcgggccatcacggatgagcgccgtggctatctccaagaggagttcgcggaaatcgaaggtgagctgaagcgggtgaatgcagaattgaatgcgctaggaaaaaagcgctcggaaatgctctccttcctgagcggaacggatgttttcaccaagtacaaacagctctcggatgagatggtgacgttgcgcgcggacatcacatcgttggagcaccagaaaggccacttgcatcgcctccaggagttgcgcgctgagattcgatccttgacggaagagcgcgaccatttgcaagcgcggatcgaagccgacgtggataagcagaactcggatcaggcaagcccgttctccacgatccgcgttttcttcagcgaaattgttgaggaagtcattgatcgcaaggcactgttgagcgtggcgatcaaccaggtaggtcacctggacttcaaagcggaaattcttgatggatcgggcaacgccaccagtgctgacctggggcacacataccgcaagctgctgtgtgtcgctttcgatatggccgtgctgcgagcacacctgagcgagaagttcccacgctttgtgtatcacgacggagtgttggagtcgctggatgaccgcaagaaagagaatttgctgacggttgtacgtcgctatgcagatttgggattgcagccggtcatcacgctgatcgactcagatttgcctgtacgtgcagaagatgatgcccctgtttttacagcaggcgaaatcgtcgtcacgctgcacgatgagggtgatcgcggccgaattttcaagatgagagggtggtaa

SEQ ID NO: 292083 - DNA, 249 bp, Morganella morganii
atgctgcggccaaccaaacactcacatcctgatcgcacagttattaatgtttctctgctgctcctgtcacgactgaaagatcgtcgtgtcgatgaatacgatgtgctgcgcaaatttgcgaagaagcacgtcgtgggtggcgatgtacttttcctgcccgcgctcaactttctctatttgatgggcttagttgaatatcgccccaagactgacgcagtggaatatgtggggccaaatgaagctatctaa

SEQ ID NO: 292084 - DNA, 981 bp, Morganella morganii
atgaagtttgcttatgaagatttgagcgacgatcagttcgaggtgctgatcgtgctcttgtgccaacgcttgctcggtatcgccgttcagggattcgcaaaagggccggatggcgggcgtgacgcaaaattcgtcggcacggccgagctgcatcctagcaagacagccccgtgggtaggcacagtcatcgttcaggccaagcataccaacgggtacaaccgcagtttttcggaactggacttctacagcacgtctagcagcaatacggtggtcggcaaagaagtaccacgcatcaagaagctgcgcgaggccaagcaactcgaccactacatgctgtttgcgaatcgccgtcttaccggcaattccgagacggaaatccgtgaccacatcgccgccgaatgcggcgtccctgcttcgtctatctatctttgcggcctggaacaactggaactttggctgaaacgctttccagaggtggcccaggaggcgaatttggatgcggtggactcgccgttgattgttagtccagatgatcttgcagaggttgtccaggcgctagcacggcagaaggatggtttgacggcgttactcgacgacccacccaccgtacgtgtgacgtatgaggaaaagaacacgctgaacaatatgacggcagcgtacgcaaaggagcagaggcgaaaatacctgaaggaaacggcgcaaattcgcacgtttcttgctgcgccagagaatatcgaattgctgcgcatgtacgaatctgtggtcgatgagtttcagctcaagattcttgcgaagcgcaaggactaccagaccttcgacgaggtcatggagtatctggtagatctgctgttcaatcgtgacccggttcttcggcagcacgcgcacaagcgactgacgcgagccattcttttctacatgtattggaattgtgacattggggaggtggatgatgctgcggccaaccaaacactcacatcctga

SEQ ID NO: 292085 - DNA, 321 bp, Morganella morganii
atgaagcgtagtgaccattcgcaaggcactgacaacgtgctgcgagatttgggctttgacgatgctgaagagctttcggcaaaggcagcgctcgcgctcaagctcaatgaattgattgaccatcgcggcctgagccagacggaggctgcggcgatcacgggcatgactcaaccgaaagtgtcccaagtccgccgctacaagctccagaacatttcactggaacggctgatgcaggcactggtgtcactggaccagcgtgtggagattgtggtgcagcctgcgcggcgtactcattcggcgtgcattacggttgctgcatga

SEQ ID NO: 292086 - DNA, 360 bp, Morganella morganii
atggttcagaaacgcaagctgctgtactgggaaggctcctcgaagaaagacttcaaggagtttcccgtcgatgtacagaaggacatgggtgtggcgttgttcatcgttcagttgggcagcaaaccacattcggccaagccctggagggggttgggctccggtgtgtacgaattggtggaagaccatcggagcgatactttccgggcggtctatacagtgaagatgggcgatgcggtacatgtactacatgcgttccagaagaagtccaagtccggcatcgccacgccgcagccggacgtggaactgatcgagaagcggttgaaggccgtgctggcccgtcacaagacgagcgggagataa

SEQ ID NO: 292087 - DNA, 1209 bp, Morganella morganii
atggccaagatcaaactcaccaagaccgctgtggagtcggcgcagccccaggcgcaggcggtcgaactgcgggataccgtggtgcctggcttcctgtgcaagatcaccccggcgggtcgccgggtgttcatgctccagtaccgcacgaatgccggggagcgccgcaaacccgccttgggcctgtttggggagctgaccgtcgagcaagcccgcgttatggcccaggactggctggccgaggttcgccggggtggcgatcccggcggtgccaagaccgaggcgcgcaaggcccccaccatcgcggagttgtgcaagaagttcatggaggactactccaagaagcgcaacaagcccagcacgcaggaaggctatcagggcgtcatcgaccgctgcatcatcccattgctgggccgcaagaaggtgcttgatgtgaagcgccccgacattgccgggctgatggaaaagctctcgtacaagccgaccgaggcaaataaggcattcggcgtactgcgcaagatgttcaatctggccgaggtgtggggctaccgcccggacggcaccaacccgtgccgccatgtcccgatgtttccgccgggcaaggaaacccggctcatcgtggacggcgaactggcgctgatctaccgccacctggacaagctggaggccgaaggattggagaactacgtcatcccgctggcgatccggctgcaatttgagtttgccgcgcgtcgctccgaagtctgcccgctcgaatggacttggctggacttcgagaaccgccgcgtggtttggcccgacagcaagaccggcggcatgtccaagcccatgagtgcggaagcctatcggctgctttcgacagctccgcgtcgggaaggctgcccctatgtcctgccttcgccccacaaccccgacaagcacctgacttttggcgagcactatggcggctggtgccgggtgctcaaggccgccggcgtgccacacgtcggcacgcacggcatccgccaccgctcgacgaccgacattgccaattcgggcgtacccaccaaagtaggcatgaagctaacaggccacaagaccgtggcgatgttcatgcactacgtccacaccgaggacaagccggtgcgcgatgcggccgaactggtggccagccgacgccaagccatcactggcgcgaggcgaactgatccggtggaaacagcagctacttaa

SEQ ID NO: 292088 - DNA, 495 bp, Morganella morganii
atgtctttcgtcgtcaacgactcctgcctggagtcgctttccgccaccgctgcccaacacgaggactggatcatccagcaagccatcgtgctgctggagaggcgggttttcaaagctggaccgtgcctcagccgaccggccgctgtgcgggactacctgcgcctgaaactggtcgctgagcccaacgagatattcgccgctgtgttcctgaacagcatgaaccaggtgctggcctacgagccgctgttcaagggcacgatcaacgcgacttcggtctatccacgtgtcgtcgtacagcgtgtgctggagctgaatgccgccgcggtggtcttcgcccaccagcacccctcgggcatctccgaaccgtcgagcgcggatcgcatgctgacccagcaactgcaggccgcgctggcgctcatcgatgtgcgggtactggaccacatcatcgtcggccagggttccccgttctcctttgcggagtccggcctgctgtaa

SEQ ID NO: 292089 - DNA, 765 bp, Morganella morganii
atggaacagaaacgtccttccattccgatgcaggtccaggcgttccgccgccgcaacgggcggccccgctggccctgggcattggctgctgtgctggtcgcgctgctgctgatctggcttgtgtcgaggtcgcccggcgaatccccgccgcagccgcccacgccggtcagcatggcaccggtggccgggccgccctggctaatgggcaaccccaaaggccgtttcacgctgacgctctatgctgacctggagtgcccgttctgccgggagtatttcccgcagctcaagcggtgggtgggcaccaacgccgacgtggcgctgcaatggcaccaccagccgctggccgcgcacgagccggctgcgtcggccgaggcacgtctggccgaatgcgcagccgaatctggcgggcatgccgcgttctggcaggcggtcgaatgggtctatgcccacacgcgcagcgacggccagggcttgccggatggcttgcgctaccccgaatcgacgccagccatcgagcagtgcatgtcaagcgaaagacccagtgcggctatccgcgcccaggctgcggaagccaccaagagcggcgtaaccgccactccatcactgcgcctgctcgatcgccagacgggccaggccatcctgctgcagggaccgatcgagggcgacgccttgttgtctgccatggacatgctggcggctgatggtccgaccggcacacccccatccgaaatgcctgccgacgtcgtcggcgacatgcccaggtag

SEQ ID NO: 292090 - DNA, 441 bp, Morganella morganii
atgctctcgaacttgaataagggcctggcgctggccctcgccgtcgcggtgctcggcggctgtgccaccagcaaggaaaagctgctcccgcacggcgatagcacgatgatggacatctggcagcagaacgccggcgacggcagcggtggcgccggccaggtggcgcgcaggcaattgctcgatgcacgccagagcctgcgccggccgctgaccgaggccgacgtggaggccgcacccgccgaacagatgcgctacacgcgcacggcgcgaaacgaggtctatcgccagttccaccgcctgccgaaccccgaccttgtcatgtatgtgtacccgcacctggcgggtaccgaccccgtgccggttccgggctacacgacagtcttccccctgtaccagcgcgtgcagtacgccatgccgggcgagcgcgtggaggactactga

SEQ ID NO: 292091 - DNA, 1431 bp, Morganella morganii
atgcgcagtaatggactcctgaagtggctgatgatcccggttgccgtgctggtgctgttcgtcgccatccggctgttctcgggtggcagcacttcggcaccaccgaccgcggatgccggcgccaagctcactccagcggaaatgaaggcgctgggcatcgagggcgataccccgcgcgacaccgtggcgacgctcgttgctcaagtgaagcagttgcgcaccgagcttcagaccgcgctctcggacaacaaatcccagcgcgaagaaaaccagcgactgcgccagcgcgagaactccattgaccagcgcatcaattcggccctcgactccgagcgcactaacctacgtcgcgaccaagagcaggcagccagcgcgcgccagcagaccgaagggctgcttgccgacctgcaacggcgcctggacagtatcgggggacgtggcggcggccatgccgacctgccggtgggtctggggctgcgtgacggcgacgaggccggcatggaaggcggcgtgcgctgggtcgaacccgacgatgcgaggaaagtcgaggggcgcaacagcagtcgtggcacgggtagcggcatgagcttcccgacgagcttcggccccgcacagagcacgttggaaaccacggcggaaaccgtggcgaacgcaggcgcacgcgccgcaggcgtgaagagcgccaaggcggtctataccgtaccgaccaattcgacgctgatggggtcggtggcgatgacggcgctgatcggccgcgtgccgatcgacggaaccgtcaacgatccgtaccccttcaaggtgttggtcggatcggacaacctgaccgccaatggcatcgacattcccgacgtggccggtgccgtgttcagcggcaccgcatcgggcgactggacgctctcgtgcgtgcgcggccaggtacgcagcatcaccttcgtcttccacgacggcacgatccgcaccatccccgaagaccgcgacggcaaccagcagaacaaccagcagcagaactctcaaagtggaggcctgggctggatcagcgacccatacggcattccctgcgtcagcggggagcgtcgcagcaacgcccagcagtaccttggctcgcaagccctgattaccgccgccggtgccggcgtcgcctcgctgatcgacagcgacagcggccagatgtcctacgtcggcgccgacggctccatcggcagcgtcggcatctcgggcaatgaagccgtgggccgcatcctggccggtggcgtgcgcgacatggccgactgggtgaacaagctatacggccaggccttcgccgccgtctatgtccagcccggcgcgaaggtcgccgtccacctcgaaaagccgcttgccatcgacttcgatcccgaaggccgcaaggtcgatcaccgcgcaggagaaagccatgctctcgaacttgaataa

SEQ ID NO: 292092 - DNA, 927 bp, Morganella morganii
atgaagcatcctgtactcacgttgctggggctgttggcagtggccgcggctcccgctgtccaggcggtggagatcctgcgctgggaacgcatgccgctggcgttgccgctgaaggtcggccaggagcgcgtcgtgtttatcgaccgcaacgtccgcgtgggcgtgcccgcgggcgtcggcgagcgcctgcgggtgcagagcgcgggcggtgcggtgtacctgcgcgccagcgagccgatcgaacccacgcggctgcaattgcaggacgccgacacgggcgcgctgatcctgctggacattgcggcggagccagccaaggacggggaagccgagctggaaccagtgcgcatcgtcgagggcaacagcaccccggcgcgctatggcgatcagcccggcgatgacaacgaagctccggcgcgcgcccaggaccaggccggcgcgcgagcggcgcgacgcgagaccccggtgccggttgtcctgacgcgcttcgccgcacagaacctctacgcgccgctacgcaccgtggagccgctgccgagcgtcatgcgggtgaacctgcgccgtgacctcgacctcggcacgctgatgccgacgctgcccgtgcgcgcggtcgcgctcgcgtcgtggcgtctggaagaccagtgggtgaccgccgtgcgcctgaccaacagcagcagcggctggatcaccctggacccgcgcgtgctgcaaggcgatttcctcaccgccaccttccaacacgaggcgcttggtccccgcgggacgcccgaggacacgaccgtcctgtacctggtgacgcgcgggcgtggcctggcgcaatcgctgctaccagcggtcaaccgcttcgacccggccgtgcatctcccacaaccggaagccagttcccaggatggcaccgaccgcaaggaggtccgccatgcgcagtaa

SEQ ID NO: 292093 - DNA, 690 bp, Morganella morganii
atgagccgcttcaagaacgagatcacccacctgcaggcgcacatcaagacgcttcgcctggggactggtgccctgatcatcgtcgccctggtcatgggtggcggctggtggagcgctccgcgcgatctgaccatccacgttccgcctgacctgcgctccggcagtaccaggaagtggtgggaagtgccgcccgaatcggtctatgcgttcacgttctacgtgttccagacgctcaaccgctggccgacgaatggcgaagaggactacgcgcgcaacctccacacgctctcgccgtacctcaccccgtcctgccaggccttcctgcgcgcggactacgactaccgccgcagcacgggcgagctgcgccagcgcgtgcgcggtatctacgaaatccccggccgcggctacggcgacgaccccacggcccgcgtgcgcgtggtttccgaccgcgactgggtagtgacgctggacatcaccgccgacgagtactacggcgccgagcaagtcaagcgcgctctggtgcgctatcccgtgaaggtcacgcgggtggacgtcgatcctgcccgcaacccgttcggcctggcgctcgactgctatgagggcgcgccccagcgcatcagcacgccggagccgacgcgcccggcgtctggcggcctgtctccgcaagcgcctcaaggagaaatcccatga

SEQ ID NO: 292094 - DNA, 399 bp, Morganella morganii
atgtccgagcagcagcacgtccgtgcggatgggaccgtgacgttccttccgcaccggctcaaccgccatcccgttgtcgtgcgcggcctcaccgccgacgagctgtggatctgctgcggcttgtccggcggcgccggcctgctggtcggcgcgccgctgtcgtgggtgttccgcacgatcgcgctagctcccacgttcgtcgtcctgggcgtggccttgggcgtgtttatcggcggcggcattctccgccgcctcaagcgcgggcgtcccgacacctggctgtatcggcaactgcaatggcgcattgcgacacgtcatccactgatggcgggttgggtgggcggccatgtgctgatctcacgttccggcttctggaccacccgaaggagcgcgcgatga

SEQ ID NO: 292095 - DNA, 360 bp, Morganella morganii
atgcacaaccgcatcctcacttcccgtcttgcccagcgcgccgccgtggccttgggcgccgctgcgctgcccgcgctgtcgttcgcgcagggtctgccgcagttggagaacccgacccgcggcacgggcaacggcatcatggaaacgatccgtaactacggctacgacatcatcatgctcgtggccctcctggtcgtggcgtcgatgttcatcggcgtctgctaccacgcctacgggacctacgcggaaatccacaccggccgcaagacgtggggccagttcggcctcacggtcgccatcggcgccgtcctgctcgtgatcggcatctggctgctcaccgaagccaccggcatcctgtaa

SEQ ID NO: 292096 - DNA, 234 bp, Morganella morganii
atgaacggcgcccaggtctcggcatttcaagccaacagcggcatcgcaccttcagcgatggcgaccgtcctggtcggcgtcgtgttcgcggtcctgctcgtctggggcgtttgggccatgcgaacggcctacgtggggtggtccgagagccgcctcaaccaacgccagttcctcggcgtctgcatccgattcgtcgcgatgtacctcgtcctgactttcttcctcctctcctga

SEQ ID NO: 292097 - DNA, 384 bp, Morganella morganii
atgttggctccgatctggctgcgcgccgcgcatcgcggcgtgcccacttttctcgtgacggtccttgtgttgggccagtcctcgatggcgttggccgagtccccagcgcagcgtcaggagctggtcgcagcgctgcgccaactcgacgcgctggagcacacggtcaccgacagcgccgcgcatgcccccatccagccgggcgagcgctaccacttcgactacccgaggctgctggctgacctggcgcgcgtgcgcgccggcatccaggcccatctcacaccgtcgcgcgcccagccgcgcgacccgtccgaattgaccggcgactaccgcacggagcgggtcgtcccgccatcaccgccgacgaccgcggagggcaagccatga

SEQ ID NO: 292098 - DNA, 750 bp, Morganella morganii
atgaaggacgccgcatcgaccgcgcagcgggagcagaaccagcgccagggcctgatcgtcggcaccgtcaccttgccgtttcgcttgcttggagtgctgatcggctcgctgctgttctcgatcgtggtggagtgcgtcggcatgcacctgttctggaaggaccagggctggcgccattcccagcagatgttgcagtacgagcttggacacctgtccagccacttcacgcgcagcgtggtcgtgcaggagccggggcgcacagcgcacgagttggtggatacaggctacgaatgggtgtttgttcgctccgggctgctggcgcgcatgagccagaccgccgagcgcgtccgcgcacccagccacgagcaggcgcgcaacttccgctactacatcagccaagtctatgtctgggccgagagctacctgatcgccgcggccttcacgacgctgaccttcctagtgcgcctgctggtcctggtgctcacgctgccgctgatcttcacggccgctttcgtcggtctgattgatggtctggtacgacgcgacgtgcgcaggttcggcgcgggccgcgaatccgggttcatctaccaccgcgcgaaagccagccttatgcccctggccgtgctgccgtggatcacgtacctggcactgccgatctcggtgcatccattgctgatcctgttgccgagcgccgccttgctgggactggccgtgagcctgactgcgggcagcttcaagaagtacctctag

SEQ ID NO: 292099 - DNA, 2190 bp, Morganella morganii
atgtcggggaaacagccggtcgaggttctgctacgcccagcggtggagctatacaccgtcgcagcgtgtgcaggcgccgcgtttctgtccctggtggccccatggtcgctcgcgctgagcccggccatgggcgtcggcagcgccttggcgttcggcgcctatggcgcgatccgctaccgcgatgcccgcgtgatcctgcgctaccggcgcaacatccgccgcctgtcgcgctacgtgatgacgagcaaggacgtgcccgtcagccagcagcggcttttcatcgggcgcgggttcctgtgggaacaaaaacacacccataggctgatgcagacgtaccggccggagttccgccgatacgtcgagccgacgcctgcctaccggctggcacggcgactggaggagcggctggagttcgcgccgttcccgctatcccggctgtccgcgctcacgggctgggatgtgcctttcaacccggtgcgtccgctgccgcctgtgggcggcctgccacgcctgcacggcatcgaaccggacgaggtggacgtcagcctaccgctcggcgagcgtgtcgggcactcgctggtgctgggcaccacgcgcgtgggcaagacgcgactggccgagttgttcgtgacccaggacatccgccgcaagagcgctgccggcgaacacgaagtcgtgatcgtcatcgaccccaaaggggatgcggacctcttgaagcgcatgtatgtcgaggccaagcgcgcgggccgtgaaggcgagttttacatcttccacttgggctggccggagattagcgcccgctacaacgcggtgggccgattcggtcgcatctcggaagtcgccacccgtatcgcagggcaactctccggtgaaggcaatagcgcggccttcagggagttcgcgtggcgcttcgtcaacatcattgcccgtgccctagtggaactgggacagcgcccggactacatgctgatccagcggcacgtcatcaacatcgacgcgctgtttatcgagtacgcccagcactacttcgccaagaccgagcccaaggcctgggaggtgatcgtccagatcgaggccaagctcaacgagaagaacattccgcgcaacatgatcgggcgcgagaagcgcgtggttgcgctggagcagtatctctcccaggcgcgcaactacgacccggtgctcgacggactgcgctcggcagttcggtacgacaagacctacttcgacaagatcgtcgcgtcattgctgccgttgttggaaaagctcacgagcggcaagatcgcgcagctcctggcaccgaactattccgacctggccgacccgcgcccgatcttcgattggatgcaagtcatcaggaagcgcgccatcgtctatgtgggactggacgcgctgtccgacgccgaggttgccgcagcggtcgggaactccatgttctccgacctggtttcggtggcgggccatatctacaagcacgggatcgacgatggcctgccggacgcctctgctggcgcgcgcgtgccgatcaacgtccatgcggacgaattcaatgaactcatgggtgacgaattcgtgccgcttatcaacaaaggcggcggcgccgggctgcaagtcaccgcgtacacgcagaccctctcggacatcgaggcccgcatcggcaaccgcgcgaaagctggccaggtgatcggcaacttcaacaacctgttcatgctgcgcgtgcgcgagacggccaccgccgaactgctgacgcggcagttgccgaaggtcgaggtctataccactaccatcgtctcaggggcaaccgacagttcggacatccgcggcgcgacggatttcacgtcgaacacccaggaccgcatcagcatgtccagcgtgccgatgatcgagccatcgcacgtagtcggcctgcccaaaggccagtgcttcgcgctgctgcagggcggccagctttggaaggttcgcatgccgctgccgataccagacccggatgaagtgatgccggcggacctgcaacaactggcggggtacatgcgccagagctacagcgaggctacgcagtggtgggagttcaccagttccccgaccttgcagaatgcggccttgcccgatgacctgctggatgatgcggctccagccgagtctgctgcggtggccaccgccaccgaccacaatgccgacgaggccgcgccatga

SEQ ID NO: 292100 - DNA, 540 bp, Morganella morganii
atgacgaaatcccatctggccctgcggggcctgcttgtgctgctggcaggactgccgctggcatcgcgtgccggcgatccgctgatcgtggtcgaagatcgcggtggcacgtcggcgctgccgtactacgaggccctcaacctccagccgcgcgccgatgtcccggcccgtccccccattccgacgccacaggttcccgccacacccgcggacgagacagcgatgctgccggtgcgcagcgccaagctcacgcccggcaccgtcgcgcggcgcgtgatcgaagcgcccggcctgcggccgttcgtggtcatcggcgacgacgacgcctcccgggcctggttgcagcgccgcagcgttgctttgcgcgaacgcggcgcggtcggcttggtggtcaatgtcgagaccgcgcagggcctggcacggctgcgtgccctggtgccgggcgtgccgcttgcgcccgtagccggagacgacctggccgatcgcctgggcctgcggcactacccggcgctgatcacggccaccggcatcgagcaatga

SEQ ID NO: 292101 - DNA, 606 bp, Morganella morganii
atggcagcgccagccgtagcggccacctccgtctcgcagctcttgcgcgcactggtgctcgctaccggcctgtgcgcctgcgccgcccatgcccaggagattccgccacccgcctaccagctcgccgcccagcgggcgggcatcccctcgaccgtgctctacgccgtggccttgcaggagagcggagttcgacgcaacgggcgcatcgtcccgtggccgtggtccctcaatgtcgccggccagtcgcgccgctttgccacgcgcgccgatgcctgctcgggcttgcaacaggcaatgcgcgccacgcctcacacgcgcatcgatgcaggcctgggccagatcaacctcggctaccacaagcaccgcttcaccagcgcgtgtgacctgctggacccgtatcgcaacctcgccatcgccgctgaaatcctgaacgagcagcacacgtccggcgaagactggctgctcgcgatcggccgctaccaccgtcctgcgggcggcgaacccgccgcccgctaccggcgcagcgtgtcgcgccatctcgcgcgtgtgcagggcgcacgtccaaacgcggcggtgctcgccgcgcgccaggagacttccccatga

SEQ ID NO: 292102 - DNA, 726 bp, Morganella morganii
atgaagccgtcgatcatcctttccgcactcctgctggcttcagtccagtggcccgcgtgggcgcagcagccagccacagctcccgcccgcaatgcgcagagccaggagcgcccgctggccgcccgcgtcctggacgaccgagtagcaagcaactggggcctccaaccccaggaatgggcgcgctaccgcgagctgatggatgggccgctgggcatctactcgcccaacctggacccgctgtctgccctaggcatcgaggcacgcaccgacgaagaacggcggcgctatgcagagctgcaggtgcaagtcgaggcacgccgcgtcgagaagctgctcgcctaccaacgtgcctacgacgaagcctggcagcgcctgaaccccggcatgcagcgcgtgaacctgcccgacgacgggccgggcaccggcaccgcgcgcggcagcggtcgcatggcggtgttcgtcaaggacggctgcgcggtctgtgggcagctcgtgcagcggctgcaatcctcgggtgccgagttcgacctgtatatggtgggcagccgccaggacgacgcacgcatccgcgactgggccaagcgcgcgcagatcgacccggcacgcgtgcgcagcggcagcattaccctcaaccacgacggtggccgctggctgtcgctgggcctgcccggtgacttgcccgcgactgtgcgcgaggtgaacggccaatggcagcgccagccgtag

SEQ ID NO: 292103 - DNA, 642 bp, Morganella morganii
atgaacactccccaatcttcgcggcgcccggctgtcgccgtggtgatgcaaagcctgctctggctctggctgctcggtctcagcgtcatcgtggccctcggctaccaggcgatgagcgaccaggccgacgagaaacggctcgactcccgtttgcaacgcctcgaagcgcagacggtggccctggctgagaccatcggaaccatccagcagcgtccgcctgtcgcaacggcggcggacctcaaagaaacccgccaaatcctggaagcacgcgcttcccaggttgagaaaacattgagcagctacgcagccgccgacgaccttcaggcgctgcgcgcggagatcgagcagatcaagacgcgccagaccgccgcgcgtgcagcaacacccacccagccgcgcacatcgagcaagcccgccgccaagcctgaaccgccgccactgccgttccgcatcgtcggcgccgaactgcgcgccggccagctcagcgtgtccgtcgtgccgagcagtggaaactctacgcccgaccagctacaggtgctgctgcccggtgatgcggtcggtccatggcgcttgcaggcaatcgatggcagcgccgcggtgttccaagccggcgaccagacccgtcgcgtggcgattccctga

SEQ ID NO: 292104 - DNA, 600 bp, Morganella morganii
atgtgcccctctccaccgtggtttcaccatcccgaacgccgcctgctggcgggatttctcggcctgctttggttggtactggctggcggctgcgcgacaacgactgcaccgcacgcacccgatgccttcgaggaagtctcgaccgcgcccgaacccgaagcacccgagtacatccccgttgtgcgctacgggcgctacacgttggtcgagctggcccccacggcggcgcagcgcgacctgctgttgcagaccatcgatgtttcgatgccggcggatgcccgcgtcacggtcggcgatgggctgcggcatgtgctcaaacgcagcggctacagcctgtgtcaaacagcacatgccgtgatcgagttgtatgcactgccgctgccggcggcgcacctgcatctcggtcccatgactttgcgcgacgcgctgctcaccctggctggtccggcctgggaactgcacgcggatgaccgcgcacgacagatttgcttcgagcggcccggcgacagcgtggccatcgaaccaatgcccgaaccggccgccgccgatgcggtgcagaccttcccactgatgccctccattccaggcggccagccatga

SEQ ID NO: 292105 - DNA, 483 bp, Morganella morganii
atgaacaccaacaccccttcgatcgaacccgcagacggcggcgagatcgagatgcaagtcgctgttgcctgcgtcgatgtttccggcacccccgacatgccggtcttcaaggtcagaaccacccaggaggaatacgatcagggtgcccactactacaaagccaaggatctggccgaagaagcccggtacgaagggccgttcgtctgcttcgacgctgccgaatatggccccatcctgtcggccgcccgcgaactgggccttgccccgcaggtcgtcgtggtcgatatgaccgacggccagatccactccatccgctgcgacaccggcgagatcaaggtcgtctgctacgacaccagcgacaccgacgagtactcggcggcggtggcggaccggccgctcggcgagaacggccagctcgtgcgctgctgggcgcatgcccaactggcacaggtcgatcccggcttgaagctggctcgggattga

SEQ ID NO: 292106 - DNA, 1161 bp, Morganella morganii
atgggtgtgctggcagcgaaggctcgcaagaccttgctgctgactggcacgctgatgggcggctacggggacgacctgttctacctgctgttccgagcccttccggggcggatgatcgaagacggctaccgcccgaccacgagcggcagcatgacctcggccgcgatggcgttcatgcgcgatcacggggtcttgaaggacatctactccgagagcaccggcacggcgcacaagacggccaagggcaccaaggtatcggtgcgcacggtcaaggccccgggcttcggccccaagggcgtcttgcgctgcatcctgccgttcacgatcttcctcaagctcaaggacatcggcggcaacgtcctgccgccgtatgacgaggagttccgagaagtcgcgatggacacggcgcaagccgcggcctaccgcgatctggcgggtcggctgaccgcggagctgaaacaggctcttgcacgacgcgatacgactttgctgggtgtggtgctcaacgtgctgctggcctggccagattgctgcttccggtcggaaaccgtggtgcatccgcgcacgcgcaacaccttggcgttcgtcccggctcagttcaacgagttcgagttgacgccgaaagagcgcgagctgatcgacatctgcaaagaggagaaggcgcaggggcgcaaggtcctggcctacacggtctataccggcacacgcgacacgaccagccggttgaaggtgctgctagagcaagaaggttttcgggtggcggtgctgcgcgcaagcgtggatgccagccgtcgcgaggactggatcgccgagcaactggaccgtggcatcgatgtgctcatcaccaaccccgagctggttaaaacgggactggacctgttggagtttccgacgatcgtgttcatgcagtcgggctacaacgtgtactcgctgcagcaggcggcacgccgctcctggcgcatcgggcagaagctgtccgtgcgcgtgatctacctcggctacgccggttcctcgcagatgacctgcctagagctgatggccaagaagatcatggtctcgcagtccacctcgggcgacgtgcccgaatcggggctggatgtgctcaaccaggacggtgattccgtcgaggtcgcactggcccggcaattggtcgccgcctga

SEQ ID NO: 292107 - DNA, 1719 bp, Morganella morganii
atgactacgcaagaaattgcttgcgcgggtgcgccctcacacgaatcggtcacatggcacagcatcgactgggctgcgtgtcaccgtgaagtgcgaaggctccaggcgcgtatcgtaaaggcgactcgggaaggaaaacacggcaaggtgaaagccctgcagtggattctgacccactcgttcagcggcaaagcattggccgtcagacgagtcaccgagaaccaaggtaagaagacgccgggcgtggatggcatcacatggtccaccccggaagccaagtctcaagccatgttgtcaatcaagcggcgcgggtatcgtccccaaccgctgaagcgtgtctatattcctaaagccaatgggaagatgcggccgctgggtatcccgaccatgagagacagggcgatgcaggcgctatacctgctggctcttgaacccgtggccgagaccacagcggacggacgctcgtttgggttccgaccggagaggtccacggcggacgccatcgaacagtgcttcacggcactgtccaagaaggtggcaccgcagtgggttctcgaaggcgacatcaagggctgcttcgacaacatcagccatgactggctcatgggtcatgtaccgacggatcgcgagattctgaggaagtggctcaaggccggatacatggaagatcggcaactttttccaacagaagctggtaccccgcaagggggcatcatctcgccaactctggcgaatctcgtcctcgacgggctggaagccaaactggatgctgcgttcggaagaaagcggtacgccaacggtgtacagacccgtttgatggtcaactatgtgcggtatgcggacgacttcatcgtgacaggacgctcgaaagagctactggaacaggaggtcatgccgatcatcgaggacttcatgcgggaacgggggctcacgctctcacccgagaagaccaagatcacgcacatcgacgagggcttcgatttcctcgggcaaaacgtgcgcaagtacaacggcaagctgttgatcaagccgtcgaaagcgaacgtggcgacctttttggagaaagtgcgctcggcggtcaaaggcaataaggcgctggatcagcctcggctgattcggatgctcaacccaatgatccaaggctgggcgaattatcaccagcacgtcgtgtccaaagcgacgttcgcgcgtgtcgatcatgagatttggcgtgtgttgtggcagtgggccgttcgtcggcatccgcagaaaagcagcgtctggatcaagcagcgctacttccactccgtaggcacccgtaactgggtgtttgcggcggcgacgggtgaaaggttccctgatgggaaccccatcctgtcgtcactgcggaaggcaacggatacgcccattcggcgacaccggccaatcaagttggaagccaatccattcgacccgacgtgggagacgtactttgaggagcgtgtaagcctcaagatgcagaactcactgcggggcaggaagaagctcatcaacctctggttggcacaggatcgtcgttgtccgatctgccaagagttgatcacgcaggagacggggtggcatgtccaccacatcattcggcgggtcgatggcggaaaggatgggaacaccaatctcatcatggtgcatccaaactgtcataaccagattcacgtcaatggtctcaaggtggtgaagccggtccgcgaaagcgggctttga

SEQ ID NO: 292108 - DNA, 1056 bp, Morganella morganii
atgtccctcgatctcgaaaccaatgccgctgaagccgcgcccgtacagggcgaactgctcgacgcggaatcctcccctctgaccctgagccttcaggatttcgtcggcgagttcggcgacgaactgctcgacgccctcaacagcgccaacccgccggtctataccggccaaccgcaagcacatcgccagctcatcgtcgccagcctcaagcgcaagctattccaggcccaggccgaagtcgtccacgccgccgcggagctgctgattgaccgtggcgagcgcgccgcgatcgtcaatggcgagatgggctgcggcaagacgaccgtcggcatcgccacggccgctgtgctcaacgccgaaggctaccgccggaccttggttctctcgcccccgcaccttgtttacaagtggcggcgcgagatccaggagacagtagcgggcgcgaaggtctgggtgctcaacggccccgataccttggtcaagctcatcaagctgcgcgagcagttgggtgtgcagccgaccggccaggagttctttgtcctggggcgcgtcaggatgcgaatggggttccactggaagcctgtcttcacccagcggcgcacccgccacggcgacgtggcggcctgcccggactgcggcacggtcatcaccgacctcgacggcgagccggtcaacccggtcgcgcttgaagccgaggagtaccgcaggaagtgcagccattgcgcagcgcccctgtggacgctgatccgcccacgcagcctgtccggcaacgaccagtcctcggccgtgctgaaagccttgaagcgcatcccgaccatcggggcagtcaccgcgcagaagctgatgcagaagttcggagacggcttcctggcctcgatgctcggcgacaacatccatgagttcatcaatctcatggacggcaacggcgagctggtgttttccgaccgtcaggccacccgcatggaacgtgcgatggccaacatggagttcggctttggcgaaggcggctaccagccgtccgagttcatcaaacgcgtgcgacgtgaagtcgcctga

SEQ ID NO: 292109 - DNA, 306 bp, Morganella morganii
atggcatcacatcgcatcgaaacctactgtcagagcctggcgttccccatcggggcgcttatcttcagcaaaggcattgaccgcctggtccgctcgggtcgcctcgacccgatcccgtacttcaggcgccacacccgtggcgactggggcgacgtcaacgtccagcaatggcaggccaacagcaccgcgcttcaatcaggcgcatcgctggcatcgcactacgtgatccatccggggctggccattcgcatcgttaccgacgcggagcgccacgccaccgtcatcgttctgccgtccgaggactga

SEQ ID NO: 292110 - DNA, 321 bp, Morganella morganii
atgttccccaatccgttcaagcggccagcgccgcacaagcaaccgttgttcgcaccgagtacgttgaagttgagcgagaaggtgcattggctggcccgaagaggcctgatcgaccccttagcctatgtccagcgccatgtgcgcggggactggggcgagatcgatgaggccacacgccaagccaacgacgtggcgatccaacaggacaacctgatgatctcgcagttcaggatcacgccggacctggcgctaatcgtcaagaccagcgaggaccacgagaccacggtgatccagcttcccgaagagcgggacctgatctga

SEQ ID NO: 292111 - DNA, 1110 bp, Morganella morganii
atggccctcatgttcccgcggctcgcccgcaatttcgccaagaacgggtactacccgaccgacgaacccacgctcgaaagagccctcaacgcactgatgcccagcgacgggccgatgtgcatcctcgatccctgcgccggcgaaggcgtggcgatcgccgaagccgcccatgccctcgggcgcgagcaggccaaggcgttcgccgtcgagttcgacgcggagcgggcacgccatgcccgaggtctggtcgatcactgcctgcacgcggacctgatggacacgatggtctccaaacagtccttcgggttgctctggctcaacccgccgtatggcgacctgtccaaggacgtcaacggcaacatcggataccagggccagggccgtgcccgcctcgaaaagctgttctatcagcgttcgctgtcgctgttgcagtacggcggcgtgctggtcttcatcgttcccggctacgtgctcgacgcggagctggtcggctggctgacacgtcactacaccgatctgcggatctaccgagcggtggagacgcagttcaagcaagtggtgatcttcggccgaagggtgcgccagcgcgagcaggcccccgatggcgtcaaggccgtgcgcagcctgctgctgcaggttgggcttggcgaagtcgaagccgaggaacttccgagcgagtggccgttcttgccatacatcatccccgccagtccggccgagccggagcatttcttccgcgtgacgatggagcccgaacagttcgccgacgaggttggcaggctgcaaggcctctggccgtcgctggacacgcacttgggggccgcgcagcagtcgctgcgtccaccggcgcgagccttgtcccactggcatctcgccctggccttggccgcgggcgcgatctccggcgttgtgcgctcccagacggggcgcgtgctcgtcgtcaaaggtgacacccacaaggacaagacgctccagcgggaattcaccgaacgcgaagacggctccatcgccgagacccgcatcctcaccgacaagtttgtgcccgtcatccgcgcgtgggacatgacgcctggctccgcgacacggggcgaggtgttaaccatccgctga

SEQ ID NO: 292112 - DNA, 648 bp, Morganella morganii
atgcccgcaaacacttcttccacgctgtaccgcatcgacgaatgcccggacgtgatggccgacgcctgtgtcggcgatgaccagggcaacctgatcttcctgtccatctgggcgcgcgacaccgccgtccagcagttccttgctcgcctgaccctcgggcgcgacgagcagggactggaccagttccacatcatcaccgatcagggcggcagcgtcccggtgttcgtcggcaacgtcgatcgcctggaaaagcgcatgacccgcgcttaccggcgaacgctgttcggttcgctgtccaacgtgtggctgttcgaccggcgctgcgtcaagcccgacaaggccaacgccagcgcattggcattgctgccacgcgacagtgcccaccggcttgaccgcctgtggatgctggtgcgggacacctgcccgttgccgctgctcgaccactggcgcgagaccgtgctggaactgctgcaaagccgcgagatgctggcccgccttccgttcgccctcgggccgctggaaggccatcggctcgccatcgacgtgccggcgctgaccttggcgctgggttccctgatccgcagtgacgtgctcaccgcctatccatacccggccaagatctggacgccggaagtggtagcggcctga

SEQ ID NO: 292113 - DNA, 261 bp, Morganella morganii
atggacccgatcctggctgcgctctcaccctcgctgctggcactcgttgaaggaagtttgtccaacgacgaagtgtcctccgacgaggagatgctggagtacttcatcagcaacggcctcaccgaggaacaggcacggcaggcactgacctaccgcgaccagtacctcaacaacatctacctggacggcttcacgccgatcacggcggtggacgaggcgcttcacttcaacccgcacacccggcagttcgagccggactga

SEQ ID NO: 292114 - DNA, 408 bp, Morganella morganii
atgggctggtatttctctccccaatcgcggtctgagctgatcgcggaattgatcgcaccgcagcagaccgagcgcgtcagcgcgaaggtcatcgctcacgcactgcgcggcaacgtgctgtggtccgtggtcgaaatgaccgccaaggtcgagggtgtgcatcgtgatctcgcgccgggccagtccctgcgctacatccgctgcgatctgctggaacgcagcggcaaccagtggggctacaagccgctggaagagtccatgcacccgtactactactcgtgcccgctgtcctatctggacctcgcaccggagcagtccgccgactggcgtgcaggcgttcgcgcctaccacgcacggcgacgcacacccacggctgtcacggctcccgccgcgacgctgatggcctga

SEQ ID NO: 292115 - DNA, 327 bp, Morganella morganii
atgtccaccatcgcttgcgattcccctcgctccgctctggatgaacccgcttggcgggctctctgcgagacggaagccgcacaagccaccaaggggtgcggactgtctcacgactactacgtcgaacgcttcagttccgcgatcgacgagcaagttgctcgattgcccgaagaccaacgcgcacaagcgctgcagatcgcacaggaatgggactacgcgacaccggccgaaaggcaggaagcccaggactggaacgctgaacacggctattgctcgcacggaatcgaactgggttattgcccggccggttgcgattcggactactga

SEQ ID NO: 292116 - DNA, 693 bp, Morganella morganii
atggcagtcacatcggcacccgagaaatcggccacgcccattatcgtcccgggccagctcgcgctgcgcaccattcacggccgcaacggaaagttcaacgttggcaagctcgaatgccaactcggcaagttcacgataaaagatgccgaactggagcagtaccccgagggcaagtaccaaggggaattcgtcctccgctacatcttcctcaaaggctatccgatcagcgacggcagcatgcgtttcgagatgcgcgccaacctggacggcatgacacttttcggcatcgacaagctgagcaaggccgaagcacatagcttcgccccacaggaagtcgatccgctcgatgaagagcaagggccgccgcctgcggcaacgccggtcaaggcctccaaggcatccaggtccgccaaatctgcacccgtgcaggcctccgcggacccgctgatcgatacgacgcccttcggcgtggacgcgccgccgcctgctacggctgctgcccccggcagcaccgaggatggcgacgccgcactgttcggcctgttgtggccgctgggcgagtccgtgaagctggattcgaccatcgaccgccgcgccctgcgcgcgcagatcgcccgcctggacgaactgggctacgcgctggacttcaagacgcaggagtggagccgccgggccgaactgcaacctgcgtaa

SEQ ID NO: 292117 - DNA, 918 bp, Morganella morganii
atgaacaccacttcaaacgagaaatcgtatttcgacctccacacttcgggcatcggctacatccagcgtgtccgtgaagtgcccgtcaggggcggccgccgagcgcagcctttcctggcatgcaccatcgccgcgctggtcggccctgccagggaccccagctaccgctacttcgacgtcaaagtctcgggtgccgaggccaagaagctcgtccagcgctacatcggcgttgacgatcccaagcagcgcccactggtgcgcttccgtactggcgatctgcgcgccgatcccttcatccgcgacaagggtgaacgcaagggcgaagtaggcgggtctctcaaggcccggctgctcaagaccgaactgattgaccgggccgaactggcctcgatcaagcagcacgagctgatcacccgcggcatcggctacctcagccgcccgaaggacgtcactcccaaagacggtgatcccttcctgtcgtgctgcatcgcagcgctgaccggccctgtcgatgaaccggagtatcggtatttcgacacgatcgtcgccacccctgaagccgagcacctggttcgccggtgcgtgcaggccatcgaagcggatcgcaaagtgctggtcgccttccgtctgaacgacatgaagatcgatccgtacatccgcaccaagggcgagcacgccggggaaccggccgcgagtctggaatcgacgctggtccacatcggtctgatcaagatcgatggcacccaggtctatcccacgagccaggcgcaagccgaggcaccgcaggcccaggacgcatccgcgcccgaagccgaggacgctgccgacaccgctgccgagcagcctgccgagtccgccgagcgcgagcccgcaggtgaagtcgaggagcaggagccggcattggctgcttcgttctga

SEQ ID NO: 292118 - DNA, 354 bp, Morganella morganii
atgtcactgcgattcagaggctccgacctgcgccccgtgcttgccgaggccatcgccaaccaatgccgcgtcgccctggccaaggaccagggcgtgtacttcctcgccgagcgcggagagcgccgccccgatggccgcgtgaagctgctggcctatgccgtcggctgcaacccggatatcgacccgttcgatgactggtgggaactggcacgcgccgaacttggaggcgacgacttcggcgagttcttcgacccgaaagacagcgttttcactcgcattctgcaaagctcagatgatctggagctgtccgccaccgctacgcatctgtcactggcggcggtggaatcggcgtag

SEQ ID NO: 292119 - DNA, 813 bp, Morganella morganii
atggatcgctctctcatcaagaccctgatgccttcgcttgtcgcaggccatgtgccccgcaacgtgcggtcgttcaagtaccgcgtgttcgatgatcagccgcaatcctcgacgctgggcttcgccatcgatccccaacccttcgacggcaaggtggtcgcggcgaatgacgatgccatcgtcgtcaagctcaagcccagcgagttcgcggtgctcgaccccaacctggtgaccaccgtcccgagcgagggcgccaaggttcatgtccaaccctacgcccggcgacgtttcgacggcctgcgcgcggacaccccggaagtcgttaccgagaagacttcggatggcacgccttacaccatcacgaggcatatcctcggcaaagcgcccgccaagctgcccattcccgagccgcagtgcatggaactgggccaactcatcgagcagttggaggagatgcccgcgcccgacgggttccggtgcatcacccacatgctggtcgatgcaggtgcccgcgacttcgtctgggtcgatcccaagccctccaagatcatcgagaccccgccggcgatcagcttcacggtttcaaccaccaagttcgagggtcaggtgacgatcctctacgaccgtggcggcgacacctacgtggtggagctgcatcgcgacggtgaattgatcgatcggcacgacgaggtgtatttcgacatgctcggtgacgtgctggagcggctcatcgacgacgggcgctggcgcctgatcgacgtcagcgtgatcgacgccaaagctcctcggcgacgtcaggcggttccagcctga

SEQ ID NO: 292120 - DNA, 279 bp, Morganella morganii
atgttccccaacctcatccctagcacgtccgacttcgagtaccagctcggttcctgcgtcaatgccatgggccaggacgacgccatcggccagatcctggtattcgagcgcatgagcggcacgctgcacatgcgccatgtcgccagcgtcgaactggtggacaccgacattgacgactacgaaatggtcgtcttcgacggtggcaacaccagcggcgatacatggaaacatgtcttcttcccacgtcagcgagaacactacttcgtgtacgaagcctga

SEQ ID NO: 292121 - DNA, 738 bp, Morganella morganii
atgtccctgaaacccaatccatttctccgcggctactggaatctgaaaatcgtccgcacgctgtgcatcagctacgaggacggaagcccgcatgtttggcgaatcgtccacgcgagccaaaagcacttttccgacgaggaactgatttcatcctcgtgcatcatcaccagcgatttcgccgtggtcaaaaatggtccccaacccgtgaatgccgaggtactggccgaatgcgatgccggagaaggtgtcagcggtgaaggcgtaatcggcgccgtggtctatgccatccatggcgacgacttcgacggccgccccatccacgtcggcgatacctattcggctgaagcggcacgggaagtcgtgcagcgcctgagtttcgagaccggctactacagccggtgctgggaaatcagcagtgcacacataagcgaggaaaccggccaatacctcgccaacctggcagacctcgccacgccggaggcattcctgttcatcgcgttccgggttccttacagcccggcgatcggcatcaagctgatctccaccccctggacggacaagaacctggagcgcgtcgaggggatcagtgcggagcagcttcgccaggagcaccgaagcaagggcatgccggatgacctggcgaacgtcattgaactggccggccaggccgatgtgcgcatcctgattctcgacgccgacgcacccgtgctgttgggcctgccgttggccgagtcctag

SEQ ID NO: 292122 - DNA, 687 bp, Morganella morganii
atggcaaacaactactacgaaggcacgggcgttctcgtgctcgaccgcgttactcccgtcatcaaggcgctgttcggcgcctttgcgctggatgaaaaccatcccggcaatgggcaggcttacatcgcccagatcgccgagaccaatgacccgcgctggacggatgtgctggatggcctggaagacctggccacacaactcggcatccccatgcccgacgacgaagaactgtcgattccacctctgcttgaacggctggccgcgcacttcggtgctgaccaggactgggagctggagaacctcatcgagcaccaccagttcgaggacagcgccgacctggaagccttgtttctgatcgcctcctgcctcgatgacggtcatcacctgaccgccatccagttcgagggttgctggcattgcagcaaaccgaggctgttcgagttcggcggcaacggctgctacctgagccgcgaggcccaggtcttcagaacgtcctcgcaggcactccaactcggcgaccaactgcgcaagaccatcgtggccaccgacatcgaagaggcctcggcgttgatcgcgctggaggccgccaacctgcttgccggcatcaccgacgagcatttccgcctgaatgtgcgccatcgcatcgccgaacggctggcccagacgccaacgatcagcgccgactga

SEQ ID NO: 292123 - DNA, 393 bp, Morganella morganii
atgaaccagcttctgccacaggaagtcgtcgatcagatcatgcgggaagagcagcatttcgctgccgcgccccaagccttcttcgaggcctggaagcgtggtgtcgagatcgccggcccgcaatggttcggcgacggcacccgcgaaggcctgaaccaggccaacaccaagtgggatttgcgtcccgacatgctgcggctcaacgatgccctcggcgtcctgagcagcggcgaacgcatgttcctgtccgccatggtcagcttctacaacgcgcgcgagggcggtgccatgctcaagcgctgccacttcgacgggctgtcggacttcgacggtctcgacctggaacgccgcaaggtcatcgccgacctgctggtgaactacagcggctggtga

SEQ ID NO: 292124 - DNA, 213 bp, Morganella morganii
atgtcccagcaagcctctttcggccaactggcctcgacctactgcggcaagttcctgccgctcgaagtcctgcaaagcgccgccggtcactacatcggcacgcgcgataccgaaggtcccgtttcgcgggaatcccgcgagtacttccgcagctacgccgcggctcaacgtgcgctcgaaagaggcggctggacccagctcgccacgccctga

SEQ ID NO: 292125 - DNA, 558 bp, Morganella morganii
atggacaccatcaccaagcaagaccgcatcatgctgaagaacctcaaggtcgccgacttcgccagcgaggaaacgctgtgcttcaccgcgaccgtcgtgttcgacggcactcccatcgccgaggcccgcaacgacgggcatggcggctcgacattcctccgcgcgctcaataacaagacgacgctgctggctcaggccgaagccttcgccaaggaactgccgcctgcgccgctcgatctcggccaggagggtgaagacccccattacatcgacatgacgctcgacttcctggtcgatgagctggccgatgccatgcacgcggaacgcaaggtgcgagccgctttcaaccgcgacatcggcaacaaggtgctgttcatcaaggacggcaaactgctgttcatcaagggcatcaagctcaaggccatcgccgaccgcaaggcgtacttcgcttcgctgcgcgcccggcaggcccagcccatcgtcatcctcgccgagcttccgcccgagcaggcattcgacctgtggaagcagcatgtcctgggcgacaagcccgattga

SEQ ID NO: 292126 - DNA, 1608 bp, Morganella morganii
atgaacccgcaaccttgcacccttcgcggtgcgccccaggccgcgccactgctgtatggcagcgtgtgcagcggcatcgaggccgcgagcctcgcctggcaacccctcggccttgaagccgcgtggttcgccgagatcgacccgttcccgagcgccgtgctcgctcaccgttacccccacgtgcccaacctgggcgacatgaccgcgatcgcccgtcaggtgcgcgccggcaccgtgccggcgcccgacatcctggtcggcggcacgccatgccagtcgttcagcgttgccggcgcccgccagggactggatgacccgcgcggcgccttgacccttgcctatgtggagcttgcaaatgccatcgaccaaacccgccaccaagaccgccgcccgccggcaacgctcgtctgggaaaacgtccccggcgtcctcaacgaccgcagcaatgccttcggacatttcctgggcgcactggccggcgaaggccgtgcgctccagccgccaggggaaaaatgggcgcacgctggttgtgtgtctggaccccgccgccgcatcgcctggcgcgtgctcgacgctcaatatttcggtgtcgcccaacgccgcaagcgcgtgtttcttgtggcaagtggtggagatggtctcgatcccaccgaagtactttttgagcgcgcaggcctgctcggggattcttctgcgggccgcgcgccgtggcaagaagctgcccgcgctactgaaccgggtgctgcagcagcaggcggatacgcaggattcgccgggctgacgcagccctacggcaaggtcaccacgatgttcggattcagcggcggcaccggccccgtcgatgttgcggcatgcctgatggccgcgggtcccaagcacgacatccgcaccgagacgttcatggtgcagtccgtcgccggcagcatcgcccataccctcgacaccgccaacaacggcaagggcagcagcgaggacggcaccggcaagggcgtgccgatcatcgccttcaccgcccagggcagcggcgcggatgccacgatcgacctgacgccaacgctgcgtgccggcgggcatcgcaacagtcatgcaaacgccggcgtcgtacccgccatcgccttcgcgcagaacaaccgcggcgaagtgcgcttcgagtcaggccatggacaggtagcttgcaccgtcctgtccaacggcaagccgggctacggcgtgcccatggtgacctgcgttgccctccggggacggccgcagggtcttgccgccgagctgggcggcagcgtagcggccgcgctgcgtaccagcggcggcggtgctgacaagccccatgtgctggcccccgacttcgaggcccatttccgctacgactggaacgaccccggccccggcgactggtcgcaatggcgggtgcggcggctgatgccgatggagtgcgagcggctgcagggcatgcccgacgactacacgctgatcccgtatcgcgggaagcctgccgctgacgctccgcgctacaaggcgatcggcaactccatggccgtcccatgcatggcttggctgggcaaccggctggtgcagtgcctgcacaagacgggctcgaccgcttcggattga

SEQ ID NO: 292127 - DNA, 2013 bp, Morganella morganii
atgcggctgttcttgtgcgagaagccctcccagggcaaagacattggccggattctcggtgccacgcagcgcggtgaaggctgcctcaacggttccggcgtcaccgtcacctggtgcatcggccatctcgtcgaagcggcagcccccgaggtctatgacacggcgctcaagcgctggtcgctggagcagttgcccatcattcctcagcactggcgggtcgaggtcaaaccgaaaaccgccacgcagttcaaggtcgtcaaggcgcttctggcgaaggcgacccagcttgtcatcgccactgatgccgaccgcgaaggcgagttgatcgcccgcgagatcatcgatctgtgcggctaccgcggtcccatcgagcggctgtggctgtcggcgctcaacgatgcgtccatccgcgccgcgctcggcaagctccggccgtcggccgagaccctgccgatgtactactcggcactggcgcgctctcgggcggactggctcgtcggcatgaacctcagccgcttgttcacggtgctgggacgacaggccggctatgacggcgtgctgtcggtcggccgcgtccagacccccacgctcaaactggtcgtggaccgcgaccgcgagatcgccgccttcgtgtccgtgccgtactgggccatcgacgtgtccctgtccgctggtggccagactttcaccacgcaatgggttcccccgaaagcatgcaccgacgacgccggccgctgcctgcagcagcccatcgcgcagcacgccgcgcagcagatccgcgtcgcggacagcgcccaggtggtgtcggtcgaaactgagcgcgtgcgggaaggtccgccgctgccgttcgacctggggaccttgcaggaggtgtgttccaagcagcttgggctggatgtgcaggagaccttggacattgctcaggccctgtacgagacgcacaaggccacgacgtacccgcgctccgattcgggatacctgcccgaaagcatgttcgccgaggtgccaacggttctcgacagcctggtcaagaccgatccgtcgctgcgaccgatcatggaccagctcgaccgcactcaacgctcacgcgcctggaacgacgcaaaggtatccgcgcaccacggcatcatcccgacgctcgaaccggcgaacctctcgaccatgagtgagaaggaactggcagtgtatcggctgatccgggcgcactacctggcgcaattccttcctcaccacgagttcgaccgcaccgtggcgaacctctcctgcggccagcagacgctggcggccaccggcaagcaggtcgtcgtcaagggttggcgcctggtgctggccgaaccgcaaattgaggaggatggcgcccctgcggcgcgcagccaggtactgcccgcgctgcgcgaggggctggcatgtcaggtggccgacgtcgatctgaaggcgctcaagacgctgccccctcggtcttatacgcaaggcgagttggtcaagtccatgaagggcgtcgccaaactggtctcggacccgcgcctgaaacagaagctcaaggatacggtcggcatcggaaccgaagcgacgcgggccaacatcatcagtggcctgctgacgcggggctacctcgtgaagaagggccgcgccatccgtgcctcggatgcggccttcaccctgatcgacgcggtacccacagcgattgccgacccagggacaaccgccgtctgggaacaggcgctggacatgatcgaagctgggcagctcacgctggacgtattcatcagcaagcaggctgcatggatctcacagttgatcgcgcagtacggcaacacgtccctgtccatcaaggttccccaagggccggcttgcccgcagtgcggcgcgcccacgcgccagcgcaccggcaagagcggcccgttctggtcgtgcagccgctaccccgactgcaaaggcactctgccggtcgaatccggcacgtccaagcgtagtgcctcgcgtccgcgcagtggcggccgcaaaggctcctga

SEQ ID NO: 292128 - DNA, 441 bp, Morganella morganii
atgagcacgcatttttccggcgaaggcaacatcggctcgccaccggagtaccgcgaattccccaacggcaacgacgaacccagccgcctgctgcgcctgaacgtctatttcgataaccccgtacccaagaaggatggcacctttgaggatcggggcggcttctgggcgccggtggaaatctggcaccgcgacgccgagcactggaaggacctgtaccagaaaggcatgcgcgtgctggtcgtcggccgcatggagcgcgaaccctggacggacaacgaggatcagccgcgcgagacctggcagatcaatgcgcgcagcgtcggcatcctgccgttccgcatcgaatccgtgaccctcagcccaaagctgcaggaggcagagcccaagccccaggccgcgcaggaaccggctgcgccgaaagaatccaaacgcaggaagtga

SEQ ID NO: 292129 - DNA, 528 bp, Morganella morganii
atgagcgatccgaaccaaccgacccgctacttccgaggcctgcaacagggtgccttcatgcggctggaacacgcagcctctctaaaaggccttttaaagccttttaagggtaaaggggacttcgaggcctgggccagccagtgcttcgccatgcgcgacgagttgattgccctggcacagcgacaggtgctggagcaggcatgcgggcaccccttccacctgctgtccatcgaactggcccaacagaccaccggcgcaggaaccgtcttcttgcgctggcgcaggcacgacaggtcggccatgggcgtggcgctgtggcgggagctgatcgccagcaccagcacgcccgtcaacctgctggccgacctgcacgcgatcgagctgcagcgcatcacgttgaacatgcagatcagcctgctgcacaccttgggcaggcaggcgcaggaatgcgccagcaaggcggcccaggcggacgacgcctacctgcgccgactcacgcccattcccgccgcaatgcgcgatcgatga

SEQ ID NO: 292130 - DNA, 780 bp, Morganella morganii
atggcaaccaatgaacctctgcaactgaatctcggctccctgcgcagtgcgatgtcgctgaccctgcacacccaccacgcttcccgcatctggcacggccgcgccgccaccgaggggcgaccgggcatcgtcggcctgaacggctacatcgctcagatgaacaagatgcggcggggctcggagcaggacgacccgtacagcgacttctggatgctgcgcatcgaggaaaagctcgaccacaccaaggccacgctgcaatcgctgcgcgagcaggtggaccaggcgctggcgagcgtgccgccagcgcttagcctgggcgaaaacctcaacgtgcagccggtcaagctgccgctcttcgtcaacgcgcagctcggctttgccgcggtctatcttctggccgactacgacgacatcgcccgcaagctgatcctcgcccatcacaccgcgctcattgaccgcagcaccttggaacgctggctcaacgagggcgcacattcactgcgcagcctgttctcgctggcccagcagtaccgctattcgggctgcacacgcgatgatttcgcgtcgaagaatgccgcagcgcgggccgcgctggagaagtacggcgaactgccgcaggacgtgctggaaggcactcgccgctcgaagtttgcgccgcccatcgtgcgccgtggcctgcagcagcgcagcgacggtcctgccgaagcacctccgcccggagatgaagccaccaccgcagagccgcccgaaaccgcagccgacgaggacgagccggcatga

SEQ ID NO: 292131 - DNA, 1233 bp, Morganella morganii
atggccgtggacaacaccacaccacgccgtggccccgtcgcactcgcggacctgttcgacgccgccttgaaagacctcgtgcccaagcccagccccagtgcgccagcacccatgcctgcgccgacgcccgccacgtccggcgatgccttcctcttcagcggcaaccggcatgagaccgtgccgcggcggctgttcctcgaccgtcgcctgacgccgctggagcgcaacgcctggcaggtgttccggctgatgctcaacgacgatggcgtgaccgccttcccgacttatgagcagcttcgcccctggctggcgtcgatgccctgcgccgggcaggcctcgcatgaaaccgtggcccgagcgttgacactgttgcgcctcaccagatggttgagcctggtgcggcgacggcgtgaccccaagaccggccgcatcctcggcaacctctatgttctgcacgacgaaccactgacgcccttcgaggccatgcagctcgacgccgactacctggcactggtcagccagtcccttggccattcggccaaggccgtccagatggtcggcctgaacaccctcaaggagatcgcggaagatccgctgctctctgggcgcacactgccgtcgcggctgcaagtcctggcagaacgcctcgccagccaaggcatcacggccgccgagagttatccacaggaggatgccgcccacgaatccgaagaaggagcatcgagccttcttcggaatgcggatgacccatcttcggaatccgaagcaggggcgaaacccgcgccagacgcctctcttcggaatccgaagcaggcccgtacagtacgtagtagtcgtattaatgaagtacgtactaccgcgcaggcgcgcgcgctgggcgatttgcaatggcccaagcgcttcacggaactgaaggcagagcagcagacaggtgccagggtggcattgcagcaggtcgatgccgcgctgagacaggccgtgctggacgaatgggccacacgatgcagcaatcatggcatccgcaatcctgcggggtatctgttcggcatcatccagcgcgccatccatggcgagttcaatgcctgggccaagaaagacgcgccatcggcatccgtcccgccaaacgagcggccaccaccagcaccgccacctcagccgcagggtaagccagtgccaccggaagtcgccaagcagcacatcgagcggctacgcaatctgctcgccagcaattga

SEQ ID NO: 292132 - DNA, 561 bp, Morganella morganii
atgtccgcaccacacccactcaaccaggccgtcatcgcccaggccctctatgacttgcgtaatgggcaactgcgccggtgcaaactgatggggtttggcgaggaagaactggacgccctcaagcatcccgcgctgatcagcgtgctcgccaacgctaacgtctcctggtgctcggtgacggtcaaccgcgaagtgctccggcgactgctcaagcaggcgcaggacgtggagaaggaaatcgccacggtcgatcgcatgctcaggctgggcgcgagcaccgagatggtcagtcggttctatggcctgacccatcaggaggtggcgcttcgccgcgaaatcctcggcctgccgaagcgcaagggccgccaccccgtgctggatgagaaacaggacacggagctgtggcggcaatggaaggccgtgaccggcagcagaaatgtcgatctcgaagacgaaacctccatcctcgacgccaccatggacttggccgaaggcatgtcgctgcctctgtcggtggtctgggcctcgatcaagagctgggtcgatcagggattgggttga

SEQ ID NO: 292133 - DNA, 1659 bp, Morganella morganii
atggctgagatcacctcccagcagatggccggcaagctgctcgcggccgggttcgagcgtagcggcccgtcagcctcgaccttgagcgacccgatcgccgacacacccatggtcgtgaccctagatcagttgcgcccctacgaccacgatcccaggaaaaaacgcaacccggcctacgaggaaatcaaggcgtccatccgcgagcgcggtctggacgcggcgccggccatcactcgccgaccaggtgaggaccactacatcattcgcaacggcggaaatacgcggctggcgatcctgcgcgaactatggtcagagaccaaggacgagcggtttttccgtgtatcgtgcctgttccggccgtggcccagccgcggcgaagtcgtcatgctgaccggccacctggccgagaacgaattgcgcgggggcctcacgttcatcgagcgcgccctcggcgtcgagaaggcgcgcgagttctacgagcaagaaagcggcactgccttgagccagtccgagctggcccgccgcctcgccgccgatggcttcccggtacaacagtcgcacatcagccgcatgaacgacgcggtgcagtatctcctgcccgcgatcccgaccgtgctctatggcggtctcggtcgccatcaggtcgaacgcctgtcggtcatgcgcaaagcctgcatgctcgcgtgggagcgctacgccaagggccacccactggttcaggacttcgacgaatttttccaggacgtgctgtcgcaattcgacgtccaggccgacgagttctccgcgcagcgtgtacaggacgagctgatcggccagatggccgagatgcttggtgtcgattacgacgtgctcgccctggacatgaccgaatccgagagccggcagcgcgccttggtcagcgacccaacgccgccctcgacgccgcctgcgttgccggagccgggaaccatcgcgcgcccacctgccaacactgcgccacccatcgcaggggctgcatccgcagcgccgcctgcaggccgacctgcggcaacgccctcgacgcgcgagagcgacacggatgccagtcaggcaagtccggccaaccctgcggtgggtggcgatctgcttcgggagcacatcgtctcgccggcaccgacgaccgaacggctccagtccattcagcgtatggtcgccgaccagttgggtgatgcgctgccgccagacttctcggtgagcgtcttgcagtccatccctgtgcaggctggcgggctctatccgatctccgatgtctggtacatcgatcccggcctggacacagccgagcgcctgcgcatccacatcgcacagttcgcccgcgaaatcgcgggcgaggcagacctggacgagtgcattgatgaccgtgcagagggtatcggtttcgtctgccgggcccgcacccaaagctcggcgccgctgggccgtgccgtcctcgcgctgttagcgtgcctggccggtcagcggcccgccgacgtcggcctgcacgacgggcaaatcgtcatcgaactgccggcgctgctgcacggccagggtgatgcggcccagcgattgagcgatacctcgctggtcaagctgttccggctgctgcggttggcccggcacctgctcgaccttgaagccggcgctgcaggcgttggaatttga

SEQ ID NO: 292134 - DNA, 249 bp, Morganella morganii
atggcgaacgcacatgagcttgcccgtggccacaagcggcttcgcgccctgatcgagttcgcggttggcgaaggttggcacgtcaaacgcacgcctggcggccacctcaagttcaccaagcctggctgcgccgcgatctacaccagctcgacggccagcgaccaccgggcgaccctgaatgcccgtgcgcaaatccgccgcgccgagcgcgaggcccgataccaagcgcagggaggcggccatggctga

SEQ ID NO: 292135 - DNA, 876 bp, Morganella morganii
atgcaggtcgtatccatcatttcaaccaaaggtggcgtcggcaagaccaccacggccgcgaacctcggcgggcttgccgcggacgcggggctgcgtgtactgctgctcgacctcgacgtgcagcccaccttgtcctcgtactacgagctaggccaccgcgcacctggtggcatctacgagttgctggccttcaacgagcgcgacctcgggctgcttgtgtcccgcacgatcatcgagggcctggacttggtgctctccaacgaccaccgaggcgagctgaacactttgctgctgcacgcgccggatgggcgcctacggttgcgccatctcttgccggtcctggcgcctctctatgacctggtgctgatcgacacccaaggtgcgcgctcggtgctgctggagatggcggtgctcgcctccaacctcgcgctgtcgcccgtgaccccggaaattctcgcggcgcgcgagctgcggcgcggcaccatgcagttgctcgaagacattgcgccctaccggcacctgggcatcgagcctccacctctgcatctgctcatcaatcgtgtccaccctgtgtcagccaatgcacggctgatccagcaggccctgcgcgatcttttccaggaccacgccggcatccgcgtgctggctaccgacgtgccggccatcgaggcgtatccgcgtgcagctacgcgcggattgccagtgcatcgggtcgaataccgccagccgccgggcagagtcgcccccgccgcgctcgacaccatgcgcggcctcgcagacgaactatttccgcaatggcggcaccgatttgccatggtgtccggccgtccgccacaccctcttgatgccgggaggtcccatggcgaacgcacatga

SEQ ID NO: 292136 - DNA, 213 bp, Morganella morganii
atgtcgcaaacacctgcactgcccgcaagcgagcgccgcatcctgcggcttgatgaagtcgaaaccaagtcgggtttcaaacgcgcccacatctacaacctgatgcgcaaaggcctgttcccgaaggcgctgcgcctgggcgtgcgcgcggtcggttgggactccatcgagatcgatcagtggatcgccgagcgcgtcaacaaccgggcctga

SEQ ID NO: 292137 - DNA, 753 bp, Morganella morganii
atgcacgagaacaagaatgatgcaccaacatcaaaggtgttctatcgcccgatcgaagcgtccatccgctgggccgggctgctgcgatacgagcaggtgatcctggcttcgatttcgtcgccaaggcgcctgccgcagtcgttggactgtccacgttgtgacgagctgcggctttgcaccgaacgcatcttcgacggcatcctcaatggagaactgcccttcggacggaacggcatcacgacgcgcgattccgcgctgatcgactcccctgatctgacggtgcgccacgtcgatctgaagagctggatgcgccagcactatcccgagcaacgaccgtgcttcctcttctcccggagcgagcgcatcgcccatcccttcatctcggtggaaactgggcaggcgatgctagtcgagcgcctggccctgaagtccaccttggaccagtacaaacgccaactgcatgagttgcaggaaaagcacggggcgcttctcaagcagatggcgccctctactggcgcacagtgcctgatcagtgatcgcgccgaagccacctacctgaacattatcggcagcatgctggacctgatgctcggccagtcgccttcgggcgtgccgtactccagcttcaagacgcaggaggcggtggtcagtgcattggtcgcccatcacagcggcgcaatggggatcgcggagcggacgctaaacggcaagttcgccacggccagacgccggctgcgtagcgcaacagtctga

SEQ ID NO: 292138 - DNA, 480 bp, Morganella morganii
atgagccgcaataaagtcatggaaatctgctctgccgctatccagcctgccgggattatcctgctggtgaccggtgccggtggtgtgttcaaacaggtgctggtggattccggtgtgggtccggcgctgggtgaatccctgattggtgcggggctgccgattgcggctgcctgttttgttctctctgccgcagtccgtgtgatccagggctccgcaactgttgcctgtctgacgactgtcggtctggtgctgccggttatcggtgagctgggctattccggcgcacagctggcggctctgtctgtctgtatcgcgggcggctctattgtactgagccacgtgaacgactccggcttctggctgttcgggaaatttaccggtgcgactgaagcacaaaccctgaaaacctggacactgatggaaaccatcctgggaaccaccggggcgctcgtcggtatgctgttcttcgccttcctgtaa

SEQ ID NO: 292139 - DNA, 267 bp, Morganella morganii
atggtgtacggtgaaatctggctgtccgcgaataccattttcaaatatcaggataagatctattcagactaccccggtgacggcagcagcactatcaagctgcgcagcggcgacggtattcactttacctacaaaggtcagaaagccatcgctgacacggtatttgatctgattaaatttaatgctgcgccggaggaaaccccggcggcgcaggaaaaaacagaaacacatgatgaaacaacaaaaacgcccgtcgtggcaccttaa

SEQ ID NO: 292140 - DNA, 663 bp, Morganella morganii
gtggcattaaccggcctggctctgattatcaccggcggggggctgatcatacagagagcgtggctggcgttttaccggggaaataatccgctgccgctgacattgtgtctgaccatattaccgttattactgcatacccagactgaatatccgtttggtttgtcagctctgcattttgcactgtgcttattattattgtctcaggctgacagagccactgcttcaccggcaaaaacactagcgttaccatcatttttcagcatgatagcggccggaaccggtgcgggaatgatttgtataatggcaggagcatttctgacaggaattattttaactgaaacagagcaacagggaatgcaggatatccgggcattgtcatcggtaccggaatttgtgctgataacgcaatatgagcgggttgaatttgatcgtcatgtacataaattaatgcagtttaatcagaccggggagccgcgattattagcagattaccgccgttgggctgtaaattatttgaaaaaacatacggataaaaatgtatatatctccctgattatgattttgcattatcagggagatagtgaagctgagaaatattatttaaatcaggccggacaattatttccgcaggatatccgttttttctccggcaggttattataa

SEQ ID NO: 292141 - DNA, 2697 bp, Morganella morganii
atgtgggtgaatgttattccgtccgtggaaaccatcaccaaactgactgtcacgccgaaccaatccttaatcgccaacaacagcgaccagtttaccgctgtggcgctgttacagaatgacaagggcgaagtgctgccgaataaagcagtgactttcagcgtttccggcctgaaaaatccggaaggcgtgaccatttatgatgcggacggtaacagcggccagacactgaccgtgatctccgggccggacggcacggcgaccgtgaaaatcatcagtaaatccgccggtaaaggattgctgaaagccaagatgcgtaacggtaacagccgtaccgaagcgatcacctatattgcggatctcagtaccgcaaaaatcaaaactcttgagttaaccaataacaaagcagtggccgatggtcaggcgaaaaacatcgctgtggcaacggtgactgaccagttcgataacctggtggaaaacttcccgttaacggccagagcagataacggggcaactgtcgctgatccgaaccagcagactgacagcaatggtcaggttactatccggttcagcagtgagaccgccggggattccaaactggttgtagagggaacgggtacgtcgaagagtgtgaccgcacagtttatcgcggatatcagtaccgcgaagatccagagtgttgtgatcactcaggataattcggcggcggacggtaaagcgaagaacagtgttctggtaaccgtcactgataaccgcaacaacccgatcgccggtgcaccggtgacaatcaaagtaccgggaactgccggttatctgactcagcctgccggtggtctgacagacagcaatggccagctgcgggtgaatatcaccaataccaaagcaggtcaggataactataccttcagtatcaatgacagccgtgaaactgcggttctgacctttgttccggatctgtccaccgcaaccatcacgtccctgatcagtgataagaaagccattattgctgacggtactgagcaggcgatgctgaccgtgacggtgaaagatgcctttaataacgtgatcccgggtaataccgttaacctgacaaccacactcggccagctgagtgatcagaatgtcgttaccggcagcaacggtgaggcaacctttacactgaccggtacccgtgtgggtgatgcgactgtccgtgcgatcaacgccacagacgcagccggtaaaaccaccgttgtccgtattacacctgataacagctcgatggctgtccgcagtgtgctgttaaacggtgatcagacaaccaaagttgccaacggtacagataactttacctataccgttctggttcaggataacaatggtaacccgatccagggtgttccggttactgcatccgcagataatccggcagcaattgtactggtaacaggcaccactaatgcggaaggtaaaatcaccattaccttagccggtaccaataaagcgatggacaacgttcttgtcagcgcggcgctggacggcggggtaagtgtggatgcggataagagtgttaactttatctataacatcgacaccgcgaaggtcagtaaagtcacgctgaacggcgatgtcactcagaaagtggctgatggtctcagcagctttacctataccgcgcagctggtggatggtaatggtaacccgatccgtcaggcggacctggatgtgaagtggacgcagaacaaaggcagcgatgtggtgctgtcagcggaaaccagcaaaaccaacgcggacggtgtggcgactatcacactgatctccaccaccaaagtggcagataacatccgtgtcagcgcgcagtatgccggtacgccggttattcaggcggataaagccgtcagctttatttataacgttgcctcagccagagtcagcaaggtggaactgaacggcagtgtgactgaaaaagtcgccgatggcctcagcagctttacctacacggcacaactggtggatgagaacaacaacccgatccgtcaggcggatctggatgtgaaatggacgcaggacaaaggtaatgatgtcgtgctgtcagccgcaaccagtaaaacggatgcggacggtaaagccgttattactctgacatcgaccaaaaaagcagcggagaatatccgtgtcagtgcacagtacgcagaaacggctgtggtaccggcaaacaaaactgtcagctttatcttcaacattaatatggccaaagtcggcgctgtggagctgaatggcgctgtcacggagaaagtggcagacggcaccagcagctttacctataccgcacagctggtggacagcaatggtaaccctgtccgcaaagcaaacctggatgtgaaatggacccaggataaaggtgcggcggtgaaactgtcctccgttgtcagtaaaaccgatgccgatggtaaagcgactatcacgctgatttcgaccaccacagcagtggatgatgtccgtgtcagtgcgcagtaccaggaaaccgcagtcgtgccggcggataaaaccgtcagctttatctataacattgcgtcagccaaagtcggtacagtagagctggacggcgatgtggtacagaaagtggcggatggtgtcagcttctttacctataccgcgcaactggtggacggcaacggtaacccggttcgtcaggccgatctggtggtgaactggagctag

SEQ ID NO: 292142 - DNA, 231 bp, Morganella morganii
atgatcaaggtgccgattgatgacaatacccgggcggccatctattcatttgtctacaacgtagggcccggtgcgttctcgcgttccacgatgctgcggaaactcaatgccggtgatatcgcgggtgcctgtgacgaaatgaaacgctggacatttgccggtggtaagcagtggcagggtctgattaaccggcgcgaaacggagaaagcggtatgccacggaaccctttaa

SEQ ID NO: 292143 - DNA, 393 bp, Morganella morganii
atgtttgtatgggatgaggacgacctaaatgatgaacaaatagccgctatacaacaagaaggaaatgtatttcttgaagcatgtcctggtagtgggaaaacaagaacactaacctacaaaatagctcttgagctgtcgaaattgaccaatgaaaaaaagtggattgtagcaattacatatacaaatagagcagctgatgagattcgtgaaaggattgagttattaggtgttaatacctcccagttatgggtaggaacgattcattctttttgtttagaatggattattaaaccctatggaatatatcatgacaagcttaaatatggcttcactatcattaactcttatgatctgtctcttatacacatctccgagcccacgagaccgtactag

SEQ ID NO: 292144 - DNA, 285 bp, Morganella morganii
atgtttgagaaagtattgatcattctgaatgccgtcatctgctcagtgatttttgtccgggtgttttcgttcagacgaaacggccggcagcactgcgcaaaaggggcatggatagcctggattgtactttcatactcagcgaatgtgccggtgcggacggcgcagtttttcctattcgattcaccttattacgctgatatcaccagcgtgatttcaaatcttcttatctgtgctgcggtgctggtgtatcgcggcaatgtcatgtcattttttaaagcggggtga

SEQ ID NO: 292145 - DNA, 213 bp, Morganella morganii; identical to SEQ ID NO: 278661

SEQ ID NO: 292146 - DNA, 213 bp, Morganella morganii; identical to SEQ ID NO: 278662

SEQ ID NO: 292147 - DNA, 591 bp, Morganella morganii
atgtcatgttttgaaacggttgttgagattttcagatacgtagggcgtcctgaatttgatgctattaataatcgtttttcagcaactatttcttatgatgcttatatatatcaacgcttagtttctttgcaatcctatgacgcatggggagaaattgaagagattatcattgatgatttggatataaatgtcgatgatcgcattcccgatgaaggaacatcaataacactgacaatctctatatcaactggatctagtgagtcattttttatcaatgttaaagatctaattctaaagtctccaatgttaaatagaggtactttgagaaagtctttttacttggttgaggaagatttttattttaatgaaggaatagttgagggattaggaaaaataccagaactatctgttttaaagaatctttgtgatttcattttatgcctatcaaaagttgcacactacagcaatagtaaaagtgatgatataagccataagttggttttcttgaaaaatactaatgctaagtcattacctttaattattgaaaccctgtctcttatacacatctccgagcccacgagaccgtactag

SEQ ID NO: 292148 - DNA, 573 bp, Morganella morganii
atgtctgattatttagcaaaaacaaaagcacagtgttcaataataaactccctagccttccctaatgttctaaaaaacgtcaatgatatatatattactttgactatctccacattagactcaagagatagcaatgaatacacgattgataatggttactccttcattaataaattcaaacatactttaataattgataatgcagggatgggcaagtccaccctaatgaaaaaaatagttattgataccattgataaatctgaatatatacctatctacattgaattaagaactcttgaaaacaagtcgatcacagagcaaataaataaattaataggactagacagcatcgacagtgatgatttattgaaaaaaataccttttatttacttttttgatggcgttgatgaaataccatttgatataaaaaacgatatcataaaaaagataaagatattcagtgacgaaatgaatgattcaaaaataataataacatcaagaccagaccagtctttacttgagttacattctttcaatagattcaaaataaagcctttagatatagaaaaatga

SEQ ID NO: 292149 - DNA, 249 bp, Morganella morganii
atgctgaccatcgacgccagcaccgggcagaatgcgataagccaggccaaactgttccatgaagcggttggcctgaccggtatcaccctgaccaagctggatggcacggcgaagggtggggttatcttctcggttgccgatcagtttggcattcctatccgctatattggtgtgggcgaacgtatcgaggatttacgtccgtttaaggcggacgattttatagaggcactttttgcccgagaggattaa

SEQ ID NO: 292150 - DNA, 1446 bp, Morganella morganii
atgaagcttgaagcagttttatttgaccttgataacactcttgtaagtacagataagctcaaaggtatcagagaacgtggcgcttatgatgagcttacaacagaactactatcctctataaaaccctataaaaatactaaaaaattaatagaagctttaatttcaaaagatattaaggtaggtgtcgttacaaactctagccgtcgatatgctgaaataattcttcagcaacttgatttaccaaaatttgatacacttgtgacttatacagaagttggagcagcaggaattaaacctaatcctacaggtataaatttagcgttgagtaacctaaatattacacatccagagaaagttatttatattggtgataattatactgatattattgctagttattatgcaggggtaattcctattgtaccgtcttgggcgtcaagaatacctgtatcacaggtgccggcggcagttttaagtagtgaatttctcattgatgagtgtgatgcacttgaaaatataatacttatggcagaaaaatgtgctgaacatgaaaatttcgtgtttccacgcaagcgtttctattttgtacccttagatgaatctgccaatgtaatccctgcaagtgatactctttcaacaatttgtcttgggcgatatttctctcagaaaagtattattacaacaaaacttcatgatttacacccactttatattgagattgcaaaaaaggaacatgatgatcgctatatccctcccgcatattggagtgatattcttgcacatgctgcggataagattcctggcttttttggttcgaaaaatgggtttgatatagttacagtaataccatcaaaaaaggaaaaggcaccaagactggagattgttctggaaaatgcagctggtaaaagtaagtcatcatcagtgtttataggtgatctttttgtttttaatgatggtgcccagtcacttaaaaccttaccaagagatcagcgaactgttgagattgaatcatccttgcaccttaatccaaaatataaaggtaagcttggaggtaagtcaatattagttttcgatgatgttattacaacggggtcaaccttaaaaagagcctattcgcttttgcgtactgaaagtgttaagcatagtttaggtctttgtttagcaaaaacagtatctatttctgaggaagaacgactttgtcctcaatgtcagtctcacatacttagaataagaagaaatagttcaaacggcattcgattttgggggtgttcaggttataatgatatttgggataaatgtggatatacagaaagttttattgaaaaaaaatgcccgagatgcaatagagatatggtaaagaaatttaatagaagatcaggagtcgtttttttatcctgtacgggatttaatcaggaacctaaatgctatcacactgagaatgagtga

SEQ ID NO: 292151 - DNA, 1701 bp, Morganella morganii
atgacaaacccaatcataatcagcatgactacctttttttataaaaagctatttccttctattattattggaataatactttcagcaataattataattggaggctatgcacaacatattgtgtttgcttatttgaatgggaatacttcatattatctgcatgacatatatacttctttcccaacatacttccaattcttaaaagaaaattcctttgaatatctattagttggtatactaatctgcttgcctaccctatacgtaaaaaaaacccgaagtgttttttacactggtgttttatcagttacactagtattgtctctatcagacatcatcttaattatacctgacccagatataaacagaatgcttgaatccattgtatcaaatataattggatctccaatactaagcgcactcaatatattattcataaggatatatcatgaaataaataaaataaacactaactcattaattaaattattttttcatgtgatatattcatctctgtcttaccttattattgttttaatttgttacttattactatttgcactggacaaaccatcacccatgacattcaaagttaaattaaatgatgagttcagaggtgtttataaaaaattaaaaaataatacacaaccattttcaattggtgaaaaaaatagagttagcaatggtgattttaatttttatggtaacataaagaaaataaatttaattaaaaaaaataacaatataactataaagttagcatttttcgaaaactgccaacctgataacgaaacaaaaattccaaatagcagttatatggaatttatgaatgtggataatttcacaataaattccagcttattcgaaaacatgatcattgctaatttttatagtaataaagaaacgtcaagttattctattagtgattcaaatgtcaatatttttcactataataacaatacgttatcagtatttcctcacaatgaggatgaaaaacttatttacactctaggaactccaagcactaaattatttctttattaccctccgcttatgaatgattcaaatgaaaatcacgaaaaaataacctttaacatcaaaatcaacaacttagataagagctttaattttatagcacgaagactgaagcatagttattttgataaaaagatacaatgcagatggattaacatcaaagaaagcaatggaaaaactgtaaacttagatagcagcattatatttggtgttgctgtaatcataaccaagaacaatgattcatatttttatatggattcatctaattcagactcaattgaaatggaaggattttccggaacaatccatttaaacgatattgaaaataaaaaaataaacaactatataaaaaatgggactgttaatttcattcagcttcaaggagtatctagccttattttaggaggtaacaacgttgatataaataaagattcaatgttggtaataactggtgggaatatatctggatactttgatgataacttaattttctatggtgatagtagttatatttatttagacaatgagagattaaataaaaccttatgggaaagattagattcattttcagctataatcacagcactaggtggtttacttttaaccggattaatatatttatctagaaaattcattaaatcatataagaaaaataaaaatttaaactaa

SEQ ID NO: 292152 - DNA, 306 bp, Morganella morganii
  misc_feature (239)..(248): n is a, c, g, or t
atgagtgaactcataacaaaactaggtatgaacatcttatctaacgataatttctcgaaagatagaaataatattttcgttcagtatgtcgagcaactatcaggaaaaaaaccacaactagatagaaggttagttaagcgtatatcaacatctattcagatattttataaaagcaaagatgagaaaataaggaaggaagcaacagcattgcttgcaatgttattagatattgcagggcnnnnnnnnnnccaattgcaaaaaatatcttcatcaactctggagactttccgaatgtctcattgttaa

SEQ ID NO: 292153 - DNA, 1296 bp, Morganella morganii
  misc_feature (570)..(612): n is a, c, g, or t
atgaattttggcttaaatactagtgcaagatttgaactaaaaagagagatgaattcagtaaaagaactttcttttcctttgactgattttcagagagcactttggggtaatttagattcagatgaagacattgtaacaattgctccaacatcagcgggaaaaacacatataattcttacttatttggtaaataaaatcatcaggtctgatggggcatttgcagcaatcattgttccaaccagagcattgatatctgaagtatcaagtaaggtttttgaaatatccaaagcaattgatacagaaaacgaactagaaatatgtacagtccctaaagatgatgcatttagctataagacgatatttgttatgactcaggaaaggctatatgaactaattcagcaaggtgatctcagcttcgactatttatttattgatgaagcccataatatttctgatgagagcagaggagtattattacacttaaccttagaaaaaatacttgatgacagctcccctcaaattataattagcatgccatcagaaagctaccaaaatacattttctgctgtnnnnnnnnnnnnnnnnnnnnnnnnnnnnnnnnnnnnnnnnnnnatcaattttcataaggaaattacaaaacactccccagtcgctaaaatacttctttctgtagaaatgaaaggccgaaatattgagattaaaagattcaatactcctgataaagttataatccccaaaggctttactggcacagcattagcggacgttgttttaaggctaggtaagggccaaagcaatattatctatcgaaatcaaactgatcattgtgagaatacagcaaaatcgatagcatcacttattgataactacgaaacaacgctgggattggaagaggccgcagattatatagaacaatttatccataaagattttactcttgcatcaaaccttagaaaaggggtggcattccattacgggcccttaccaagctcagttagagttatggtagaaaatcttgtaaaagcaggagatattaattttattgtttgtactagcaccttagctgaaggtgtaaatttacccgcgaagaatctatttctcacaaaccccttcaggcccgttatggctcaaaaacccgtaaggcttgaggatgtaaagattagtaatataacaggacgagcaggaagaatggttgaacatttttcaggaaatattttcttgataaaccacgataaatggaactatcatatctgtaatatctgcattacaaggcaattaccctcactcggattctaa

SEQ ID NO: 292154 - DNA, 213 bp, Morganella morganii
atgccacggaaccctttagtgctgatcatcattgctataatcctgctgacggcctgtctgctggctgttatctgtattcactcgagagtcactgtaagccgcagccgggtaatccgctggacggtgttattaactatgagtgtgaagcgccatgaactggaaagaagcggtaattgctgcgctgtttattgctgccgcctggtgggtatatga

SEQ ID NO: 292155 - DNA, 645 bp, Morganella morganii
atgactacaaatcatgaaaaattaaattctgaaattaataatataaaaaaacatttccctaaaaataatgcagagagattttttatccaagaggtactgcgttttcactcaatatcaaacaccttgttaagcattgatataaacctcactaaaaactgctccgttgatgaacgatacttttctcatactctaatccgaaccctattagaaaatttctttgttattatgtatatatttgatgaagataattatattaacaacagatatgaagaattagagtcttcatttaaaagtgactatcgaaaacttatgaacagtatcgcagttgagccttgggcaaccacactcagcaccaattccctccagttagaaccagttgacccaacctggaagagtcaaaaagaactcccgaacgtacatgacatgttgttaaaaatcaataattcccaaggagataaattaaattacctttatgtgacttaccgaatcaccagttttgatattcatggcagaagccttgaagctatttttaattctgtgtttcaaaaacaatgtaatttccctgtgcttgatgtcaaatatgcatttgaattgatagcaagcgagtatctgtctaccttacaaactattggcgcaatcacttga

SEQ ID NO: 292156 - DNA, 429 bp, Morganella morganii
gtggacccgtccgattttccgttagagtctttccgtgccatctataaggcttttgccgcagtgcctgatgatgaaatttttatcattgcactggaagcactgaactacttttccccctgccgtggtgtctgcacaaattcagcgtggatgctggttgtcgcgcatatgctcgatctgaataagcggattgcagacggggaatcaccgaccggtgtcgtgaccagtgtcacgatagataaagtcagtgtgtcctacaccgcgccgcctgccggttctgactggtcgcactggttcaagatgagtacctacggccagcagtttctggcgctgatcaaacgatgcagtgtaccgcgttaccacggcggtggcggggaacgggccgcatttcgcggagcctttggccgattcacacggggaggtcaccggtga

SEQ ID NO: 292157 - DNA, 294 bp, Morganella morganii
atgaaaatcataccactgaatgcggctcccaatcagcgtctgcgggttaccctggacggacgggaatgggagctgacgattaaagccgcacggcgtgtgatgtgctgtgatatccggtgtgatgaccgggtgattgttcagggaatacgtattgttccggggcagccgctgataccgtaccgccatctcactcacggcggtaattttgctctgctgacagagggggatgaacttccgtggtgggaactgtttgaaaaaacacaaacactgatttattgggggagcgatgattga

SEQ ID NO: 292158 - DNA, 237 bp, Morganella morganii
gtggtaaaagcggatgcattactgaaatataaccactttgataataaactgaagacaacattcactaacggttatgatgtcagcagcgacaattactccacctctgtctgggggatggcgctggaaaccggttatacctttaccttcagtaatcagatctttatcacaccttacggacagttagcgtataaccgtatgggcagtaaagatatcaccttacgcgtcagtccgcagtaa

SEQ ID NO: 292159 - DNA, 324 bp, Morganella morganii; identical to SEQ ID NO: 287809

SEQ ID NO: 292160 - DNA, 396 bp, Morganella morganii
gtgaccctgaattttcaggcaacggataaaaatatcggtaactggtatttctgcggtccggcgctgaaacaggttgaacggctgcaggaagccggaaatgtgaaagcgttcattgatgatgatgtgctgtatgtcaaagacagtgataaggcactttccggaagactgcggatcctcagtcagaaaagcggcatggtcggtataccgaaagccacggagaagggggttgatgtcacttaccttatcgacggggaatcctccctcggcggcatgctgcgtctggacagcaaatataaccccgccctgaacggggattacattatcgagcagctcaaattcgatattgcttctcacgacgatcctttcttttatcaggcaacctgcaaacgggcctga

SEQ ID NO: 292161 - DNA, 273 bp, Morganella morganii
atggtcattgccggtgcggtcaccaaagccgtggataacggcaccattctcgccggtaaaaccttaacggaagtacagaaaatcgcggtgacggatgcgtccggtgatgatctggcctggcacgatgtacaggacaaagggtactggtacaacgcacagattgttgaaagtaccggtgagagcgggttaccggagtacgtgatgaaatacgtgctgatttacggtaagggcgactgggtgcggaaggtcgaaggttcacacaatttagtgtaa

SEQ ID NO: 292162 - DNA, 315 bp, Morganella morganii
atgtttttccctgacacgctcaaaggctgggtgatcgacggcaaaaacgcggacgcactggtggtgcagtcaactgacggttctgtgtgcttatccctgcataatgataaagcagtctttgacggcccgaaatttatctctaatgcgccggaaaacgaatttaacggcaatgtgatcgtcaacggcaaccacgccgtaaacggtaacagtgaatcaaacggcggcactatgacgcataacggtaaaaatatcgggtctacccataaacattcaggtgttcagggtggcaatagtgattcaggagagccggtatga

SEQ ID NO: 292163 - DNA, 315 bp, Morganella morganii
atgtttttccctgacacgctcaaaggctgggtgatcgacggcaaaaacgcggatgcactggtggtgcagtcaacagacggttctgtgtgcttatccctgcatgccgataaagcggtgctggacacaccgttgtttgaggttaatgcaccggaaaccatttacaccggcaatgtgacgattaacggtaaccacgcagtcaacggcaacagtgattcaaacggcggcactatgaggcataacggcaaagatatcggttcaacgcataaacacagcggtatccagcggggtaatgaggattcaggggagccggtatga

SEQ ID NO: 292164 - DNA, 1491 bp, Morganella morganii
atgcaactacatgattttggtttcgttaattatgcagtgctgtttggttatttagcagcaatgctactcgttggtgtttatttctctaaacgccagaaaacagcagatgattattttcgtgccgggggacgggttcccggttgggctgccggcgtttctgtctttgcaactacattaagctcaattacctttatgtctattccggcgaaagcttatacctctgattggacttttattattggccaatatttagcgatcgccattttgccattagtattttatttctacatccctttctttagaaaattaaaaatcacctctgcttatgaatatttagaagcccgttttgatatacgaagtcgtttattcgccagcctgtcatttatgttatttcatattggtcgaattgcaattatcacttatttgaccgtactcgcattacgtcctttcatagggatagatccgattatattagttgtactgattagcctgttatgtattatttatacatggatgggagggattgaaggtgttatttggactgatgtcattcagggattattactttcaggtggtgctgttttaatctttatcatgatctgttttaaagttgatggaggaattagtgatatttttaccacaacagcacaggctgataaatttttcccagatgcacagttacgctggagctggactgacagtactattcctgtattaatgattggttttttatttgccaatattcaacaatttactgcaagccaagatgttgtccagcgctacattgtaactgattctatcgaacagactaaacgtactttaatcacaaatgctaaattagttgctgttattcctgttttcttttttgccattggttcagccctgtttgtgtattacaaacaaaatccaggtttgttacctgaaggttttaataccggaggtatcttacccttatttattgttacagaaatgccagtgggtatttccgggctaatcattgcagctatctttgccgctgctcaatcgagcatttccagtagcttaaatagtatttcaagttgctttaattctgatatctatattcgcttaagtaaagttgaacgacgttcagaacaaaaaatgaaaatcgccagattagttataattattgctggagtattcagtagcttagcaacaatttggttggttttatctgacgaatctgaaatatgggatgcttttaacagcttaatcggtttaatgggtggtcctatgaccggactatttatgttaggtatttttgttaaacgtgctaatgcaggtagtgcggtcgcaggcattatagtaagtatcattgctgtattagcagcccgttatggcagtgaccttaactttttcttctatggtgtaattggtgctatgtcagtagttattgttggtacaattactgcgccatttttctccgcagcaaaacaaatttcattggatgatagtgaaatatccgggaactaa

SEQ ID NO: 292165 - DNA, 1215 bp, Morganella morganii
atgtatttaccatcaaaaaatcttcatgatattttaacatcagaacaagttggagttttttgtgagtctaattcttcaggcgataaagcattagtagcaaaattacctacatcagtcatcaaatctatttttcttggtgctaaaatagagttttatctatttgttaaaatagcccccccacataatattgcattggccttaaaagtatttgataataaatcatcacctttccacgcgatacttgttcaacgttggagtaatcacaataatatttttgatgattcattcttagactcagatatccacctatctttattcgacgagactgacgcgagcgttgcatatggaacaataaatataaaaacaaactttagaaataaaagagtttataacataattgaaaattttgaattttcttcagcaaatagtcaactagataacataaaattcacggattcggtatgtgcttcattaggctctgatgatgccaaacatccgggattcaaagtgttaaaatttcactttcccgttaaggttaaagagcttgagactatcttcacacatcatgtaaataatcaaggctcatcaagttatgaagtggccacagaaattgatggtgcgcgccaggaacgtcagatttatcaggcactttgcctgatggataactcatcaacgaccttgtctccattggtaacaattggaaaaaaggaaagagaactaacagatgtattaacttgttcgctaaacaataacgttattgcgattgagtctaaatgcctacaagtagacgtatcgaccctagataaatctcgggaacgtgcttcatcgagcatgattaagcactgcaggaaagcaattaatcagctggaaggagtgtataaggtaataaacagaggtgaggaaatatataacactgctggaataacactcctgcatggtagcaattatgatttctatggcatagtcctaatagatgaatatagagagtcaagagaatggcctgaaataattgagttaatagaaaaagtcagcatgcgacacaaaatttgtataaatattatcagcgtgccagaaattatttacaacatgaagttaagcttatcaaatactaacacgttcattagcatgcttcaaaagcggcatgagatatgtttaaaaaagaatagtattaatattaagttcattgactcatcattaccaactatgattgattga

SEQ ID NO: 292166 - DNA, 1056 bp, Morganella morganii
atgaaaaaagattttttttctccttgtgtttctcctgaaaggatgcatcctaattttatcagtgtattagaacctgattatgaaaatgctcgtaatctttttaatcaatggtcggatggtttcctggatagagataataaaatagtaacggagtttcaaactacgtttaactctacattttgggaggtttatcttcatgctgtttttaaagagtatggttttaagaccgatttttcttattcatctccagatttcttaatatccaatggttgtgatagcgttattgtggaggctacaatttgtaatgcatctagcggaaatatacctgagtgggaaaaagtaattattgaccagggtggaaatgtatgtattcctaaaagatttgacaaaataaatagagaagcaatggttagaatttgtaattcattaaaagctaaagaaaaaaaatatgtggataactattctaaacttgcgcatgtaaaaaacaaaccttttgtaattgctattgcaccattcgagcaaccatatttcaatatgcaatatgacagagctatatgttcagtactttatgattattatgtaaatgaggacttatatcttgataatccatctaaatatccagatggaccacctgaagaacacttgggatatataacaaaagataatggtactgaaattcctttgggttttttttgtaatcgtgaatatgaaaatgtaagtgcggtgatttttaattgcaatgcgacttttggtaagcttcaagcgctggcaaataaagataatgataacgtaattataatttcaacttgggcaacaagaccaaaagggtttataactccttttttatcaaaatcatcagagtattttgaggaaattcatgatggattaatgatttttcataatccttttgcaaaatatcctgtgtcagtggatttttttagaaaaaacagagtggtacaaatatattcaagtgataactctgattatctggaatctgagaattatgatgattgtcttcaaacacgaaatgttcaaacatttcctattaaatcttga

SEQ ID NO: 292167 - DNA, 162 bp, Morganella morganii
atgccaagtaaagaaatcatccgaagtcataccgtggatttagggacattaaggcgccaacttagccatcacccggataatacccgcgtatctttcagcggactggattttcgctgtgtaaataaaacggatgaggatgttgttcagattgagtttgaatag

SEQ ID NO: 292168 - DNA, 321 bp, Morganella morganii; identical to SEQ ID NO: 67344

SEQ ID NO: 292169 - DNA, 228 bp, Morganella morganii
atggaattattagtcgaacgctatacctcgtatgatgtaagctctttatcggacgttttagcttgcttcgcagctaatattgaagatgcatttattacctgcggagcgaccccgggaaaagattatagttataatgatttaatgaaattagcccttacccatcttcataaaacagaattggggcaaacattttattcaaatacaacaaaaccctcggcggttaaataa

SEQ ID NO: 292170 - DNA, 330 bp, Morganella morganii
atgacggagtacagaataccactaggggaaattagtcgttcagaccttgatggaattaaagatttatttgagcaaaacgaaaatttatttaaggatagtattttagccaaatttgttggagatgatcctcgttatgattattgtgatgggtcgtttaacgtaagtgatattaatgaagaatatatgtgttttacagcaacagtatcttattatgccggttgtaaggatatgaatactgaacacctatccgaaggttgtatcagttacgaaataattgataatgaaattgcttttgagttagatgagtctacttggttggtagataattag

SEQ ID NO: 292171 - DNA, 552 bp, Morganella morganii
atgaattacaagcaagcaaaagaaaaagttataaaatttagagttttcgggttagttttgttaattcctagtatagcaaccttcgtagtttcgcttcttaaatcgctatacattttcggtaaaacaaatgatgatattataggtttaggccgagctattagtaacttgatagctaatatatatcacactgactacttccctaaatctctatggaatatatcgccatatgttaaacttgaagacccatttagtcttgacaatataaatttcttcgttatctacatggtgcttattgtgagtgtttcacttttgagaaatgcttctgttttaagtcacaaattaagtaaaatagatgaagatataaatatagagcaaataaaacagtcacgacttggaaattatgactttaaagctgaagacacgaaaaatatagccaagctaccagaaaccacacaatcatttttcaatagcctattaaagtcgatattgatttacttagttgctcctttagtcgtgggtattatcttaatttatttgaataaaatattatga

SEQ ID NO: 292172 - DNA, 192 bp, Morganella morganii
atgaggatcatttcagcgcaaaagaaaggacatgcctttactgtcagatatacagctatcaaggagctgggagtaaaccggcacacggtcaggaagtttaaccgggacgcccagtgtgaaagacatgttatctgtaacggcgtgctgatgaccaaaaccaagatgaaaggcaatcagaggaaagagcaatga

SEQ ID NO: 292173 - DNA, 600 bp, Morganella morganii
atgtataaacaatatcggcgtaaatgcaaaatatgccataaatggcatacccctgaatttaccaatatagaatggtgtagtccagagtgtggggtaaaattagcaataaagcgacgaagcagggaaagggaaaaggccgaggccaaattaaaaaaggaacagcagcagaaagaacgtgaagcaaaagataaattaaaaatcagtaagttagcagtaaagcacctctcatatttcgcaaaacaagcacagaccgcattcaacgcatacatccgggaaagggacaaagaccagccgtgtatcagttgtgggcgtcaccacgcaggtcagtatcacgccgggcactatcgaaccaccggagccaatccggaactgcggtttgatgaggataacgtccataagcaatgtgccccatgtaataaccatctatcaggaaacatcgaaaactacacaccgcggctgattgagaaaatcggccaggagcgtttcgaccgcctgatgggtgcgcatgagttgccgaagtggaagcgggaagactacgagcgcatccgagatgagtaccggcggaaactgaaggaacttaaatcattatgttggagttag

SEQ ID NO: 292174 - DNA, 306 bp, Morganella morganii
atgaacaatggaaaagatgaatcatttccaattaatggtgatttttcagagtctgattttttgatattgaaatcaaaatgtaaggatattgaaaataagttgaataatatccatggccctcaggatggtgagcctgttacttatacttggaatcctatacgtgtttatgtcaatagccacgccaaatcatctgacaatactatttttaatgtctctattgctgttcatagctcatacagaattgctgttgaggcaaaaaaatatttgatggaacttggttacgatattgggaatataaaaaattaa

SEQ ID NO: 292175 - DNA, 822 bp, Morganella morganii
atgaatgataaaagtctaatcactgatgtgataaaacagcatactgtacctagatttttattagataattttggcttttcgaataaggggaaaagaaagcagttacatacttttgacaaaaaaagtgatcgagaatatcagcagtctgtgtttgacgccacaacaagaaatagattttataatattgataatcatccagaaaaagcaagtttagaacccttgttggggatatatgaatcaaaagcggcgccaattttcaaaaaattaataaaacagcgtaatatcaattccttatctaaaaaagacaaagaaaagctggctatttttattgcaatacaaagagcgcgatcgtatggcgaattagaaagaatgaaggttctaattgatggagtttcagataaactcgtggcgataggagcaacaccagagcaaatattaaagtgctttgaaatggattccctcgaagaaattcaacacgttttcttacgaatggttatcacctcacctactcaagctaaaatattacttgataaagattggtatctatatgaaacaaatgaagacaacccattctatatatcagataaccctatttcattttataactcaaacaaaaactctcattatggaaatataggactaaatgtaacaggaattcagatatatatgccaatttcacccactctgtgtttagcattattatgtccatccattaagaaaagttattttgatatatttggcaaatatcagaaaataaaacaaaaatgtagcgatatcgacagaagttcaagatactgccaatcgcgccaaaagattcattag

SEQ ID NO: 292176 - DNA, 216 bp, Morganella morganii
atgaacattgaatttgaatgcgaaagtttttcaggtgtagcgcgggttagcaccggcaatgttttacttcaggttaatggcgccacactcaacgggtgtgttgatacttcggacattatcgaagaatactccgtggaggtgcttctcgatgtgatggacgatgccgatattatcaaatatctcaccagacagggctacacagtaaccgatgaataa

SEQ ID NO: 292177 - DNA, 933 bp, Morganella morganii
atgaatctattacagtttatagccaatggactttatctcacagaggatgaagctatgcgctatatcgttactattcctcgaagatacaagaaattttatatacgaaaaagaaatggtatcgattatagattaatcgcacaacctgctcgtcaggtcaagtttttacaaaaagccacgttgaagtatatggggaaatatttccatatccatgagtctgcatttgcttataaaagtggaaaagatatcagaaaaaatgctttagtacattgtaataatgaatatatattaaaaatggattttaagaactttttccttagtataaagccaattcatttaaagaattatttttctagaatggggattactttagatgaaaaagatatttttgttttggaaaacttatttttctggaagttgagaagaaatagccctcttagacttagtattggtgcaccatcttcaccaatgctatcaaatgttgtaatgtacttatttgacgttgaaattaacaatcaatgtgaagcattagatgttacctatactaggtatgcagatgatttaacttttagttctaatgtaaaaggtatattgtttgatattccaaagatagttaaagaagtactaacaaaagttaatatgaagggaattaaaattaatcgtgaaaaaactgttttttcatcaaagaaatttaatcgccatataactggagtgacaattacaaataatggaactttatctttgggacgtgaaagaaaaagactattaagaagtaaaatacatcattatatctgtggtcttcttcctgatgtagagattttaaaattacgaggggaactcggatatgcaaaatttatagaaccaaaattttttgaatcaatgatgagtagatatggatatgaaataatagagtcaatagctaaatatgggaattaa

SEQ ID NO: 292178 - DNA, 984 bp, Morganella morganii
gtgagtgattctgcttacatgaattcattactagagcagtttggtgacttagttcactcaaattttactgttcagtttatgccgccgataatatttgtctgtggtggtccaatgaatgtgagtcctatgagtgtaagagattattttttttcttatgtagcaagccatgctcctaacttgctagattcactcattttagcagaagattttaaggattattttaaggatggcgcctattctgatttaatgagtttcgaggatgatatagctaacatatcaacgttggtaattatctgtttagaaagtgccggttcattagttgaattaggattgtttgtaaacaaaaaaaaccttgctcaaaaattacacgttattgccccatttcatgaaattgaaggtgaccccagtcagaatgtaccaccaagatcttcatttatatacttggggccactggaatacctaagaagtattgatcaaaattcagtttcggtttatccctggcctgatagaaatcgtctaaagtatgatgaagtagaactaatttatcatgatattcaaggacgattgaaaaatgtaaaaaagacagaaagatacaatgaaaacaatacagggcatctggcaattttaatttatgagatcgttttactatctgagccaattaaaaaaacagaaattgagtgggctcttttatgtattggtattgatgtttctcaaaggattatatcacggcttctttatttattaagtaaaatgaatttggtttcgtcaatatcatatagtcgaacagattactattatatcattgggcacagagaaagtaagattaaatttggcataagtaaatacggaaaagtgaaggactcgatgactataagaattgctattaagcaatcatatgtgagtatggatactaaaaatacagatgaaaccgctcggaaaagagaaaatgtattaaagcacataagtaagcttcgggaggaataa

SEQ ID NO: 292179 - DNA, 411 bp, Morganella morganii
atgtctgataaagcgaatttatcgccggatgatacaggcagtatcgtcaaaatggccggggtctttgtggttaatacggcgcatgaaggctaccgccgtgcggggcttattctgcacagcggagagaacacactgccgccggtctccgtttctgttctcgaagcactcaaagctgacccgcgtctcgttgttacggttatcgcggcagattctgacagtgacacaccggggcggctggacaatcagggttcatttgccgcgatagaacaggaacttgagcagcagagactggctgatgaaaaacatcatcaggaagctgaagctgccgaacaggcacgtcaggccgaagagctggctcgtcaaaaagctgaaactgaaaagcccgcagcaaaaggccggggcaaaaaatga

SEQ ID NO: 292180 - DNA, 414 bp, Morganella morganii
atgtcattacctgatttgccgacatcacagaataaataccaggctgtgctgtttgccagagaatatgcgaacagcatcagaaatcatccgcgcatgggtcagatcagactaaaccgcattaaagcggcaggtatgcaagcccctgattggtttattcgtatggtagatatagagatagacaacattctctatcgactggactacctggctcactggagcgatgacagtgacccgctgtgttatgcaaaagataccgagcagttcatctgcgtgacacaggatatgttgctgaattttatcaaacctgaacggatgtatttcaaaggtatcaaacgtgccgaagaatggattgctgaaactgaaaggggatcggttaaagtggacacccagaaagaaaataaatccataaattaa

SEQ ID NO: 292181 - DNA, 747 bp, Morganella morganii
atgaggtatataggtttggttgcgtcttttttgatattagcaaccttagggttgtactattatcaatttggtagaggctcaagcattctttctgaaggtaaagatatatgggggcagtttggtgattactttggcggcgtactcaatccgatattaagcttcatttcaatactacttctaattaagtcggttagaatgcagttaactgcaaatgagtgcttaattaatgagacgaaaaggcaagaggttcttgacaaaaggaaatccttcgaatttcagttttataatttaattgaagcgcaaaaaagcggctttgatgatttttctttgattttcccatctccgaatggagatgtggaaattaaaaaagtaaatgcaataaataaacttgagcaattgattaaaacaagtgtccatagaggtattacaggggcggccctagctactgtaattgaatcattagatgataagtcggatgataagatgttttcgtttgcaagaaggttttatcttgcggtcaaacttgtggataatgaaattattactgaaaatggtttcgatgcgcaggataaaattatgtatatcgaaacccttgttaatctgtctgattttgcaatggtgcggctgatttgtattattattacctatctttcatggcctaacgttgattatttaaaagattcaccagaaatgaggaaggttatagattcaacaggattgaaagcatatattgattcattaaaataa

SEQ ID NO: 292182 - DNA, 816 bp, Morganella morganii
atgaaagtaagtcttgatttagttataaatagtggtgaagacgaaattgacatggattatgctctcctgacattatcgggggcatcaggcgttaccagtattatcacagaggcaatacttcgaggaaaagttaaagaaaacagacatcaaagtaatgaaataagaaccaatctaaaacattctttcaccggatcttttggtcagtgttttgatattgtaatatcagataagaaagttgcggctcgtcttgcaaagatgactcgatcagtattctctgaagtgatgagttattatatttatgagtctctttttttagagggaccagcattaagcaatgctgcagaaaaggtaattactgggttagaagatattgaagatgagctaactaaagccattcggaatagacttaagaatatgcataaaatttccacgatgtgcaattattcagttgatttaaattatagaaaacctggtggaaaacaaaagatagctactctaaataaaaataccgccttgaatattactgagttaattgaaactgataatgatcatcatatagaagctatagttacacgctttaatatcttcacgggaaatggtaggttgctagttaacggagaagaaaaaacaacttcctttggatttctgaatggattaaagtacgtaactgatgctcaaactaagaagataactaataatctaaatattaataatagattggcagaagaagaaagacaaaacttatctttaaaggttagagatttagccattagtaatggcgaagtggtgaaatacttaattattgaggtggattaa

SEQ ID NO: 292183 - DNA, 171 bp, Morganella morganii
atgcaaaactatgcaccttatggatgtatgacctatttcgttaagaatagcgggatttacggggactttttgactggtgactgcgcggccagtttggcttgtcaggcttgtatgtccactttcctgaataatttgactccggaagaatactggttgttagctgaaaattga

SEQ ID NO: 292184 - DNA, 213 bp, Morganella morganii; identical to SEQ ID NO: 281177

SEQ ID NO: 292185 - DNA, 2232 bp, Morganella morganii
atgccacatgatgagataaatcctactgaaggtgagtttgtaggaaaggaaaccgcacaagagccagcggtgaatgtcacacatatcacgaacaatgtagtgatccagcagatggacgtttacacggagaagcttgcccagccgagcggaactactgttgatgaggcttctatgctcagcattgacgatgagttatctcagcatgccagcatggatcttgatgcccgtctgaatcgttactttaagggtaaagttgtccgtaaggatttgaccaaacagctaaaagaaggggctaatgtccctgtctatgtactggaatatctgctcggtatgtactgtgcttcagacgatgatgaagtggtacgtgaaggtctggaaaacgtcaaaaaaatcctcgctgagaactatgttcgcccggatgaggctgagaaagtaaaatctctgattcgtgagcgtggtagctttaaagtgatcgataaaatcggagtaaaactcaaccagaagaaagatgtctacgaggctcagctttcgaacctcggtatcaaagatgccgtgatccccgccaacattgttaaagctaacgagaagctgctcaccggggggatctggtgtatcgttactcttaactatttttatgaagaagggcaaagaatttcgcccttctcaattttcaaccttaagcctatccagatgccctccatggatatggaagagctttttgcagcccgggctaatttctcaacagaccaatggctggataccctgatccgctctatcggcatggagccaaccaatctgaagcaacgggtgaaatggcacctgttgacgcggatgatcccctttgttgagaacaactataacgtctgcgaactcggcccacgtggtaccggtaaaagccacgtctataaagagtgctcgcctaattcattactagtctcaggtggccagacgacagtcgccaatctgttttacaacatgagttcccggcaggttgggctggtaggcatgtgggatgtggtagcttttgacgaagtggctggtattaccttcaaggataaagatggtgtccagatcatgaaggattacatggcatcgggctctttttcccgtggccgtgattctatcgaagccaaagcatccatggtatttgtcggcaacataaaccaaagcgtagaaacgttagtcaaaaccagtcacctgctggcacctttcccggaagcgatgatcgatacagccttctttgaccgtttccatgcctatatcccaggctgggatatccctaagatgcggcctgaattttttaccaataactacggtctgatcaccgactatctggccgaatatatgcgagaaatgcgcaagcgtagcttctctgatgctgtcgaccgcttctttaaactcgggaacaacctcaaccaacgtgatgtaatcgcagtacgccgcacggtctcaggtttgctcaaattactgtatcctcatggtgtgtttggtaaagaggaggtacgtccttgtctcacctacgcattagagctacgtcgtagaatcaaagaacagttgaaaaaactaggcggcatggagtttttcgatgtgcatttcagctatctcgacaacgaaactctggaagagtttttcgtcaatgtacctgagcaaggcgggagccagttgatccccgaaggccagggcaaaccaggagtggtacacatggttaccaagggtgttactggtcaactgggcctgtatcgcttcgagactcagatgacccccggtaatggtaaacacacaacatccggcctaggctccaatacaccagcaaaagaagccatccgcgtaggttttgattatttcaagggcaatctgaaccgcatcagtgctaccgccaaattttccgagcatgagtaccatctgcatgccgttgagttacataactcaggccctagtaccaaaaccagcttggcagccttggtagccttctgttccattttgatgggcaggccagtgcaagaacagatggtcgtgctcggagatatgacacttggtggtgtagtgaatccggttgaagatctggcgggtagtttgcaactagcaatggatagtggaggcaaacgcgttttgctgccgatggcatcagcttctgatatccctactgtacctgctgaaattttctccaaattccaaatcagtttctatgcagatccggtggatgctgtgtataaagcattaggtgttcaataa

SEQ ID NO: 292186 - DNA, 2604 bp, Morganella morganii
atggatatcactcagcttcaaaccgggctaaacaacaaattcaccgcagatcggattgttttctggcacgacccagaacagagctttactgcacagcttacagagctcgccatactgtggaacgggttgccagtaacagtgctcaatatggcagagcagtcacagcttcaaactcgcaaacgcattgaaatcgatgaacccacgcaggggttccttctctactggcccagttcagaaccatcaccagctaaagactggttgctcgatatacgtcgttatagcaccacgttttatgctgatgcagcctcaattctgcttaatgacctcggcctcgccaatatggcgctgcgcgaccacatcgcgtcacgtaaaagctttttcgccaacaaggagcgtactgcagcctttaaacgtcgcctggacggccgtggcggcatagaagatccgctatcacttgatatgaaaatgataagtgtcgtgctgacctgtcatgctcagattgccgaaataatgaaaagcattggcgatcggttacttgagaatgctgaaaccgctctttttccgctagaacagcatggattgctgcctgcattttggcatttaatgaaccgtgaatatggataccacatagctgaagggacagaaccgtcattacgcgaactgattcgtaagttactggtgagtgaatgctacgaacagcttgataccaaagagcgccctgtctggctacagtcacaactattagccactcccactggacgtgcgaatgctatggctctgctatctggttggcgtgattctaaccagtacagcagcaattttgccgacatctctgcacaggtagcggatcaactcgaacttgcttcacgcctgacagcgcaagatatctggctctggggagaagtcgaaggctttgaagcagtcgaacaaggtttgatccgtgagctgatatctggattaaacaacggtgacttgaaactgaatcgagtagagtttgcccaactaatctctcgtcgtcgacatggattctgggccagaactgtacctaaatatgcatatatttaccaggcgctgcaacaagctgaattgttgctagaactacgccgttcgaaaccggatggttttcattacacttcagcgcaagaaatgtatcttgcctatgaagctgaattgttccagtttgatgcagcctatcgcctatttaatgaagcactattgcatctgcaagggcagtcggtagaagtgctggcagtactggccagtaaaatcgaagatctgtatgtgaactggtatctataccaactgggactgacatgggatagcttgctagataaagagcagttgcttgataactggcaacttggcctcccttctcagcatcgcttctatgatacagtaatcaaacaacgccttacccaaagcggcgtcaagcgccagtttgttattatcagtgatgccttgcgctatgaagttgctcatgagctccagggactgataaatgaagccaagcgcttctctgcgcaactcaagagccagctcggggtactacctagctacacgcaacttggcatggccgccttactccctcatcagcaacttgactatgccgttaccaactcaacagtattagtagatggacagaacagcgcgggtttagaaaatcgcagcactattctaagtaaggtaggtggtatagcgatttcggccaaaagtctgctgagctggacccgggcagaagctaacgaggcggttggtgacgcaaaggtaatctacgtctatcacgatgtcatcgatgcgcagagtgaatctcagaaaagtgagctcaagacattcattcatgcccgccaggctatagacgaactgaatggactcatcaacaaaattatcaatgggtttggcgttactcgcgtagttatcacagccgatcatggattcttattccaacaggcctcagttgaaaacggggtaaaatcgcctctgaaacacgaaccatctggaactctggaagcttcaaaacgctatctccttggtcgcaatttaccaacaaacgaagatgtctggcatgggcaattgcgtaatattgttggtggtaactctgatgtggaattctggcttccgaaaggagtgagccgtttccattttgttggtggagcccgcttcgtccatggtggtgcaatgttgcaagaggtctgtgttccaatacttgaagtacaagagctgcgtggcaagaaacaaactctgcatgaaaaaaccaaagtcgacatagttccggcataccaacccattaagctggtaaatgtgatcgataaaatccgcttcctgcagaccgatgccgtcgatgaacgtcataaatcaagaatggttcgtttctcggtggtagatagttcagaacaaaccgtgtcagctattgagaagctactctttgaagcgacctcaagtaatctggatcagcgccagcaagacgtgcgtttaaaactgaccggtgctcaatttgaccgcaaggcgcagtatcaattgctgctcgttgatgatgaggatggtattgaaatggcacgctatccagtcactattgatttggcaatccaggatgaattcggtttttaa

SEQ ID NO: 292187 - DNA, 1794 bp, Morganella morganii
atgagccagcaagaaaataataatatggataaacatttttatcgcgcctcagcggcggattttatgaagattccaggaagtcctattggatattgggtttgtgattcgataaggaaccttttcacaaatccaaaagaattagttggaaatgtagccaatcctaatcaagctttggttactggaaataccgataattacattcggaaatggttcgaaccctctttgaaagctattggttttggtttaacacgggatgatgcaaagtcatcaggtaaaaaatggtttccttacaataaagggggcgattatagaaattggtacgggaattttgaacatgttgtcaattgggaaaatgacggatacgaacttcaaaccacactacatccgtcaggaaaccgagtgtgggcgcataattttatattggatagcattttcaacgaggctcttgtttggagcaaaatagcgtcaggaaaaccatgtttccgttattctcccagtggttttttattcgatgatgcatccggggtttgctcattccaacctggaaaaaaagagttgttacttgggattttttgcagcaaggtaaatttatatatacagaaaataattaatcctactcttaatatccagccagcaaaccttagggctatcccactcccccccaaggaagttgttggtattcatcgtgtggtttctaacctaattaatactacaaaaaaagactgggactcctacgaaatttcttgggattttgctagattacatctattaaacacggaccacttatgtccaacattaaatgtaacttacaaaaaactacgtaccagctggcgtaacataactcaagcaacacaacacttagaagaagaaaacaatcgcatacttatcgacgcatatagcctgcaagatgagctaaccccagaagtgccaattaatgagattaccctaacctgcaatccgtattaccgctatggtggtactaaaaccgacgaggaacttgaagccatattgcaaagtgacacaattgcagagctaatttcctacgccatcggttgcatgatgggccgctattcactggatcgtgaagggctggcctatgctcatgccggtaacgaagactttaaaatgctagtagaagaaggtacttatacccgtttccctgccgacggagatggtattctgccactgacctctcaggcttggtttgaagatgatattaccgctcgtgttgaagagtttgtccacactgtatgggggaataagcatctggaagagaacctaaaatttattgccgacagcctgtgcttagccgcgatccaaccagtgaagaaaggaggggaaacctcccgcgagactattcgccgctatctatcgacccaattctttaaagatcacttgaaggcctacaaaaaacgcccgatctactggctattcagttcaggtaaagagaaagcctttgaatgtctggtctacttgcatcgctataatgaaaccaccctcccgcgcatgcgtaccgagtatgtcacgcctctgctcggccaaatggacagccgtattgagcgcctgcgcctgcaacagaatgaagcagaaacagccgaagccaaacgcatcggtaaagagatcgatagcctgaccaaacagcttaccgagctgcgttcttttgacgaccagctcaaacactatgctgatatgaagatccagctcgatctcgacgatggtgttaaggtcaactacggcaagttcggtactttattagctgaagtgaaagctatcactggcgataaagccgagtaa

SEQ ID NO: 292188 - DNA, 3000 bp, Morganella morganii
atgggttttacattagaagatttagggctcgcttatcgtaaggctaaagtagacctctattactcgacaactccgtcgctatttgccattgctgactacgaggataagctgcagattaacctcaccaatttgcaagaacgaatcaatggagaagctcaagattggatacacaccccagattttctagggggttggtctctggtcccaaaagccattaaaacggagaaaacagatgacagcacagggctaattttcgcatcacctgatgatgaatggcagaagataatagaagctggaaaagaagtcacagcagaatttcgtttgatggcctgctgcagtttggacttccatgtcctttcagctctttggatgctcaaggtgggttcgctttttgataaaaaactcagtagcaatgtctatggcagccgattacgccgtaatcgccatgatcaaattaacgaactagcactgggatcatttaccccttacctcaaaccttttcgcgactggcgtgatggcggcattaacgctatgcgttcagcactgcaagataaaaaagaggtcttagctcttacagctgatgtgagcagttttttccatgaactaaatcctggttttatgcaagatccggcctttataaaactgatcggcgtcgaattggatcagagtcagacgagactgcaccaattgtttattgctgcactggaagcctgggcaaaactaacaccactcggaaaaggcttacccgttggtttgccagcctctgctgttgttgccaatgcagcactctttaagctcgatcagtttatcgaacagcaggttgttccactctactatggtcgctatgtggatgacatcctgttagtgatggaaaataccagtaagataaaaaatacgtatcagttctgggattggatcttcaatcgggatgggggcaaagagttatttaagtgggaacatatggataacccaaaagaacaggctatccttttcaagcctgattaccttgaaacatgttccagccgtatcgcgtttacaaacaacaaaaataaattattcgttctgtctggcgcggctggtattgctttggtcaatgctatctctgagcagattaatcaacgtgcaagtgaatggcgatctttaccaaaccttcctgattcagctgaatcagtggcaaccgatctgcttaaagcaaccagtcatattggtgaacaagccgataatctgcgtaaaactgatgctttaactcttcatcgcgcgagcttcgctctcaatctgcgtgactatgaagcttatgagcgcgaccttctgcctgatgcttggaaagaataccgccatgcttttttcgatgcggtaacaggtcatttgcttacgccgataaagtttttcgaactggctcaatacctaccacgtatcattcgaatggcagtcgcttgtgaagattttggctatcttgagaaaatgattaaggctcttaataagctaacggaaaaggtcaaagatcattgcactatatcgattaaggctctgcagtcttccctgcaatatcaacaacatgattggtggaacacactttacgatgctgttgctgaaagcattatttcgtcttttccacacaagctatgtggtgaaggaaaggttgcctgggaggaattccgtaataccttacagtttaaaaagcacttagagtctagtctgtttaaacttctcggccgcaatgtcttacagggagctcatgctcggctattcagttacgatctcgctcatatcccacttcgcttcatcggcctgcccaaagagatggtgagccagcgaggcatcattgcacgcaataaattaatcacctcagatgcacatgagttacttccttgcaatataacggaaggaatccgtattctcgtggattggctcagatttaaaaaagggatcccggcaggtctaaatttcgctactcgcccttttagtctcaatgagttgtatttgatagcaccagatccgtttaattcgcttcactgcgctaagctgagccaggtgatgcaggctctacgtggttttgagctgaccaagcacaaaatgccgcattggaataaaggtaagaaaatacttcagatccctgatggcgaacctaagtccaagcatacaatcgcggtatctagctgggaaactagtgggccgagttttgtcgcagcggtgatgaacaaacccgatcctgatagtcgtcgccgttatcagcgactcaatcgtctaatcaatgaactgatctccagacctgataatagtggatatctcattttaccggagctggctttaccaccgcagtggtttatccgcatagcccacaaacttaaggggcgtggtatttcatttatcagtggtgtggaatatctgcatgctccgaaaaagcgcgtacgcaatcaggtatgggcttcgctgagtcatgatagtctgggcttcccatctctgatgctctaccgacaagataagcagcgacctgcattacatgaagaacaggagctcttccgcctcgcaggtcttgaattaagtcctaccacacaatggacacaaccaccgatagtgcaacatggcgattttcgttttgcactaatgatctgcagtgaattaaccaatattcgctaccgggccgatctgcgcggtaaagtcgatgcgttatttgtaccagaatggaaccctgataccgacacgtttaatgcattggtggaatccgctgcacttgatatccatgcctacatcatccagtgtaataatcgcctttatggagatagccgtattcgtgcaccatacaaagaacgctaccaacgcgacttaatgcgcgtgaaaggtggtaatcacgattactgtgtcaccggtgaaattgacatcacggccttgcgccagttccagtccagccaccgttcaccaggaaaaccctttaagcccgttccggacggatttgctcaggatatggcacatagcagaaaagaattaccgaaaggagattaa

SEQ ID NO: 292189 - DNA, 540 bp, Morganella morganii
atggaaactctgaagcagaaaaagcagccatgtttaaagcagctattgcttaaagaaatagggcttaagcagataatgtcaaactctaaccttcacaaattgactcgcgccgagttagccgacatctatgaaaaattggtgctctattacgagcagcaccaggggctaacatctgaactgttatcaacccaggttaaaggatatcgcaagttaaggagtggacttagtctacaaatccagcctttctcgactgaaaaagaactggcgacatcaaccctacctactgcagataacaagcaaaatctgatctggttccataacgcgaagagtaacattttaaagagtattttttaccatctgcgaaatgcagctgctcatgccgatattgaacgagttgcaggaaatccaatctggtatcacattgaacatcgttataaaggccagctaaaactcttctgtcaaatgaaaaagactgacttctggtgctttgttgatacagctaaaaatctgaaaaaaaaagcagtagcaaaacgaaaatag

SEQ ID NO: 292190 - DNA, 1935 bp, Morganella morganii
atgaacactactaacctaaaaaaaatagcccctcgggctcgtaaagcatttattacagctattaaagcgcgcgctgctgaatttggaatcacagccaaaggccatgttgaaccggtaataagtggcgaagttttgcaagtggctggatttacccatccagccaactgtgcctctgcccttaagcgcctgcagcaacggcttgcaaacgatagctatgaaatcctaatagagcatatcgcatacacttggtttaaccgtttctgcgccatccgctttatggagctgaaaagcgaagatggatatttagaacacggtgtgcgtctgctatcacacccgtcccagccactgggttttgaggtgttggatcgtgcacctgaggtgattgataatctgataacagaaggtgtggctttggataagtccgctctgttggacttgttactggcaggtaatgagcaggagactctcttccgtgagctacttctaggtcaatgtcaccgactacatcaagcaatgccatttttgtttgaagccattgatgatgaaacagaactcctgttgcctacaggccttacccgcactgatgccttctggcgcgaactggtagatgagatcccagaacttgactggcagcaagtagaggttatcggctggctttaccaattttacattagtgagaaaaaagagcaggtcattggtaaggtggtcaaatccgcagatattcctgccgctactcagctgttcacgcctaactggatagtacaatatctggtgcaaaactcggtgggacgttactggctgcaaacctatcctgagtccacactcaaaagcacgatgccctactatatcgaccaagacgaacaggcttccgaggtagtggcacaactggctgaacttacaaccgccagcatcgaacctgaatcaatacgcgtactcgatccagcctgtgggtccggccatattctggtggaagcctataatgtgctctatcgaatttatgaagaacgcggttatcggagccgcgagatcccagtgctaatacttaagaataacctctttggactcgatatcgacgaccgcgctgcacagctggcgggttttgctttgctaatgcgtgcccgtcaggatgatcgtcgtctgttttctcgtaacaatggttgtgatatagacctgaatatttacgccctacaggaaagtcgacacctcaacattcagaaactttggcaagcacttaatctcaatgctaatgcgcagcatggccagactcaagatctacttacagtagcccaagctacagatgacccccgtctgacgcttctaaaagacctgcatcagcgttttcttaatgccaaaacattgggttccttaattagtatatctactgaacaagcctcagctattgaggagctctattccacgattcaggatctcagcaaaaatggcgataatatgcaacgacctgaatctaaaaaactattaccgctgctagcacaagctcgcctactggctaaacgctatgatgcggtgatcgcaaatccaccgtacatgggcagtaaggggatgaatgcggatctgaaagagttcgctaagaagcagttccctaatagcaagtcagacctgtttgccatttttatcgaacgaaatctggatttaaccaaagagtcaggtgtggtagcgatgatcaccatgcaaagctggatgttcctttcttcatacgagtcattgcgtacccgaattttgaatcaacacactatcctgagtatgacccatcttggggcaagaggatttgatagtattggtggagaagtcgtctcaactactgcattcgtattagggaattttcacctttcaagctatcagggcacttatctccgtttagtggatggaaactctgaagcagaaaaagcagccatgtttaaagcagctattgcttaa

SEQ ID NO: 292191 - DNA, 1755 bp, Morganella morganii
atgtaccaaaccggtggcaccatcgaaacgctgctgaacaaagttgaacagcatgaatatattttgcctgcaatccagagagaatttgtctggcggccagatcaaatctgccagctgtttgactctctactacaaggctacccgtttggtaccttcctgttttggaaaattaaaactgagaatctgcgtcagtatcaattttatgattttatgcgtgactaccaccagcgtgatcaagtccactgtgaaaaactagatatcatcggtgaaaatgatcgcatcgcggttctagatggccagcagcgaatgacggcactaaacatcgggttacgcggttcctatagttggaaaactcagggtaaatggtggtccagtgcagacgcctttatcgaacgtcgcctctatctcaatctttttgaatgcacagaccctgacagcggaactcgttatgagttcgagttcttgagtgaggatgaggcaagccacaacgatgaacaacaccattggtttttagtctcccgtattctcggtatgaatgcctatgacgtaatgatgtcagtcatggaaatgaaaatgccagatgaacgcaaaccagcagcaggtaaagtgatttcccgttttcatgacatcattcacaataaacctttgatcagttactacctagaagaaggtcaggagttatccaaggttctcaatatctttatccgcatgaatagtggaggaacaacactctcctattcagatctactgctctccatcgccgtaacgcagtggaccactttggatgcgcgtgatgaaattcacaagctagtagatgaaatgaaccagataggtaatggcttttcctttagcaaggacctggtgctcaaagctggcttgatgctaagtgatatcggtagtgttgggtttaaagtcgagaattttagcaaagagaacatgtgcaagctggaagataactgggaacgcatacgtaaagctttacttcttgcagtcaatctactcagcagtttcggcttcaacagttacaacttgggagcagacagtgctctactccccatagcatattacctctatcatcgagatctggataatagctacctatcccgtagcgagtatgctgctgataggcaggggctaagaggttggcttattcgctctatcctcaaacaatccggtatttggggaagtggtcttgatacacttctgactagcttgcgaagcaagatcaaggagcatggtcagcaagagtttcctttgatagaaatgtctattgcgatgacagaacgcggcaagagtttacgctttgaagaagaagaactacagtctttggttgaactcgactatggtaaccgccgaacttttgccttgttatctctgctctttccgggacatgacttctcccaccacttccatgttgatcacatattccctagagcccgctttaccaaaagccaactgaaacagatagggatgaccgatgaaacacagattgaagagtggattatcatggctaaccggctacctaacctacagttgttagaagggggccagaacaatgaaaaacgtgagaagttaccgcatgaatggtacgaagtgatgtggccggagccagctgcccgtgccaatcatcttcacttacaggccatcgactcacttccagagactttggctggatttgaggcgttctatcataagcgtcgcgaaatattattggcgcgtttacgtcacattctgagagaacctctcacgacataa

SEQ ID NO: 292192 - DNA, 3723 bp, Morganella morganii
atgatagagacggaatttttaatgcagataagagagctgtttaccaaacaactggatcgcccaatcaatggtgtggtgaaagccgaacagctggatgagaaaatcatctggactgagcttgacgagtatgtggtgacccgtgaacttgaccgccaccttcgtcacttttttgagacctacctgcctggtgtcagccatccagatgatcctagtgtggcgggtaaaattgggatttgggtatcgggttatttcggttccggtaaatctcactttataaagatcctctcttacctgctcggtaacaagaaagctgttaacaatggccaaacaaaagctgccatcgagtttttcaaagagaaaatcagcgatccccttctttacggtgatatccacgctgcagttaaccgcaatactgaagtaattctctttaatatcgacagccgcgcagatactgaagacaaagaagatgccattctcaaagttttcttgcgcgtcttcaatgagcgcctgggatattgcgctgaccatcctcatatcgcacacctggaacgtgagttagattcccgtgggcaatacgagccattcaaagcaaaatttgctgaactcacgggctcaagctgggaagaacagcgtgatgcctatggtttctgtcgtgatgaaatggcaaaagcctgggcctatgctaccggccagtcagatgcctcatcgatgcagagtatggaaaatctcgaatccatgtttactctcgacattgccaacttctgtaaatgggtgcgggagtatctcgatcgtagcgatccatctggtgacagtaaacgcatggtctttctggtagatgaggtcggacagtttatcggcaacaacacccagatgatgctcaaactgcagacaataacagaaaatatcggtaccgcttgtggaggcagagcttgggtaatcgtcacttcacaagaagatatcgatgcagtactaggagatcttagcgctaaaaaaggccaggacttctccaagatccaagggcgttttcacacaaggatttccctctcctcgtccaataccaatgaggtaatacagaaacgtctgctcgaaaaaagtgaagacgctaaaaactgcctggcagaattgttcagtcaaaaaggcgacattcttcgcaaccagttgacctttgataccagcaccacagctgagcttgctaactacagtgataatgttgagtttgttgatcactacccttttattccctatcagtatctgctggtacaaaaggtcttcgaagcaatccgcaaagtgggggctaccggtaaacatctctcccgtggtgaacgttctctgctggatgcattccagaatgccgcacgccagcagatgaacaaagatatcggtgtattggtgcctttccatgccttttatccggcaatcgaatctttcctcgataccaacgttaaacgcatcttcgaacaagcggctgagaaagcaagcctcgatccttacgacattaatattcttaaatcgctgtttttaatccgctatgtcgatctggtcaaatccaccattgataatctggtcacactctctattgaagaaatagataccgataaagtggcactgaaaagccgaatcgaagccagtctacagcgtcttgaaagccaactattgattgtcagaaatggcgatgaatacgtattcctgactaacgaagaaaaagaagtcgagcaggagatcaaacacactcaggttgaagcaactgaagagaaccggcaactggcccggttggtgtttgaagaggtaatgggcaatcgccgtcagtatcgctatccggtaaacaagcaggattaccctctgactcgcttttgtaacggccactctatagacggcagccaacaaacagatctggtgctcaaagtcatttccccactggatgccaattttgacagttataacgaacaatcctacaaggcactgagccaagaagggaatggttgtattctggtacgcctgtcgagtgagaagcggatctgggctgaatttgatacttggttgaaaaccgagaaattcctggtagggatacgaggtaaacgacctgagcaagagaaattgctggcagaaaaagcactcgaaaacacccagcgtcgcagccgtctgaaattactattcgatgatctggtgaaacaagcacagatattcgcactcggtaatgagctgcaaagtaaatcggctagtgtcagcaatatgcttgatgaagcttgtgcctacgtaatcgaaaactcattccaaaagctctctttactacaaagctgtggtaacaacccggtgcaagagctgaagtcggtgatcatggccgatgacatggcacagctaaatgtaaatctcggtgaacaagaccccaatgctgctgcaaaaaaggagattgaactctttttaaatgtcgcagatgaaaaaaatcagccagtctaccttaaagaattgttagagcgattcagtgctcgtcccttcggctggaaccgtgacgaagtaatgctacaggtgactcatctggtcttgcttggtaaggctgcgctatctacaccgaatggtgatttgcccctcaaacgcagctacgaacattttacctcggtacgtagccacagcacactgcgtattcgtcgagtacgtcagcatacagaacagcaagtagctaaagcggctaaactggcgaaagatatttttaataaacccttcgagagcagcgaaaaagagctggcgaataagcttcttgacgtactaggcgagtggcagcggttaattaaagaatttgattttaaagctaaagatgggaattgccctggcaaaagcaccctgcttaccggcagtcgattgatcgccagcctgcttgagctgggcaacaacagttatgccctaatcgatggactctgccagcagagcaacgaatggcaggattttgccgaagattttgaagaagtcgaggagtttttcactcgtcagtttgatatctggcaacagttgcgtcgagccctcaacgatcaattcaaatccaatcgccatgcactggagcaaaacccagaagcggctaaagcattatctgcactgcaggctatctacgatgataaatccccgtatagcaaactgcgccaggtgggatcgttaattgatcaactcatcgccattaacctgcaactggtagaacagaaacgtgccgcggctttggaagcgatcaatgcaacccagcaaggtgttgcaccgctggttactgacttaccagctgagttacaaaaccaggcaatgcgtccctttaatctgttaaaagaacgggtcagtaacagcttatccttacatgagattgttagcctgcaacaagaggctgatgatgaagaagataaggtcttagaactgatcaaccgctacagcgccgaacttcaagctcgtctggaagcggagcaagccgcagcacggaaaaaagcggctgaaccgcctaatagcgatgcgggtactttgcgagaaccggatccatcaggctcgccaactactattgcgaataactctgctgcgacagtggttagccacaaaccaatacctaaacctatcgaactggtttcacccgcagaattactcggtgccagccatatctttatagaaacggagcaggatatcgacacctatctcgcgacacttcgcagccgtttacaacaggcaataggtcagggtaaacgagtgcggatcaaatag

SEQ ID NO: 292193 - DNA, 615 bp, Morganella morganii
atgagagcgaaactggacagtaagccgcaattgtcagctcgtctcgaacaaatcgaagaccgattaaaaagtgaaggcttcctgaaaaaccaagagctcggtggtgagatcggtttttatatctttgattacccaccccagtttgaactaaccgtacgggaatatctgagattgactttgcctcgcctgtcccggcaggggctaaattttgttcatcttaatctgttcgaagaggtactggcaattttgcaagatcgtaaattgctggataaagcttttgatctggagatcaaaaaagggaccgatgagttagccaaagcacttaaagggcctcttgaacaaggccgaattgcaaggcatctgataaataaagtgcttccggcatcgcctcagtttgtattgttatcaggtcttggccaatgctggccattgctacgtggtcatagcttgcttaatgcattacatgcccatatgggggcaataccactggtattgttttatccgggcagttacaacggcctcgaactttatccttttgatctggacagcgcagaagtggcaacagccaactactaccgagctttccaactggtgccacatgcatctaagtactga

SEQ ID NO: 292194 - DNA, 600 bp, Morganella morganii
atgaccaccaaagaatatctgggtgacatcattggtggcagcctgatgttgcgtgagagcagagtcatcgcggagctgctgataacctcaccaaatgaagatcaatggcatgatgctattgtaaatgacaatgtgctgcagaagacctcagtgcacagtgttaagcgcatagcttcaaccctgcgtaaaagacttcaaccgatgggtgaggctttctggacggagctactaaaggcctccgatgatgcagccaaacaaatgttgctaatggcgacaatgtgccaatccccagtgctgaccgatttcatggctacaacactgtctgatgcccgacagatgtttcgcgaatcactgcgcagcgaagactggcaggaatttattctatcccgccagcgtgccgttttcggcttggaccaatattctgaaagctcaatccagaaaatgggcaacaatgtattcaagatcctcgcagatagcgggtatctagaaccaggccgcagtagaaggttgaaaaatgtctatctacaaccccagataaaaaagtgggcaagtagtctcgactgccaaaaagtctacgatgtgatggagtccgttagatga

SEQ ID NO: 292195 - DNA, 180 bp, Morganella morganii
atgcctgcgtgttggctggctggatccaacaatatgtttgccaaatcctttctcgctctcgacggtaacggtggtctgagcgatgcccttacagccccttatgatcgctacacctgcaagtgtgcggcaatatccatggcaatttatattgcgcctctgaagcagaaaaaatcattgtga

SEQ ID NO: 292196 - DNA, 573 bp, Morganella morganii
atgcaaaacaaaccgcaatgggagccagactggtatctggaatctcttctgaacatccatattgacgaaatggttgatcgctatgcctgcctgcgggcactccgaatcgacttgttctatcagcatcacaccgctaagtactacccgcaaaaccacaatcatcttgaatgggatctccggttactcatggattacatgattcaaatgggcgcagtcgtgggttatttctgggttatcgaatggacagaagaccatcactaccatgcgcacgtagtcttctgggtagatggcaaccgcagtcggaaggtttatccctgggctgagaaggcccgtgagctctggacgttaattaccgaaggtgacgggggcttccatcgtagtgaatacaaaaaatattacagagccaatatcaatatcccggtgcgttacagcgaaccagacagtatcgacaacatccgacaggtgttagcgtatatgaccaaaattcagcagaaacatggcctgctgctgttcggctgcaacgatgtccctgaacgaccagcaaccgggcgaccacgcaagactgacttctga

SEQ ID NO: 292197 - DNA, 267 bp, Morganella morganii
ttggccacgctggagcgtcttctgggcctgctgtcggcctttgaggtcgtggtatggatgacggatggctggccgctgtatgaatcccgcctgaagggaaagctgcacgttatcagcaagcgttacactcagcgcattgagcgacataacctgaatctgagacaacatctggcaaggctgggacggaagtcactgtcgttctcaaaatcggtggagttgcatgacaaggtcatcgggcattatttgaacataaaacactatcagtaa

SEQ ID NO: 292198 - DNA, 705 bp, Morganella morganii; identical to SEQ ID NO: 10437

SEQ ID NO: 292199 - DNA, 273 bp, Morganella morganii
gtggtgctgaattttgacgatcggggtaccgtcacccatcgggcgatattgggggaaacctgtacggtgctggagatggccgcaggaacctggcatgccgtgctgtcgctggataccggtggcataatttttgaagtaaaacacggtggctatcaacccgtggctgccgatgactatgcgcactgggcgccagcggaaggagaaccaggaaccacggagcttatggcctggtatgcgcaagcgcaggtgggcgacagcgcttttgccgtctaa

SEQ ID NO: 292200 - DNA, 876 bp, Morganella morganii
atggttaaaaaatcactgcgtcagttcacgctgatggcgacggcaaccgtcacgctgttgttaggaagtgtgccgctgtatgcgcaaacggcggacgtacagcaaaaacttgccgaattagagcggcagtcgggaggaagactgggtgtggcattgattaacacagcagataattcgcaaatactttatcgtgctgatgagcgctttgcgatgtgcagcaccagtaaagtgatggccgtggccgcggtgctgaagaaaagtgaaagcgaaccgaatctgttaaatcagcgagttgagatcaaaaaatctgacttggttaactataatccgattgcggaaaagcacgtcgatgggacgatgtcactggctgagcttagcgcggccgcgctacagtacagcgataacgtggcgatgaataagctgatttctcacgttggcggcccggctagcgtcaccgcgttcgcccgacagctgggagacgaaacgttccgtctcgaccgtaccgagccgacgttaaacaccgccattccgggcgatccgcgtgataccacttcacctcgggcaatggcgcaaactctgcgtaatctgacgctgggtaaagcattgggtgacagccaacgggcgcagctggtgacatggatgaaaggcaataccaccggtgcagcgagcattcaggctggactgcctgcttcctgggttgtgggggataaaaccggcagcggtgactatggcaccaccaacgatatcgcggtgatctggccaaaagatcgtgcgccgctgattctggtcacttacttcacccagcctcaacctaaggcagaaagccgtcgcgatgtattagcgtcggcggctaaaatcgtcaccaacggtttgtaa

SEQ ID NO: 292201 - DNA, 705 bp, Morganella morganii; identical to SEQ ID NO: 8686

SEQ ID NO: 292202 - DNA, 534 bp, Morganella morganii
atgaaagtggagcagcaaaaaattactaaattagtgatttcagatgttgaaaatcacgaccctattcacgtttatcttgaagatgaaggtgataaccggcgcggacgtgtaaccatcagtgagttcggtaaatcatggtcatgcagctggggcggaatgggaatgccgcttactgagtttctgctttggataacaaacgaatattggattggttatcttgatagcaatatgcaccgaaccattgatgctgataatgaagataatatcgcctttgttaaaaaggaaatattacggtgccgcaaaaagcagattattgatgaatttcaagcccgaactatgtttgatgattgcgaatatagcgaagatataaggtacaggctcacgaatacctcaccggctggtgattacggatgcttattttcaggtgaggcgtatttagctcagtggcctactcaggataaccctgaatatattcgtatgtcttcaagattaaacgcagtacgtgaagcaattaagcagattcaggaggggtga

SEQ ID NO: 292203 - DNA, 531 bp, Morganella morganii
atggggttggtaaaatacatatctaacttattcacgaagaaaatcactgacgtgagtagtaaggaaaagccaaaatcacttcctactgttaaaagtgatgtaaagaaatatttatcaaaaaatgatgtctatgacaccctccaagaaataaaaaaagaatatgcaaatatcatgtttgatgatgatgacatgatagacagcatcttggctggttataacatgcgtattgccggggattccttaaggcgcataaatgcgggaatatcaagttcagatgttaaggatatttccgcttggctatctggttggtgtagttacctgaatagttcaagaagggcaatatccttagggtttacccatggcatatgggtcagctcaggatgttgcggctatcggggaagagataaaaaacacgataaatttaatggcaaaaaattccccctaaaagacggcttttcttactatgggaaaacttactacccagggtcacaaaggtattgccggtgcggatataaatcctataacccataa

SEQ ID NO: 292204 - DNA, 438 bp, Morganella morganii; identical to SEQ ID NO: 22496

SEQ ID NO: 292205 - DNA, 486 bp, Morganella morganii; identical to SEQ ID NO: 10073

SEQ ID NO: 292206 - DNA, 213 bp, Morganella morganii; identical to SEQ ID NO: 10074

SEQ ID NO: 292207 - DNA, 417 bp, Morganella morganii; identical to SEQ ID NO: 10075

SEQ ID NO: 292208 - DNA, 312 bp, Morganella morganii; identical to SEQ ID NO: 10076

SEQ ID NO: 292209 - DNA, 324 bp, Morganella morganii; identical to SEQ ID NO: 278079

SEQ ID NO: 292210 - DNA, 342 bp, Morganella morganii; identical to SEQ ID NO: 143285

SEQ ID NO: 292211 - DNA, 165 bp, Morganella morganii
atgatgctttacacccgaattgcggcagaggaaccggccggaactgaaatcacctccgggtacatcatggagaaatacggcgtatcacgcagtatcagccagtcagctgtcagggttttagcgaagattgaagctgtcacgccgacccggtggcggggggaatga

SEQ ID NO: 292212 - DNA, 1152 bp, Morganella morganii
atgtatggctacccaataactgaagaagagtatttcattctatatgatgaaagtaataatgatagattaattaggatcgaaaatggcaagttaaatacggagatacatacagataagaaatataaacctatttttatcctcggaggagtggcgtataggaaaaataaaaacgtgaattttgaatcattaaggaaagtcctcaatcttcaggataacattatagaaatgaaattcacacatattgctagaggttcatttgatggagttttgcactctattaatttaaaaaaatttttaacttgggttttggaaagtgatttatatattcattattcagcattgaacactctttattggtcatctgtagatattattgatgatatatatttgttcttaagggacagaggtattagggtgggatttaaaaatgctttcaatccattttatgacgatagcgacatgcggcttaatattgattatcttaaaaatgctctctacacatacattcaaattgataaggatatttttttatctttcttatcttcttataactacccagatatcccagaaggaagtgaaggtaaatttattagaggcttatataaaataataagaaataaagttgacttcatgcggcgagattcaggtgactcgatagaatttcattggctagcatcactattagatgtactgaaaaaatgtaaggatatgtctgatttaactttaacaaaaaataatcaaccaaatattttaatcaagagttttgctgatttttattttaataggctggtttcttttccaaaatcagaacatctatttgatgaggaaataactattgcagatgaactaaatagatttgtgaatacatcaaagcaaggggaggttgggaattacagctttaaaaaatcagaatattatccaatacaagtagctgatgttgttgctggtttgttcaggtcaatttttatttttctggatgataatagctttgatgaaattaaggagttcaaaagaaatattaatgttagacaaaaagaatgcttagacctcttgaaattagtaattaacaaatcagataatgagtctcaaggttttttttttagaattgtaccgccagcaataaatgagaaaaatagaatattattcgaataa

SEQ ID NO: 292213 - DNA, 372 bp, Morganella morganii
atgaccaatactagccctacacccaaatacagctctattcatctgaccatacccgccgacttgaaagagcaatttctgttagaatgtaaacaagctgacgttgatgcaggtgaattaaggtgcttttcaaaaaatccacccagcattataaatgtgctatatgagacagcagcgaagcttgagatggctaaaaaatttataaggatattaaaaatgtttggtcaacaacgtaacgttagaattgaagtttatactgacaaaaagattgtcgatttaagaggttattcagaagaagaagccatacgcttaatcgaagcaagcgactcaattcgtattgctcatacagaagataatgaagaacaaaaaaagtaa

SEQ ID NO: 292214 - DNA, 663 bp, Morganella morganii
atgaaaatagaaactctaaaaaaaataaaacccaataacattacagatgaaatttattcagaaatatctaaattaggtttgtcaaataagttaataaaaaaatgcagctctttattaataatgcaattagattatatcattaaaaataatttagagaatgtatttaaaatcatacatgaaataaatagtatggaaaatgatgataaatcctctagaactaagcctgaaacaccgtttagaaaaaatcatttaaaagggttgtatcataagcactatgaaggaacagggcttgaaagcctagaggttaatattagaaaccacttgaaaaaaaataacatacaaactgatttcggaatctggcttaaggattatttaaaaaaaaacaaagaaaaaaacacatttcttgatgatatggattttttaaatatatcaagaaaattttccgaagcaattatatatgatagttttaataaaaaagcttccagtaaaacgttaactggtcattggataatttatgcgaaaaataataacaataattattatctatgtatttcaagacattctaactctataagtgatgatttagttataagaaataaaatagatgaaacatgtataagtcagttcccattccttaaagatatactatctattcatagttaa

SEQ ID NO: 292215 - DNA, 864 bp, Morganella morganii
atggttgaacgcatcaaaagtcctatagttggggcttttgtattttcttggttattttttaattggaaaattattttaatattattatttagtgatagcaaagtagaagataaaatagacgttatgtctaaatatataacactagagtcatttttatatcctgctattttttcagttgtttatagcttggctattcctgttatttcagtagttgttgaatggtgccttaaaaaagtatcaataaattctatagcattagcatatgctaaaaaaaatattgggttgatagagaaaaaagatagtgagaaattaagagctgatgctgatattgcatatgaacgtcaaaaaacgggagctgaaaaagaaatacaggagatgcgggagagtatcactgcatcaaaagaaagagaaggcatcctcgttaaggaaaaagaagatgccataagtgaaatgaataaagtattgaaagatatgaagtcaataagaaaagagtcggagttattatttatagaactaggtgaagtaaagaaagaaaatggcattttaaaagaacaaattaaagagaaaaacaattatcttgagagtgtcgaaaatatgaggttaataaatggtgagtattctaatgtgtattctgcaagttataaaaatgatataattgatgctattggcgttgatgggagcgtaaatatggctgattttatgaatgatgtctatttaaaagataaggttatgtcaattccaaatataaaagagattattccatcaaataaatcaaatgtaataaaacatataactttcaaacaatttcttgatgccctcaactttgagcaattaagtagctttagaaataccgtgcttttttaa

SEQ ID NO: 292216 - DNA, 819 bp, Morganella morganii
atgagtaaaaattattactttaactttataaaaaaaattatagtatttttgattactatcgctttatttactcccttaatattattttttataaaatttaatattgatgatttggattcgatagatagatttggtttatttggttcatatcttagtggggcaaccagcctcttgctaatgatattaactgcaatatctatatatgtactttataaaaccttcacattaacaaaaaaatataacgaaaaacaaattgaatttagtaacacacaaataaaaatatctaattttactcttttagttgatttgttatccgaaagaataggattaacaaaaataaaatatgaggaatctgatgacaatcttgggttaacagactatttcatatccctaatatcattatcaaaagaaaaccatgcatacatgaaagataaagatgatagtaggtacgctatttctaactatagtaaattgttaagtttgttcttagaaaacaatgaagtagttttatctgatgaattcatattaaaaatgatgcttgcatcaaaaaatagcaattattttaaatatatagtaaatgaattctcaccaataattaaaatcatcatagatataatcatgagtaataatactaataaagaattaaaggatatttttttgattatgttgaaaaacaaagttcacaatgacattattttatggggcgttatttatagttcatcagatatagaaaaaatatgcagctatttaggcactatatttactattcctaaagcaataggtttagaattgaagcgatatatggaaagtgatgactaa

SEQ ID NO: 292217 - DNA, 813 bp, Morganella morganii
atggtagaaagaactatcctcaagtgggcgggttcaaaagtcggcatcatggaacaactgcgtccgcacctgccaaaaacaaaacgccttgttgaacctttcgctggttcctgtgctgtgatgatgaatactgactatgagcagtatttaattgcagatattaatccggatttaattaatttgtacaatatcataaagggaaataatcttgatgattttattattgatgccgaagtgacattcaaagtagcaaattcagactctcaatattatttaatacgagaactatttaataaaaaatggcaggaaaataacagagaaaaacgcaaatctgctgtttggtttttatatttaaacagacatggatatagaggattatgcagatacagccgaaaaacagggtttaatgttccttttggtgattataaaaatccgtacttcccagaaaaagaaatacgtgcattcgcagataaagcgtatcaggccgtcattaaatttcaaaattggccggaaacgttattacagacccgcgccggtgacggcatatattgtgatcctccttatatggggcctggcttcactaagtaccacgccgatgattttaatgacggtgatcatgtggctcttgctgaggcgctaaaagccctgcatgcaacaaaaggctatccaatcacggtgtcaaactccattgaggcaaaagaactctatgcggatttaggcttcacgatccacgatatagaagcaccacgcaaaatctctgtggacggaaaccgtaaaccggtcaccgaaattattgccacactcggggcgtaa

SEQ ID NO: 292218 - DNA, 1092 bp, Morganella morganii
atgaaattatctatcgacatttctgaacttattcagttaggaagaaaaatgttgccggaaggcgttgattttttccttgacgaaacgcctgtagtttttgatccaattgatatcgaactttctgcaggtaaagaagttagaattgaagatcttgatcccggcagtggtcttatttcctaccaagggagacaggttcttttgtatattagagaccataccggacgttatgatgcggctattgaagatggagagaaagggaagcgatttcatattgcctggtgtagaacattagatgacatgcgccaaaaaaatcgatttgaacggtatcatgcaacaaatcgtgttgatggcttatttgaaattgatgatgggctcggtcggagccaagatgtcgctcttaaagtttgtatgaactgcctagaacgccttaattacaaaggaagtatagataaacaacagaaaagagtaatatttaaatcattttctttgaatgaatttttttcagattatagtacctgctttcgccatatgcctaaaggaatctatgataaattaaatagcggctatgtagaaaattggaaggatatatccagaactactcgagaacaagctaactacaaatgtaatgattgtggtgtgaatttaatgtccatgaaaagtctatgcgatgttcaccacaaaaatggtattaaatatgataactcagctgaaaatctactcgtcttgtgtaaagattgccatcgaaagcaacctttgcacgaaggaatatttgtcactcaggctgacatggcaatcattcaacgcttacgttcccaacaagggcttttgaaggctgaatcctggaaggatatttacgatctgacagatccatcgattcatggtgatataaacattatgcaacacaaaggatacccgccaccagttccgggattagacttacaaaacgcggagcatgaaattattgctaccgtagaagctgcctggccggtttcaaaaattgcagtaaatttaacaccggtaaaagtcgatggttggaaagtattctccgtgggagaactcgttaaagaaatacaatctggggttattttctaa

SEQ ID NO: 292219 - DNA, 708 bp, Morganella morganii; identical to SEQ ID NO: 147888

SEQ ID NO: 292220 - DNA, 3354 bp, Morganella morganii
gtgaaaactccagttaacccacttttgcgatggctcaatgcgttttttagcagtcgttcattacccggagctgatgggagggcgctgtatgcttaccgttgtcatgatgcagagtatgaaagtttggctgctcttcttcgtgcccatgttccacgtaactaccccaaaaccatattcatttcttacagtgatgttttgttcagcatatacgccgctgagtttatccgccgtaaccatactgcaggacatccaagatgggacgttattttagaatcgattggctggaaggtaccttacgcacatcggcaaaagctggtaaatgatgggattcgttactggaaaagaaaggtgagaagtctgggtcaagcatcgggttatctgcatactctggcttgcgaaggcggtttgcccatccggatgattgaaaatgaaagtggctatttaataacctatttcaaacgagtttatcaggcactacgtgggcaatcgtcaaggcgtcctgcggaaataatcgcacaagaactgggcgacactattcctgcgacaatgcaaaatgaactcgtctatgaaatagctggtgaattttgcgagacacttcatacgttactcaatgagcatcccactcatggtcaggaccccgtttcctcactacgcaaacaatatcctgactggcatcttcaacttccgttggtactcccggaagagaatgcctcagagattgtaagacgattactttctcaatcttcagagccccgtatatcaagcaatgtgctggttgaaaggatatgggttgatgttgatgacagttggtattgcgatgcccggtttcgatttccggccacaatgcgtactgaacagttaatatccctgtttgaaagcaatattcagccggaacagacacgactcatcatttctgcaaaatggagaaatggtggggcccggttggcaatgctaagccgttatgaacagcaagattggcgagtagagttattacccttcgctatgcaaaaactctctggggcagatgcgatgaccgaaatatcgttgtcgctccatgaagggccgattctgctaggtcacgtaattcccaaagggggttatgagcttaccgaagatttaccatgggtttttgaagcgatgaatgagagcgagtcgcagttaaaacttgtcggcatgggctctgttagttccaggcaaaactctctttttatttcgctaccgacaaatagtcatttggatattagtggagaaggtgagtttgatatcccgaggttgctgaaaaatagtgaacgtagcttaactaaaataagcggagtattcagcgttgttttacatgatggcgcagtttgtacgattcgcacgcagcaactttatgattctgcgattgagtattatataaaaccgacagagatcgatctggtaaaatctgattatcctgtccatcgtgcttggccaaagatcggctggaaaaaggatatgcagcatggcattgtcccagagaacgaacttttttggcgatccattcgttcaggtaacaactcctggttttctgtcgcatcagtaatgccgaaagggcagatagaagtcaggcgaatagtcaatggtgaggttttatttagcggtaaagttgtgattttgccagcagatttcgatattcaaattattcccgagactgctcagcaaggagttattgtactctctggtataacggatgcaagggttgataaatattcaaacaatgaaaaagtaacacttaaatcagattatttgcaaaacgagtgtgttattgattgtaattcatcacagatgctagagagcaccatcaatttacgagtatcctggaaagatggttctaatcttaaattgttattacctaagcccgttagcggtggacggtttgtaagtaatgatggttctgttcattttgacggtgttgcatctatagcacatttgcatggcgtggacgctgagctgttaacaatatcttgtgccgggaaaggatatcttaatatcgagttgttggatgaaaacccgatgtctgaaaaatttcattatttacatgcggatattccattgttatctggccgtaatgaaaaattgcaacagatttcactttatgagaattataatctgctgaacgccatgcttgtatgtgcatggaaaaatgatagtacattacgtgttgatttttactctgacagatttggtaaggacaaaacaacactcaatattaaacgctacgatggccgttttattgagggtgatgaaagattgctggttgatataaaagattctattgtttttccttaccataaaatagacgacatggttgttgaagccatttctcttaatactcctgacttatgcacagtcctgctgaaaaaagatgagtctggttatgatttctcgacgttgaataatcaaggtggcccatggttaattgtgggtaaaattgatggtgcaattcgtattgcaccagtgattaaatggatgctacctacattacagacagatgatttatttctaaatgctatatgcaacgcatcgccagaacaacgcaaggaatattgtaatgcgctgtttttggaaatgaaaaataatcctttgcaaaactcttgttatttgttggttgagtacattaaaaaatataagttgaataatagcttgcctttgctggaactggatttatttagagaaatttcgagtaattattacgtggttgttcagttgttaatatcatcatgtctttctggggatagtgatgctatttatgatatacaggaggaattacccttctcatggggatggattcctgtttcaatatggaaagatgtctttgaacagtgttggtattctctggaaaaacagattaatgataaggcatttgcattaaatatactacagccatttattgcatttataaatcatcaagcgcatatcgatcgtcgattagttcccatcgctaatatgttgcttacacatagtgagatattacctgcaggttgcactgtattgccatctgtaagccgcgagcagtttaatgatgccaaacagatgttattaagaaacccagatagttttggacgtgtcagcattttttctaaagagctttgggatagtgctattactccagaccttaaatctgtttttaataaattttggatcgaaaacacatatcacactcgttttgaaaaacgttttaatttgatgttagtcgcggcgctgctttcccaaagaaacaataaacttatgcatcagctaactgcactttttgaatttcactatcagcaagccccgcagcaattgggggttatctatcagtattattttgaacaagcaggagtatgtcattga

SEQ ID NO: 292221 - DNA, 2961 bp, Morganella morganii
atggcgatataccggttacccgagcagttggatcaactcactgacgaacaatcttccgaacgacatagcgttgcaaaatcggaactggatgcactcaatgaagtgatcagtttcgcggaagagcgtcgacgttccgcgagtgcttttcagcgaagaggctatgaagagctttatcgccatggcttcgggaaaacagtcgtcattgacactgaatattcgggccgtcaggtgctgcgtacctccctggcgacctgtgattacgccagcactaagttaggatacgcgacccctgactcacctattggccggttatgccgccaggcccaaattgggttgaaatctgaaagcaatcaatgggggcggtacactattgttgaaatccgcaatttcgctcgttttagcggtattgaagcggcacagaacatcaagaattttcaggtcatggaatcaacgtcaattgcggataaaggtaagcagggtcttcagactgtaattaataatctgaaactctctttacagcgttggtatcgacctaaacatcagcaagccgttgtaacagatgtggcattgtcaccgctcctcgaaaacattccagctgacggtatcgagcaggagtcggaaaactggttggattttgcgactggacaagattatgagttgttccaggatgatgccgaagagcaattaaatcactacgatatttatggtcgcagcgatgatgaccgtgacgattatattgggctgagcagctatttctttctgaacccgacagaagaacagctccgcgttatgactggcgcgaccactacgggccccatgcttgttgaaggtgtcgccgggtcaggtaaaacctgtgtggcactggggcgtgcgaagacactatgcgacttagcccgtacccccgatgaagaacagtttaatgctgactttttagatgaaagcagtgtgggatttgtacgaacgggagagctggtaaactatctgaaggcttcctgccagtcgctgagcatcgataaactaccaatagaagagtaccgttcattggtttatcggcttaacaatgttcgccagcttgagcagcgctccacgtcgaccggcgcggaagggcagaaagtgactcgcgccaggtatacgaatgtctcagaaaatctttcctatgatttctctgctgaaacaaccatgaactggcttcatgcgtcagcgcaagcgatcggcgctcttcttcagcttgaactggaaaaacaactggcctcactcagcatccccgctgagctactcaaagcacatttcctggcagaaactaaagccggaaatgccttactggaactcgtgaaacggagcctggcatcagattatgcttctcttttcaatcagctctctgggcattctggcgacgcttttgctctggataaccttctgagccggttggtcaatgcatatgagaggatcgaacgtgatttgtttgataagaatacgctctgggtgcatccgtctgaggaagaatggctgattgtaaaagaggctaaagcggcagtaacaaccctgcgtgaaatgagcgtggtgttagtcgttgtcgaacgggtccgtgatgagaatgaccgaattcgccgtaaagcgacggagatattgattgaaacatacaccgatttgctcaacatttttgcgcaaaatggcagcgtgcgaagcgaagatggtctgagcgtttatgttgctgaagatgctgagattatttgggaatgtcgcaccgatcttaaactggtgtgtgatattccaccggtggtgaatagcatcaaaatcacgtgggcgaaagattttgacgcggtcaacatccatctcatcaaccaaaagctgtttggtattaacaagaaacgcattttttcgttgtctgagtcgaacccctttgtacgcaaaattgaagtgggtgaagagaaaacgcaaacctctctcgcagcacggcttcgttctcagatgcaacggatttatagctcgtggcagtatgccgatctctatcgggatgcgttgctctccttcccgcaatactggcaggactactcgcatgtgagtcaggcgtcagaacgtctgaaagcgaaattactggcagatcatgacaaagatattctgttagcgcttgctcaaatcataacgcgtggtgcgcaatccagtcggcttgctccacgcttgcaggagcaaccttgttacccttctgtttttattgatgaggttcaggattttacagaggtgcaggttttcctgatggctcaacaggccgatccgaaatatcatgcggtaacgctagtgggggatatgcatcagcagctagggcgtgggaatgttcgcgatcttgatgcctgtttcccttaccattcattgacaaaattcctgctaaaagaaaataaaagacaggaacgagagccgcagctggcggcgacgtcgatgctctttcgcgcgttagttcagaacgatagtcgcctgcaggagtcggcagggcagctcactctctggcgagaacaagcgcaaaacgggactaataaaaagttcatcaaccaacctttcgacaatattgatgctgaattggtcgatctcattagtgaacaacctcatgggcggactattgctgttatctgtccagacctggctctagcacgggaactggaggcgcgtgtacgcaatgatttgattcagaagtcttcaaggactccgcgcgttgcagaacatatcgatctcgcccaaaagtatcaggttcatttttcctgcgctgagaatgtcaaaggcctggagtttgacaccatgatttatgttgggcttgagaaaatagactgggctaatccacaagagctcaacaaagtatatgtaacgatatcaaggccaaggaagcggctgattatgtttggtaatcaatatgatttacccgacactgtcgcaacatgtttacttacttattctgaacgcaggagcgcctga

SEQ ID NO: 292222 - DNA, 1383 bp, Morganella morganii; identical to SEQ ID NO: 105677

SEQ ID NO: 292223 - DNA, 1902 bp, Morganella morganii
atgaagctgttagatgtcttcaaaaagcaaattgctaatatgggtatgttgaaacgtgtctggctcaccacctttaatctggatatctcttttgttgaaacgtgggtacttcctgctgtgttgggtatggacccgcccgttagtcgtatggattacgaaggtctgcagcgtgcgctgaatgagagtggtattgatttccgcatctactgcgatccgcgcatgattgcgaaagaaaagccgaaacgtacctccattgcggtatatccggtgtcggtgcgtaagctggctcaaagcgaagagtcttatctggataaagagcgcgggctgtttcacccaaaagtattttatctcgaagatcactacagaaagattattgtgggtgcgggcagtgccaaccttacgcttagtgggtgggggcgaaatcaagaaactgtggattttcgttgtgttgcaagtaatgcccaataccagcaggtaaaacgattttttaccacaattgataacagtctgaatgatgaagaatttttcccaacccgtcgcaagtttctcggtgatgatcctgattggtcatttattcacagtctggctggttgcacactgctagatgcattaaaaaacggcggtgagattcatacactcagtgtttggtcgccttatcttgctgaggatttagcagggtttatcgacaatattgggcatgaagtgctcgtagaactggttccggatttggttgagggacgttatatccgcactcgatggagtgacagtattcaggcaatgattacaaataaaaagcttaccgtgtatcgctctccagtgcccaaggacgatagggcattgatgacccacgccaagctctggctggcgaaaagcaataccggtacgcaacttgccgtggggtcctggaatttcaccaacccgggttgcagcagcttacctgaggcaaactggaatgtagaagcgggaattgtgcatccggtctctcgtaacatcacgatttgcggcaaagaatgggatgatgttaatgaagagaatttcgccagtgaagcattgttggaggaagaggcgctggagcctgatgaacttcaacctttcgatctgagcgttatttttgactggactcgatgtgagtatcagatttccgggcaatggttcggtggtaagcctgcgtcaggttatcaactgatattgcccggtatcaacggggcaaatgaattggtatggaaagctaccggtataggtctgaaatcgccccggcaattgacggtattaaaaagcaatgccgtattggataaccctttttatacccttcgtagaactggaataaccgactggcagggcatgatcgttgaaagcggtattgaacaccggcgtgcgttgagctttaagtcgctagatgacttacttaacagctatctgaattcagtggatcccgcattgagtgatcgccttatgctgcgctgtgctggcgcgcaggatgaagagcaaagtgaggggatggcgcaagccatgaatttagatgccactagctatttccgcctctttcaggctatccaacaacggcgcaactggctagcagacgcggacgatggcactcagctgtatcgtcgtttgttcagtgaaccaggttgcttacaggaattggctgaaatagccagggagcgtataaatcaaccgactcagctagtatttaactggtttctggcccaagaagttaacactctggccgctctggcaagaaagcgtgttaaaagcatacgtcacaaacaaggggctgaagccatatctgtggctgtgcacttgtgggagtctctacaggttgcaattccccccctaactagcgatgcaactagcctacgttatctcgctgctatcatggaagactgtagttatggcgaataa

SEQ ID NO: 292224 - DNA, 2655 bp, Morganella morganii
atggcgaataagttaaaacagatcattaccccggttgaggtttcagccgtgatgaatttcgatgcaactgatacgcactggcagtatcaatccggtgcttccagcatggcggcgaagcaggcagagggggtggctgggttgtggaatttgctgaataaacaacgactggcactccttgctgatgaagtcggcatggggaaaacttatcaggcgatgggagtaatgttgttgttatggcaggcaaaacctgatgcacgcattctggttatggcacctaacaggacgctctgtgataactgggagagagaatttagcattttcacagagatacactatcgggctgaacataatgcctttaccactttagagggtaagacaaaatatgccccacaaatttatggcagactggcggagctggcggccgctgtggaaaaaaaatctcaccatttttaccttactactatccattcactaagcggtctggtccctccagatgaaaaaaaagatgctttaaatgctgccgcgtcttatggcgtgttatatcgtcagcagattaagcaagctcttggaaaaggagggtttgacttaattataatcgatgaggctcattactttcgtaaccgaagcggatcacagcgtgccgccgccgctcaggccttctttggtgatgcgcaggaccggctggggagcaatgtactgttgttgacggcaactccaaatcactcagcatcgcgaaatgtttatgacatatttagctacttcagtgacatgccaaaacgttatgcagaggatgatgtccgtgcgctgatgaatgattttgccatccgccgactgcgcaaaatgcagggcagagagagcagccacagcaaatatgaatatcgtcatgagcgcgctagcatttccagttttactaataagatggatgctgagttgttttttgctctatatcagaaacaactcgtggttcaactggacaaagagaaaaaggcaggtggcggcaggcgcatgctatatggctatcttgaagggtttgaatcaacgggcagtaccgcaagtgagcgggataatagtagtgatgaagaggggcaaatccataatgacttcaaccacgcgccggattctgctctgctcaatagcttgacccggcagtttcacgatatctataaccgctttccagatcatcccaaatacgacactctgatagaggcctgctttaccagtgatccgttcaagcagtctcagccgctacattgtagtaagcatttggtttttgttcgtcgaataccatctgtacgcgaaattactcagcgcatcaacgcacgttatgatgaaataatggctgagcgattgatgaatgtctggcagctacctgcaaaggcgctggcagaatggcgagagtcgggttggtcccgagatatttttgttaagcttttatcggaaaaatccaatgaaaagtccgattttgatgagcatatgctggaggacggggagacagatgagcctgaaacggataacgagctaaagctttcaagtaaaattgccgagctatttgttatgaagaaaacgggcctgcgcagtaccgactgcgccaacgttagtttgcgtttccgtcgccctgaaagcctcttttcattatttcttgagcctgcattggatggtacgaccgggacctatcattatcattaccgcaaagagtctggtgaacgtcaacgtgacagctatggtgatgccgcgagagatgcccggctgcagcagtcgacaacagctcagaaaatcaaatatatcactgctttgcccacagcctggggattgatgtttcatgagctgccgcggccagcaaaagagcaattgattaagtggcgtgaccagcctaacggtatggcaattattgagaactttgccaactatcttcgcacgggttacctgtttgccagccctgtgatcattgagctctattgctggtttacagagttcaaccgtcgacctcaaacaggtgaggtccagcagcgatatcagcattttgtagaatgggtcaccccaaaattgaatggatcactgatgctacgttattttgtggctgccattgaaactttcgaaacgctatgtgtgaaaattgttggccagaaactagataatactcaatatacttggcgcgagttcactagcttgagtagtccaagttggtatgccagcgggcagtcaaaaaatcgcgaacgtttaattcgtggatttaattcacctttcttccctaatgtgctggtagcaacctctgtgttgcaggaaggcgtgaatcttcatcttcaatgcaatcaagttcatcattatggcatcgcctggactcctggtgataacgagcagaggaatggacgggttgatcgcctctttggtcgaatcaatacaatgcttcaagtccagggggcggctgagatgattatcaattatccctaccttgcaggtaccttcgaccaggatcagttggcatcatttatacgccataaacacagtgttgaagagaagttagatagttgcgagctggaggattttgacagcgaaattgatattcaggaggatcctcaaggttggcaaaaatggctacggcatccttgtaaggataaagataaagaagatccttacccagccaagtttgatcagtag

SEQ ID NO: 292225 - DNA, 228 bp, Morganella morganii; identical to SEQ ID NO: 147913

SEQ ID NO: 292226 - DNA, 207 bp, Morganella morganii; identical to SEQ ID NO: 147914

SEQ ID NO: 292227 - DNA, 1017 bp, Morganella morganii; identical to SEQ ID NO: 196846

SEQ ID NO: 292228 - DNA, 141 bp, Morganella morganii; identical to SEQ ID NO: 147916

SEQ ID NO: 292229 - DNA, 123 bp, Morganella morganii
atggctcttactgatgctaaagtcagggctgccaagcctttggataaatcgtataaattgaccgatggtgatggtatgcacttaatggtacataccaacggctcaaaatattggcgcttgtag

SEQ ID NO: 292230 - DNA, 1128 bp, Morganella morganii
atgttagcgttgggcgtttaccccgatatctcactcgcagaagcgagagaaaaaagagatgcagctagaaagttaattgcgaatggttttgatcccagtgaaaaacgcaaagaagttaaagaagagcaacagaaagaatttaatacatttgagaaggttgctcgtgactggcatgcaacgaataagaagtggtcagaaggacatagccatcgcgtgctaaagagccttgaagacaatatctttgctgctattgataagcgtaatattgctgagttaaaaactcgtgatctccttgaacccattaaagccgtagagatgtctggacgtcttggggtggcggcacgtttacagcaacgtgtgacaggtataatgcgctatgccgtacaaagcggtttaatcgactataacccagcacaagatatggctggtgcagttgcgacaggtaaacgagtccacagagcagccttagaacttaaacgcttacctgagttcttacaacgcattgatgattataagggaagacctttaactaaacttgcagtcaaacttaccttattagtctttattcgttccagtgaactgcgttttgcccgttgggatgaaatcgattttgagaatgccatgtggacgatcccagctgagcgtgaggcgatagaaggggttaaacactctcatcgcggatcaaaaatgcgtactcctcacctagtacctttaagccggcaagccattgagatcttaaaacagatctatcaattcagcggtaaccacgagctgatctttatcggcgatcataatcctagaaaaccaatgagtgagaacacggttaacaacgcattacgagtgatgggttatgacactaaaacggaagtgtgtggtcatggtttcagaacaatggcatgtagctcgttgattgaatcagggctgtggtcgaaggatgcggtagaaaggcaaatgagccaccaagagcgtaattcagtaagagctgcttatattcataaagcagaacatattgaggaaaggcgcttgatggtgcagtggtgggctgactttcttttcgaaaatactcatgctttaatcactccatatgaatttgcaaaaaaagttaaataccttaactcctatcagtaa

SEQ ID NO: 292231 - DNA, 1767 bp, Morganella morganii
atgaataaaacaatagatactttgccacttaactttcgtattttaataaaattagccccactccctctgattagtggcattattatggcaataatctcaacaatgctaagtttagcaccattatggatcatctataaaatcagccagatttgtttttcaacatcacctaatattcaacaaataaataatctagtttatatcactgtgattattttaattttacgttggggattaatggcaataagtcatattgccgcacatcggggtgctttttatattcagcatcaattacaactcgcaatagctaaaaaaatcagtaaagtaccattatcattttttgctcaatatggcagtggaaatctgcgacgtattatcaatgatgatataaaaagcttagaaggttttttcgcacatatgctacctgatctcgtctcagccatagtgactccctttatcgctattatattacttttttatgtaaattggcctcttgccttattatctctaaccccattacccattgcttttatggctcaacttctcatgttgcgtcgagccaataaacaaaccaatgagtggatgaatattcagaaaaaaattgctaatgaaataggagaatatattaaaggaatacgagaaataaaagcgtttaacttaacctcccatacttttggtaaattatctcaatctatcaattcctctgttaaatggataaaaaataatgtcaaagctagtacaggctcttggatggtatttagtgggatattaacagcgaatctcgttattatagcaccagtaggtgggtggatgtatttaaatcaaaatattgatttatctacttatattttatttttaatgacatcccccctcgtacttgcgccgttattacgactaacatttgtgctaggagaacaagctcaacgaaaacaaaccttaaaacatatcagtatgatccttgaactttcagagcataaacaacatgataaacattttactctccctaaaaatagcgatattacttttaaagatgtctgtttggatcatggtgataaaccgatattagagaaaattagttttaatgcccaagcgggtacaacaactgcaattgtaggccacagtggtgcaggaaaatcctcattattaaaactaattccccgtttttatgattgtacttctggccaaataaaaataggtcaatatgatatcaactactggccagaaattgatttactttctcaaataagtgttgtttttcaagatgtatatctatttcatggaactattttagaaaatttactcatagcaaatcctaatgccttatttgaggatattatcaaagcaactaaagcagccaatattcatcatgttattgaaaaactcccagcaggatataatacattaattggtgaacaaggaaataaactttcaggtggagagaaacagcgattatcaattgcaagagcactattaaaaaactctccaatcctacttctcgatgaaattactgccaatgttgatgctgaaaatgaaattttgatctatcgcgcattaaagagtctatgccagaatcggactgttattatgatcactcataacctacatactattattaacgcagataaaattattgtgcttgataatggaaagattattgatacaggtacacacacccatttattaaaccaatgcccaacctatcaaaaattatggaatgattatagtcacactattcattggcaattaatccaggagaataataatgattaa

SEQ ID NO: 292232 - DNA, 1728 bp, Morganella morganii; identical to SEQ ID NO: 238178

SEQ ID NO: 292233 - DNA, 765 bp, Morganella morganii
atgacggatatattttttgttattgcgatactatctttgcttgccttgatagttggtgtgattaagcctaatgcggtaaaaatgcctaaccgtaagattgcggtgctggtttacctggtcggattttttttatttctcggactcggtgcagaattgtcatcggacaaaacgggtgagccagtaaaacaacaagagcaaaacaatactcaggatcagaccactcaaattaatagcgctccggataaaacaactgaagaaccaaaacaacaagaaacggaatctctgtgcaagtcagactatgcaaccacccttgaagcatttaccgatctcggtgattactatgctgataataattcattggaaattatcagtgaagccccacttcacatacggctttctaatttagcagtacagggcgatcaccctgatgttaaagaattgatggtaaaacgcgccgttatttatggaatatataggtctttcattcatacaaataaggatgaagtgacagttacctcatacctcattgacatgaacaataagaaaaaattacccggctcaccagaatacagtgtgaaaataaccaaaaaacaggctctggatatcataaaaaaatatattccggtgcaggattacagcgatttaattgctaaggatggctatggctgttctttctctgaagattttaaccgggtcagatttaacgatcagaatgaaaatgagtttaacgcgttctttagtgacttatcatccgcaaacaaataa

SEQ ID NO: 292234 - DNA, 222 bp, Morganella morganii
atgaataccatcaataccaccacagcttcttccctgctcaatgatcagttcgttgatatgaaattcatcaccgacttaaccggattatctgataagtggttttataagctgatccagaaagggcagttcccaaaaccgataaaattcggccgcagttcccggtggctgagaagcgaagctgaaggctggctgcaggcccgtattgccgaatcacggagataa

SEQ ID NO: 292235 - DNA, 264 bp, Morganella morganii
atgcgactgctcggaaaatctcgattaagcgccttagactgctcagataaggatatctatgtatggatttcggcgtggattgccgagcttagtaacgccaactggaaagatgaaaaatccatgttggacgcattccctagggcaatgctatcagagggggccttttatgctttccctgtatgcgggaaagattctttgctcataaaaatagcggtttacttcaataggaacactgccgtgattacagaagtggtatataaatga

SEQ ID NO: 292236 - DNA, 1230 bp, Morganella morganii
atgaacgcctttcaaagtctgagagtcatcagaactgaggaacaatatcatcagtacctttccgaggtagagaggttgctatccttagacctggctcctggttctgaggagtccgagcgacttgaattactaactgttctcatagaagattatgagaattcaaactatgctatcgctccagttgacccaatagatgctattaaatttcgaatggaagaaaaaggattgcgtcaagtcgatctggccccttattttggcactaaaagtagagtttccgaagttttatctggaaaacgtcctttaactgttgcaatgataaaggctttatctgttgggttaggtatagcgcctcaaacgttattagggttagaaggtgaggctgaatatacagcaaggaatacggaagatgaagttaattggtctaaattcccaataaaagaaatgatttctcgtggttggataaataacgttgtatctaaaacaaaaaaaagtgcagaagatcaagttagggcattcatcgaacaactaggtggcaacactactgctgcttcattcaaacgaactcttagtggaggggcttattctccggcaacacaatataagctctatgcttggatagccagagttattcagcgttcgcgtgaaaagaaaacaacttttatttatcaaaatgatgttattaataaagattttttaagagagttagcacaattaagctggtctgaatatggaccactgctggctgtagaatttcttgaaaagcatggaattaatgttgttattgaaccagcattgacaggaacattagttgatggagcagcccttaaagataatgataggcaacctatcatagcgctatcgctgagattagatcgactggataatttttggtttactcttttacatgaagtagttcatatatggaagcatatggacttaaataatacatttgtagatgatctggaaagccctggggataataaagataaaatagaggcggaggcaaatagaatcgctcgagatacattaatccctagagttttatggaaacgtagcgatgcttacttaaatccaacaattacaagtattgataaattgtctagggagttaaaaatccacccatcaataattgcagggcgaattcggcgtgaatctggaaaatacaatcaattttctgatttagttgggcaaggtgaagttaggaaacattttcctaatcaaaattggtaa

SEQ ID NO: 292237 - DNA, 1134 bp, Morganella morganii
atgtatcctacatatatgccaatacttagagctaaaaaaggtgagtttgacaccttcaaaaatttgtctgaaaaagtgaaggatggaacgtttcctgtatttgaattacctttactctctgaaaaacagaaaaagacaaagaaatactcctcactcagtacacctatcgcagcctttgtagaaaaatgtgcaattgagttaggagatataatggctaaaagagcgtttgcggttgatattcatcggtggccttcaaatgctactgtagaatcaggagagcatatactcagctatttcataggttgtttaagagataacggctgcaatatatcacctgttattggatatgaccgctgggaagataaggaatatacagcagtccttaggcagttgtcgaaaaatatcaactcatttatagtccgtttggactcttttgcattcgatgatatgattgaagaagaaccatttttcattgtgttagatgatgtaatttcttctatgaatattgatagtagtcagtgctctgtacttcttgattttgatgatacagcaaaaacatcaattatagatatgcaagaaaacgcacagcgtgctgtagagctcttagctgactacaattttaattttatttcaattgctggctgttcagttgctagtgatataaataacatggttcccaaagtaaatactaatggaattgttattaggaaggagctgaaagtctggaaagccatcaaaaaattcaataagaatattaatttcatatttggtgattatggagttgctaatcctcaagttggagatgatgtaatcgctccggatgctaatggaaaaattcgctatacaatcgaagatagttattttgtcgtgagaggttattccagaagacagggagaaaaaggttcccaaatgcatgggttgtgtaggcgtttaataagttccggttactatatagggcctgcttttagctggggagattctaaaattgaggaatgtgctcaaggtgagtttacaggaaaccccatgaattggatttcaattgatacttctcaccacatgacatatgtagtgtcggaaattaaagagtatgaatctctcattttggaagaaaaaacgagggaactttcattctaa

SEQ ID NO: 292238 - DNA, 828 bp, Morganella morganii
atgaagagtagtgttagacctaatattgttgagcctgataactttgatacttttataaagtatcgcagtggggatactcgtaaaaatttattaaatgtgaagaataagataccttattattacaggcattatattggtcatggttttagtattcataggataaaacctaataaattgattttaagtgaaaaaaacacaatgattgatgtatatgaaagttatacatcaaaggcgattgttgagtttcgagatgctttgtttgaacatattccagtgtgtgcttattgtggtttgggggaaacagttcacttggatcactacctccccaaaagtgagtttgcagagtatgcattatatacaaataatttaataccatgttgttataaatgtaattctacttataaaaaaacaggatatgaagaaggtgggaatcgagtatactttcacccttatattgatgaaattaatgactttgaagttctaagatcttctgtcttagtaagggggggaagtataattattcattacaatatagattgtaactctggagttaacgcaagtacggtacatgttcttaaaaaacactttaaacatttacagttgaggaatagatatctaaaatacgctagtacatatttatcaaatatgaaacctgtctttaataatgattatggtttgaatagagatgtaaatgtccttaaacttgcgcttgagtctaagtatacagattctctagcagagcatgggaaaaatcattggaaaactgctttgctaaaaaatttaaagtctaatgaagagttttgtaatggtggtttcttgaatgcttaa

SEQ ID NO: 292239 - DNA, 1503 bp, Morganella morganii
ttgaggtactatctattcacatccaaatccaaagtaagtgaaatatcccagtatccggcaattgtattaaggagagatagttgggacgactttgggtataaaaccacgttagatttaacttactattcttccaaagatgaaagtgggaaatcactaggtcatgtgaaaatattgaataaaagtgatgaagttggatatacagaatttgaaagctctgaatttgattttttaagtgataattattgctctctgggacaaagtgtagattattacaataacatcaaagagctaaacttagaacatgttcttgaagatataaaagattgtgcaataagcgacgtggtaagagatgaatttataaatttgaacggttttagctcatcacttctaagatctagtcgagctgaaaaactactatacgaagcaaagattattttctctagccaagttactgttccaatgaaatcaaatgatgatttttcatttggttatataatacagttaccaaattcaagagaggtgacaaatattgaatttgatttctcggagcatgaaattttaccctatcgcattaatattattgtggggaaaaatgcttgtggaaaatcgcaagttctatctaatttagctctcaaattgtcaggaatggctctggagtcaaaagggaaaatttctagaaaagatgatagttatatatttggagatgttcatgttatatcttatagtccatttgatacattcaaagacatatctgaattaaatggtggcaaagtatcaaaaaacaacatgagttcgggctttttaccatataatttttatgggatacgaaagttagtacatatagatggtgaacaagaagtattgcttaaatctcacgcggagataaaaaaagagttaactagaagttataatgagatccttcgaaaaaatagacgtgatttccttacggaaatactagaaatttgcttagggtggaatattgttattggtaatcctaggaaagttttagacaagtatgattatttaagtagtgggcaaaaaattctatttaagatggttacggattttttgtcttctgtagagaaagatgatttaattctcattgatgaacctgaaacatatttacaccctcaaggtgtgagcaatttttaccactgtctgaataaattattatcatatacaaaatcttattgtattttggctacacactcaccaattttgattcaagagacgccatctaaatacataaatattttgtctagtgttggaagtagcattaaatgtaaaaaaccaagttctgaaacattgggacaaggtttaaattctataattaacgaggtatttaaagttgaatttgacgatttaagcttttttgatactttacaaaattttcataaggaaggtttttctctaacaaagctagaagaaacattaggaaataatctggattttagcgcaagaagttattacatgagcctgagtggtgtgatagatgaagagtag

SEQ ID NO: 292240 - DNA, 213 bp, Morganella morganii
atgatcagaaaacgacgttctttttccactgaattcaaatgcgaagctgccggtctggtacttgaccagggttattctgtggcggaagtctgccgcgccctggatatcgaggaaaccgcactccggcgctggatagaccaactggaaactgaacgcagcggacagaccccggtcagtaaagctctgacaccggaacagcagaaaatacagtag

SEQ ID NO: 292241 - DNA, 624 bp, Morganella morganii
gtgtgggtatgggacatcacctggctgccgtcgtcggtggtgcgcgggcgctggttttatctgtatatgatactcgacatatacagccggaaaatcaccggatacgaagtgtatgagacggaaagcggtgaacaggcggcggagctgatgcagcgcaccgttctgcgggaaagctgctaccgtcagccgctggtgctgcacgcggataacggcgcggcgatgaaatcacagaccttacagatgaaactgcatgaactgaacatcacgccatcccacagcagaccccgcgtgagtaatgataatgcctatgcggagtccgtgttccggacgctgaaatacgtgccgcagtggccgtcatcaggctttaaaacccttgcagaagcgaggaaatgggtggagaaatttacccggtggtacaacgacagccacctgcacagcggcatcgggtatgtcacgccgtcgcaacggcacaccggtgaggatattaccctgctgaaacaacgtgatgcggtgtacaaagcagcaaaagccaatcacccggaacggtggtccggagatacccggaactggcagggaaaagagacggtcaccctgaatccggagcgggaaaaacaggccgcttaa

SEQ ID NO: 292242 - DNA, 300 bp, Morganella morganii; identical to SEQ ID NO: 92293

SEQ ID NO: 292243 - DNA, 1206 bp, Morganella morganii
gtgaagggtatgcagaagatcaagaggggtaagagcttcgctggtgttgttcgttatgcattgcagccaagagcacatcataaaagcgatccagtcgtaatcgggggcaatatgctgggtgactccgctcttgaactgattgctgaatttgatggcaccaaacagcttcggccagatgcccagaaaccggtatggcacaactcgcttcgcttaccagcaggtgaatcactaacgtctgaaaaatggtccagtttcgcagatgactatatgaaactaatgggattcagtgatactcacctccgttgctatgtcctacatgacgattctgccggtcagcacatacacattatcgcaagcaggatcgacctcaatggagggaaactctacttgggtaggaacgaaaacctcatcagcacccggatcatcggtgaactcgaaatcgctcatggtctgacagtgacaaaaacagccccttccattgcaccaaagcaaccgaagcggaaaagaatctctcgcaacgaacagatgctttcacaacggactggccttccctcctcaaaagaagctctccaacagatacttgataaaagtttggcagatacacctgaccttttaactttcacaaaacgactggaagaagcggaagtaacttggacagcgaatatcgcaagcacaggtaaaatgaacgggttctcattctcctaccgcgatatcgctttcaaggcatctaaacttggaaaggcatactcttgggtaaatcttcaaaagcagcttaactacaaccatgaccacttagaagctatacgaaccaacacaccaacaaaagaccaccctgctgttcctgctcccatgccaatacctgttcctgttcctgctaaagatgttcctgttcctgttcctgttcctgttcctgctaaagatgttgcagcaaccgatataccaagggaaagcataagtgaaaaaattgccgaactggaactacggctcagagaagacaaacgacacgaaatcgtacaaaagattcttcagaagaatgcagtacaacagcgaaagcatctcaggctttgtagctggcttccctttttacaacggctcatagagcttctcggaagctacggtaagagcattcttcacaacaaccctgcgagattctcaaaagtctatgcaacccgacttctacataaagaaaggaaaattcatttatag

SEQ ID NO: 292244 - DNA, 345 bp, Morganella morganii
atgaagacttttgatgttaacgggaataacgacctgttcaccggaaacgacggcaatattgccattgtcagtggtgaaccggcggtaaaaaacgtttgtgcgcagtatgtgaaagcgctgcgcggggaaatgctgcacaagctggataaggggatcccgtactggaaaaccaccttcgggcgacaggctgatctgccgctgtttgaatccgcgttccgcgagcgtatgcgggaaattccgcaggtgaccgccgtggtgtcattcagagccacgctgaatgataacgaactgaactatgtggctgtcctgcagacagaatacgggagcattacgttaaatggctga

SEQ ID NO: 292245 - DNA, 315 bp, Morganella morganii
atgtttttccctgacacgctcaaaggctgggtgatcgacggcaaaaacgcggacgcactggtggtgcagtcaacagatggttctgtgtgcttatccctgcatgccgataaagcggtgctggacacaccgttgtttgaggttaatgcgccggaaaccatttacaccgggaatgtgacaattaacggtaaccacgcggtcaacggcaacagtgattcaaacggcggcaccatgaggcataacggtaaagatatcggatctgcccacaggcattccggtgttcagggagggaacggaaattcaggagagccggtatga

SEQ ID NO: 292246 - DNA, 747 bp, Morganella morganii; identical to SEQ ID NO: 278806

SEQ ID NO: 292247 - DNA, 744 bp, Morganella morganii; identical to SEQ ID NO: 278807

SEQ ID NO: 292248 - DNA, 174 bp, Morganella morganii; identical to SEQ ID NO: 290684

SEQ ID NO: 292249 - DNA, 447 bp, Morganella morganii
atgaaaaaaattatcttacttgctggtttattaatgtcttccggttcatttgctatgtctgctgattgcaaaattgcccatgcaatgtttgaagattctgggttggtaatggttgatggtatcagcatggctattaatgatggtgaaaaattaaccaacactacagtatcttatgatgaattttctgtatggtataagaaagtttattctaaaaaaatgaatagccttacaaataaatacagtaaatataaagatgtagaatctaataaccctatttaccttggttttgtctcaatccttgaattagataatttcacaaactcacttaataattacatgaagactcatgataaaagtgatctgtctgatattaaaagtgcaaaatctcgaattgaatctgcatttagtcgtttagaaaaagactgcggcaagaagtatgagcgttaa

SEQ ID NO: 292250 - DNA, 759 bp, Morganella morganii
atgagtggtgtaattattgacactgacattgtatctgtaaatgatacaaatatacacagtgatatgttaattttggcaaacaaactaaatcaactattcacaaagtgccaggtaagcacatatacaaaacctagcgatatatatttaaaaagcgatagtacacttgaagatattcacaaaaacctcccaatttctggcgcatttaaatgttacatgcgtgggtctgaatacaaaaatatcatgcctagactggcaaaaggaaaagatccggcaattggaacgttatgcgctataaaaatggatgcgtcatccaccatgtttacttatgatgcatatggtttctggggtgtttgctattacaatcagtatgaaagcaagaaaatttcagactggatgataaccccgcagcgcggattctggcatcttggtagtgattttttcggcaatgatatttctaacattatttattctggcctgtatagatttgaaacaaattcatttcctggattcccaacaacagaaccatgtgttctttccgtatattatgacactgaatttagaaagcactacaggattactaggaatggaggcccgaatgtctacgagtggacgtcatataatggaaccgtatgggctcaagtgccaacggtgttcactcacaacccatctgctgcagatctcaggattggagatatgcttatagatggaaacggtgatttggcaataaaagtaaattcaaccacagtgaaaacactttaa

SEQ ID NO: 292251 - DNA, 165 bp, Morganella morganii
atgaaaggagcaagaaaactaccacagcttaattttagatggcctgaaaaggacattgaagcagttaagcagtgggcagagaaaaacggaagatctttaaacaatgaagttcacagaattgtgatggattttttaaagaaagaaggtgttttagatgccaaataa

SEQ ID NO: 292252 - DNA, 276 bp, Morganella morganii
atggctaagtatcgtaagaagccagttatcattgatgccattgaatggaatggtaaaaatttacaagattgcatttcatttcttggtgattcctatggcgggataaatacagagcaccgacctgacgggaaaagtgagataacagttttaactcttgaaggtcagcatgtagcgagtaaaggagatgtccttattcgtggagttgccggtgaacattatccgtgcaagcctggaattttcaattcaacttatgatttagtgggggaatctgaatga

SEQ ID NO: 292253 - DNA, 453 bp, Morganella morganii
atgagcaccgcaacaaagatatggctcggtgtttgcggaatactggctgtcagcctgctgcttaccctgcatctgtatggtggtctgaaagataactatcagctgctttcctctcagtttgctgagcaggttgccatcaacaaagactataaatcccgcatccagtcacttcacgaactcgacactatgtacacgcaggagttaaccaatgcaaaaactgagattgataacctgcgtgatgctgttaagtctggcaacaagcgggtgtacgtccgcgctgaatgccccaagagcggagccgataccacctccagcatggatgatggcagacccgccaccctggcgagagacgctgaaccggattattttcatctccgcaagcagcttgaaacaatggatgcccaaattcgtgggctccatgactacataaagactcagtgtctcgctaaatag

SEQ ID NO: 292254 - DNA, 393 bp, Morganella morganii
gtgagtaaattccgattcagtcagcgaagcgagaataacctgaatggtgttaattccgacctggtgaaggtgattcgccgcgcgctggagattacaccggtagatttcatcgtgattgaaggtctgcgcacacaggctcgccaaaaagaattggtcgcagctggtaaatcacaaacaaataacagccgacacctgaccggccatgcagtcgacattatcccagttaacaccaagtggcagattgaagaattcaagccgctgctgaaagccgtcaagcaggccgctgacgagttaggcgtaaaactccggttcggtatcaactggaagaatgatccgtcactgccgattgaaacccgtttcattgatgcgcctcacgttgagattccggcatga

SEQ ID NO: 292255 - DNA, 195 bp, Morganella morganii; identical to SEQ ID NO: 14548

SEQ ID NO: 292256 - DNA, 342 bp, Morganella morganii
gtgccggaattacccgaggtcgaaaccagccggcgcggcattgagccgcatctggtcggtaatacagtgcgttatgttgaagtccggaaccggcggctgcgctggccggtgtcagagcagattgagcgcctgagtgaccggccggtgctcagtgtgcagcgtcgtgcgaaatatctgctgattgagttgccggaagggtggattatcattcatctgggaatgtccggcagtttacgtattcttttggaagaaacgccggaagagaaacacgaccatgtggatatggtgctcggtgacggtaaaattctgcgctataccgacccgcgccgttttggtgcctag

SEQ ID NO: 292257 - DNA, 966 bp, Morganella morganii
  misc_feature (945)..(954): n is a, c, g, or t
atggctataacaacttataattcccttgtgcagaaaactttttgtgataatgctattcgttcagtagtaatgatagatgacgattttattacttattctgactctatcaaagcacttaatagcgagataaaactagatccagtaaaaattgattcctcaaagcgtgctgctactctcgaagaatattttcaagccaagaatatgatctgtgatattgacaacggttcagtaaactttgatgttgaccgcatccgtaagtcagatttggttataatggattatcatttagataacaatgcaccggataaaactattacaatattaaaagaattaaaaaattctgatcatttgaatatgattgttatttatacaagagaggagctcaaaactgtttggatgcaaattgcttcttctctaagagggatcgaaaattgtaatgataaaatacttgaaacagaaaacgatgaattaattgaatactggcagagtgttattttacctgatttgatccacaaaggagaaagggcattaacgagggatgaaactgtactatatattcgagatgactgcctatgtaagcgcattaagaaagcaatccgaaatgatggaagctttacagagcaaaatgatattaattttattgctaagatgatttctgaatatgcagtcgccgaaaatgccgttattccagattatgtgacaaaaagtatggttgtaggggatattgccggtattaaatggattcaaagtggtaatatatttatcagtgtgttccataaggatcaagatgatcatgaaagtgatggtgagaggatttggcaaacactaaacgaatcattaattgaatggaaaccatcttactatcaaattatcaagtcggagattcaaaatactattgaagcagaagcactttctttcaataaccatttagctaatgatggttannnnnnnnnnttccgcttctga

SEQ ID NO: 292258 - DNA, 426 bp, Morganella morganii; identical to SEQ ID NO: 18559

SEQ ID NO: 292259 - DNA, 501 bp, Morganella morganii
  misc_feature (435)..(444): n is a, c, g, or t
atgactcaggaaaggctatatgaactaattcagcaaggtgatctcagcttcgactatttatttattgatgaagcccataatatttctgatgagagcagaggagtattattacacttaaccttagaaaaaatacttgatgacagctcccctcaaattataattagcatgccatcagaaagctaccaaaatacattttctgctgtttttcacggtatcaattttcataaggaaattacaaaacactccccagtcgctaaaatacttctttctgtagaaatgaaaggccgaaatattgagattaaaagattcaatactcctgataaagttataatccccaaaggctttactggcacagcattagcggacgttgttttaaggctaggtaagggccaaagcaatattatctatcgaaatcaaactgatcattgtgagaannnnnnnnnncacttattgataactacgaaacaacgctgggattggaagaggccgcagattatatag

SEQ ID NO: 292260 - DNA, 159 bp, Morganella morganii
atgcggcggaaattccgggcggtaagccgggtgatgatgaatatagtcattaacagcaaaaccacagtgctgataaaaacgcagacggcgttgcgccacctcatccgtcagcggatcaatctccagaacaacccgttatttctcctgacaaaacagtga

SEQ ID NO: 292261 - DNA, 456 bp, Morganella morganii
atgaaacattctttctgtgaacatcctgcatacaccccgtcaccatccgaagataattcagcattaccaccacagaatggacaggtgtccagtgactgccagtgcggtaatttaagatcaaatatcatcacccctccggttccaggccgagatcgcctcagcttcatcaaaacgtttcatccgcacaccgcatccatcacaggcaataccgtacaatgtcagcccgtggctgctggggcggtgtatcgtgatatcagcacatccgcaaaacgggcacggtttaagtttctgcatttttctgatctgcttactcaccccccccgctgtttttcttcatttcacggcgtttcgctgctaataccgaaaatagtctgttatgtacggatacaaattcccgctcggctacatcctgcccgcagggtttatttcttccgaatggattcttcttttttttga

SEQ ID NO: 292262 - DNA, 429 bp, Morganella morganii
  misc_feature (364)..(373): n is a, c, g, or t
atgtaccgaattggtcagttagcaaaacttgcagaagtgacaccggatacgatccgtttttatgaaaaacagggcatgatggatcatcagacccggacggatggcggctatcgtttgtatactgagcaggatctgcaccggctgcgttttatccggtatgcaaaacaattagggtttacactggaagcgatcacggaactgttatcgatccgggttgatcctgaacatcacacctgccgtgaatcaaagcaaattgtggatgatcggctgaaagatgtggaaacgaagttagtcgaaatgcagcgaatgcgggattctctgaagatgctgagtgatgcctgttgcggaacggcacatgtcagtnnnnnnnnnngcacatgtcagttcacaatgcaccattctggagatcctggaacaaggtgcgactga

SEQ ID NO: 292263 - DNA, 288 bp, Morganella morganii
atggcgaaactgcatgattactacaaagacgaagtagttaaacaactgatgactcagtttaactacaattctgtcatgcaagtccctcgggtcgagaagatcaccctgaatatgggtgttggtgaagcaattgctgataaaaaactgctggataacgcagcagctgacttagcagcaatctctggtcagaaaccattgtctcactgccatatccacaaatatccatccaaaagcacgcaaatctgttgcaggcttcaaaatccgccagggctatccaatcggctgtaa

SEQ ID NO: 292264 - DNA, 312 bp, Morganella morganii
atgcagaaccaaagaatccgtatccgccttaaagcttttgatcatcgtctgatcgatcaatcaactgcggaaatcgtagagactgctaagcgcactggtgcgcaagttcgtggtcctattccgctgccgacccgtaaagagcgttttaccgttctgatctctccgcacgtcaacgccggcagccagatccagacgcatcagagcatcaacggttttttcagttggctcaacgatgtcaaccagacgtttgtgagtgcgaatttcgtactgatcgcgcgcatctttgttgacgtgcagatcagcctgggttaa

SEQ ID NO: 292265 - DNA, 378 bp, Morganella morganii
atgaaaagcactgttaatttaaacagtattaatttggtcaatgacgactcactcagctatatcaaaaccctcccggacaattgcattgatttaatcgccacggacccgccgtattttcaggtaaaaacatttgcctgggataatcagtggccggatgtttctgcttacctgtcatggctgaacgaaatgttggctgagttctggcgggtactgaaaccaaacggcagcctgtacctgttttgtggttcacgtctggcctcagatacagaaatactgttacgggagaggttcagcgttctcagccatatcatatgggcgaagccttccggcccgtggcggcggcaaaacaaagaaagccgccggagattattttgctga

SEQ ID NO: 292266 - DNA, 1026 bp, Morganella morganii
  misc_feature (937)..(946): n is a, c, g, or t
atgatgaaaatacgttcactgagatttaaaattgtatcattatttatgttgctgatggtggcaaacgcaggttttgtcacactgatcctttatcactctctgaaaaatgaacttgcctcaaaagatgatgacatcctgattaaccgtgctgaccaactggctaaactgatagtcagtggtattgatattaaatcgttacctgtttatttccggcggatgatggatatgcggcaggatgttattaagatagcagatgctgataatcacgttattgtggataccaacccggagataaccctgaatacccgggacaaacttaattatccggataatcaggaaacgcctttaatctcataccagaatacggatgataacatgccggtttccgtggttaattttgagattcaggctcctgaaggtaaattatatgtcactctggcaaagcgttcggttgatcgcagcagtgttttacgcggatatttacagcaaagtctgattgtttccgttattgctattcttctgatggtcgtcttcagtatatggcttatccgccggggattgcaggatattacgcatctcagccggatcaccgcgaaaacagatctgcactctctgggacagacggtggatatcagccgcttaccggatgaactgaaaagtttgggtgattcattgaatatcatgcgctcacggctgaaaaatgattttgtccggctgacacaacttgcggatgatttagcgcatgaattaagaacacccattaatgccattaaaattcagaatgaaatcacattacaaaaaacgcgcactgcggatgagtatgaagcgattatcgccagcaatacagaagagctggataaactggcaaaaataatacaaaatattctgtttatcgccagagcagagaataaaaatattaatctgaagcgggaaaccnnnnnnnnnnggttgaggatatttatgagttactggcattttatgccgatgagaaaaatatccggctggttaataaaatatcggatgtga

SEQ ID NO: 292267 - DNA, 318 bp, Morganella morganii
atgcagattatggttaatgttgtgtcaaatgcggttaaatattcatatgaaaatacggaggttattgcctgtgcagaaaataatcatggcagcaccgtcatttcagtgatgaacaaaggtgatgttgttgcaaacagtgaacaggtctttacccgcttttggcgcggagataatgcgagaacgtcagaaggaagcgggctgggcttatcgattgttcaggcaataatagaattgcattcaggtgaggtcagatttgaacgtaccgggtcatataacacggtaaccttaatttttccggatactcatcccctttcatga

SEQ ID NO: 292268 - DNA, 348 bp, Morganella morganii
atgatagaggcccttgagggatgggttcaaatttacagcgatgataaggacgcttatgccctcaaagttaagggtgacagtatgtggcccaggattcagtcaggtgagtatgtggttgttgagcccaacacagtagtcagatccggcgatgaggtctttgtgcgcactgttgaaggtaagaatatggtaaaaatactgaataaaaccagagatggtagttaccaattcaccagcgtcaacaatactcacccgccaatcacagttgatccacgtgaagtggaaaaaatgcattatgtggcagcgattgtaaagccgactaagtttatcgataagtgcgaacaatcataa

SEQ ID NO: 292269 - DNA, 189 bp, Morganella morganii
atggcgcatgaaattaaattagagacggtgaccaataaagcagctcaattaaacgcattattgttcacgattagcggtgaattcacaggcaacccaataaccgacaatctcatcgaactggctcatgagttatctgacagcgtcgcctgctggttgattgaagaaaacgcacatagaaaggagtcgtga

SEQ ID NO: 292270 - DNA, 327 bp, Morganella morganii
atgcagatgagatctcttagctttaaagcgagagcaaggacaattgaacatctcggcaaggggcagattgcagattgcccaactgctgtaagcgagctttggaaaaatgcatatgatgcttatgcaagagatgtggcattatacacaatagatggcgattacccttgcggtgcccttatagataatggttgcggaatgtccttgcaacaaattattgataattggcttgttgttggcaccgaatctaaaacgagaaagaacaccttagaggaaaatgagagatacgggttttcgaaaagcctccaatcaattagtaaggcaacataa

SEQ ID NO: 292271 - DNA, 162 bp, Morganella morganii
atgaggagtaaccatatcagtgagttctttttcccatacatcaatcggaacaaggatatttttgtacatagttcctccgatattcattattcactcagattaataatagaccagattggccaaaaagtgagcaaaaaacgttcggcagttattaatcaatga

SEQ ID NO: 292272 - DNA, 1269 bp, Morganella morganii
atgtataagttacatcaagtccatattagcggtttttggggaaggtttaatgtgtcatgtggttttaatgataatgtaaatatcattatcgggaaaaatggcacaggtaaaactacttttatgaatatacttactgctgtcttatctgtcgatttagattctctaacacctaatgattttagttcagttaaaataattcttaaagaaggaaaaaaaacaaaaacaattaaagttagttttgaagaggatagatttagatcgcattatcttattaattatgttatttcaaacaaaaaatatagcataagaggttttggtgataatagaatgcctttatcttatagaagaaaggtaaaggaggaggcattacttttaaaaaatgaaataaatagtttttcatcactttcgtctatatctgtatatcgaatgagaagcagtgaagaccttgaaattagaggtaatcatagtgtcgattacataaaccctgtggattataaattaaacgaacttttgcaatctcttactcgttatcagctctttttaactcaaaggtcactttcagtatcaaataaacttcaaaaagaagttcttgcatcgatactgtatagtaaggaagattccaatgatcgtggattcgatttatcttttgataaagcgaaagagaaaaaagatttaatgtcagcttttgagcaattaaatgcatttgacactgacattaaggcaaaaataaactttcatgtggaatccatagataaaactattattgatttgaaagaaatctctaaaggtaatgatgggattgacggtagctataaaattgatgttagatcattagaggcattaagaaaaacaaaaagaatcgttaagatgtcattaaaggcaaaaactgaaattgccaaaatttttaaaccaatagatctttttttagatatactaaaagagttcatggaagataagaaatttacctttaataatggagagttatcattaagtaatgaacatggaagtcttgaacattcaagtttatcgtcaggtgaaaaacaattattaattttatttattgagacacttattcagcaaaataaaaataatatatttattacagacgagccagaactatcattacatataacatggcagcgccaaattataccagcaataaagaaacttaatccaaatgctcaaattatagctgctacgcactcgcctgaggttgcatcaaaatatagagattatattttcgatatggagagtatgattaatggctag

SEQ ID NO: 292273 - DNA, 837 bp, Morganella morganii
atggctagtttagaatattcaaacgatgcaattaatatattggatatgtttcacaaggtaaattatatagtttatgttgagggtgctgatgatatttgtttctgggagcttatattagaaaaatatagtgatttgaaatttgaaattcaggatgttggtgggtgcgaacaactaaaggaatacatggataatatcatttctggtgatctaaatgtaattgtggctactgattttgattttaattttttttcagatgaagcagtgttgcataaacgaattttaagaacatacggatattcaatagaaaatacatttatcagttatattacagttaaaaaagtaataaaagctttaggtaagctaaaagataaggaactcactgatatcaacatatcagggtggttagaagaaacacataaagttatgtcagatctgataaaattagatatttataatcatatattcaaatgtggtaattgtgttgttggagataccgcacataaatttcttgaaaataagagttcaatttctctgtctgctgatttgattcagacctatatggaagaaataatatcttcgattgaagaatatgatgtatctataattaataatattttgcgcaaaaaaagaacagaaacaaaacgttgggtaaaaggacattttttattttcagtggtggctaactatattagaatagtattaaagagattgggtaaaaaaatatcgatatctgactcttctttatacgctagttttattttgatatatgaaagcgagttaaatagaaataatgttgaaaacaattactataaagaaattgttagtaatgtttcatag

SEQ ID NO: 292274 - DNA, 198 bp, Morganella morganii
atggataacccaactaatttaactactgagatattagccaagatagatgaagtttctgtttatcactctggtagaaactccgtagagatgaaccgtaaactagaaagtggtgattggatattaattggagttgctaccggccaagatgaaaccggatacccaataacacaatactctcttggtcgattccgcctctga

SEQ ID NO: 292275 - DNA, 384 bp, Morganella morganii
atgaacaaatatcgtgacaaatcagactttgagattaataaggatgtggctattgccattggattcccttgttattacggagatggcagttatacaaatgggcttgggcttcgcgccgcagtggtgaaagggaaaaatattaacggtaattatatggttggtggcttcgacccctgcaacaacccagcggacgcaatgccgattattattgagaatgggatatccataatttttgacacgggatgtaaggcatgggtagcaggaattgcttattggttagatggttgcgagtggcaaataagttatgaggtggaaagaatgaatcaataccgcgccgctatggaattattcctgatgatgaaggatgcggagaatgagaaatag

SEQ ID NO: 292276 - DNA, 195 bp, Morganella morganii
atgactattattaattttaaagaaaaacaacaggatagaaatacttccttatcgaaatctaaaagtttcgaacgaaatttttttactgttaataatactgaaaatgtagtgagcttttcaaaaactaaaaaaaatgaatcatttgagctagctaaagaaaaatcaaggcaatcttccttaaaaatcaaatggtaa

SEQ ID NO: 292277 - DNA, 1707 bp, Morganella morganii
atggcggtgttagcaaaaaaaaagatccagcagtcattaagtaataaaacatcaactgatgataaggatatgattgaaaaaattaaggccagaaggtctaatgaaattattattggcttatgtggtgctattggctcaggagttaagaagttaaaagatatattaattcctgagtttgaaaaaatagattataaagttaagcatataagattaagtaaactaatttttgaatattgtaaaagtgatggtcggtcgttagatgatttagaaggatatgaaagatataaaatattacaagattatggtgatgatttaagagagaaatacgaaaaatcattcgtcgctcaattagctataaatcaaataaatatattaagaactgagagtataaataaggataatggtttacgaaacgttggtgatgatgatattttaaaaactgacgaaaaagtcgtttatatagtagatcaattcaaaaaccctgatgaagtgacattgtttaaagaaatatactcggatgctttttatttaatcggattgttgagaaatgaaaatcaaagaaaacaaaatcttaaagatgaaaggatatctgaagatgatatctctaagttaatcattagagataggaaatcagagaagtacggtcaaaatactgaagaaacaatattgagttcagattattttataaaaaatattgataataactatatattaagagccgaagttagaagatttattgatttaatgcacggtgcaaataatgtaacacctacttatgatgaagtgggtatgcataatgcatattctgcatcttttggatcagcctgtttatccagacaggttggagctgcaataatggatgataatggcaatatattgtcaacaggttgtaatgatgttccaaaatttggcggtggattgtatcattttaatgatgataatgatatgcgttgctttaatcgaggtaaatgttttaatgatactcataaagggtacttaaaaagagaaataaattctattttagataactcttttgatgattttttatcatcatttgataagacaattgaaagttatatctcattagttagtgagtgtatagagaatgcaaaggattgtaatgatgaggaaatgaaaaaaataaaatcatatatagagactcttcctaagttaagatattttttttcaaataaactcgaacaattaaatgtttcagaaaaaataatggagaatacgaaggctaagtctctaatagagtattcaagagccgttcatgctgaaatggacgcattattaacattagcaagaacaacatctagttctacattaaataaaacattatactgtacaacatatccatgtcataactgtgctcgtcatattattactgctggtattaagagggtggtatatatagagccatatgaaaaaagccttgcaatgcaattacataatgatgcaatttcactgtctcaagatgatgagattaatattaacaataaagtgtcatttcaaaactattcaggtgtttctcccaaaagatattgtgatttctttaaatatagacataagcgaaaaaatgacgacggaactgtgaagacaatacattctatggatgtccctcatgtatctcaagtacatcttgatagttatgttgaatacgaattaaaaatagttggtgatataataaataaagaagaacgctaa

SEQ ID NO: 292278 - DNA, 441 bp, Morganella morganii
atgtctaaatattcaaatttatggcaagtgcttggagaaacattatgcaagcaccatgatgtaaagcattctcgttttattgaaggctatgaagctgaatccactattcgtaaaaaagcacattttttgtttctccttgaagttgcgttattcgaataccggaagaatgaaattggtatctggttcaagcaatcaccggaagaaacgctgtattcgtttgtttactcaaaaattggcatgcttcctgagcagttcgataaattaagtaataaggctaaattaatggttttgcataaaccacttaccgaactggtgcttcctgaagcggctcaaacccacttaaataatcttgtaaagccagtagtttctgatgactttgagatagatccttttgaaggttggaccctgggtactggttggcagtatctaaagcaagaatag

SEQ ID NO: 292279 - DNA, 324 bp, Morganella morganii
atgactgaagtaaataaaaaaagcagccaggtagtcgttgacccggctgatatgacaggcgttgatttatatgagcgtctgtcaaagcggttttacccgttcgttcgcgtctatcagttaacaggttttgttaactctggtgttgccagattggcgagcgacactgagaaagcgcttagcgcagctattcttgctttagatactgccaaccagtacccagggtccaaccttcaaaaggatctatctcaaagtcatcagaaactactggctttacaagattatttaagtgggtttgagccgcttcaggaagcaccagttcggtaa

SEQ ID NO: 292280 - DNA, 213 bp, Morganella morganii
atgcaaacagaaccaaccatcaccaccagcaacatgtcagcagaggatattgctgtgtggatcatcgaaaaagcaaaagacattaaccacctgcagtcacttcgtgctgaccgccaaaaggctatcagcgaccacgaacgtaagctggatcgctttgacgaagatatcgcagattacgaagcccgctgtgctttaacagtaaaaacgcagtaa

SEQ ID NO: 292281 - DNA, 192 bp, Morganella morganii
atgagcagattaactcatttagcaggctttgcgcaactccgtgctgctccctttaagggtggtaaagaacctgccgaatttgtctatacggtaagagtaccggaaggatttgaagaaacaaactaccagttcgtcgaatgggcggtagatgattttaacggaatggcagaacaagtgagggcggcagcatga

SEQ ID NO: 292282 - DNA, 189 bp, Morganella morganii
atgaaagaaacagccgacaacctgaaccggtattacaaggatcggaacggacgtgttgtaaacgtcatccggtatgaccgggagagagagcgtgtaattttcatgattgacggatatgagcacgaatgcggtgagcctctgaaaatattccaggagcgttacacgcgatttgagaaggtgaagccatga

SEQ ID NO: 292283 - DNA, 888 bp, Morganella morganii
atgagcatgattctgaccgcccgtgctttgcagattaaaacgggtaaccctttgcgcaagctggtgttggtaaagctggctgataacgctaatgaccagggtgaatcctggccgtcagtgacctatatcgctgagcagtgtgaaatatccgaacgctcagtacaaaaccacattaacgcactggttgaaatgggcttggtccgtgttgaattcagaaaatcagccaacggtttaaaccagtcaaatatttatcatttacgactaaatgccgctgctgacactggtgcatctcctgcaccatatggcgcaaatcctgcgggggtgagtggtgtaactggttccggcactggtgcaggagattcaccaggtggtgcaactggttccgatagtggtgcaggagctgcacccagaatcagtcatgatccagtcatagatccagataataaaaatattaatctctcgctggaaaaatccaaaaccaaaacagcaatgccggaaagttttcagccgtcagctgacaataccgaaaaagcgacaactgcagggctggatgtgcaggaagagcttttgaagttcagcgactaccatcgcagcaagggcacgatgtatgccgactgggatgccgggttcagctactggttgcggcaggcagggagcttcaagcgagcagtgaatccgaaaaacatcgataccgtggcacgggatgaagcgtttgcccgcatagtttcctcacgttccaagccgcgcaaccgcatcgaggcaatagcggctgagttagctggtaaggcgtgtgttggccgcatgtctgaatttatgggtcgtaaggcgtggatcaacatctggaaacaagccgcagagcaggcagcaaaagagcaggaggcagcatga

SEQ ID NO: 292284 - DNA, 249 bp, Morganella morganii
atgatgatgcgttcagagagcaaagagatttacggcgtgaatgttatatcagtgctggcagtcctacatcaggttcgccggtggagggtattgcgtgacctgaaagaccactggaacagccgccataaggtgatccgcatttgccgcagtcgtggctggcatgaccatatcaggtttgaaaacatcgagcgtcagtatttcatgacccgtcaggcagctaagcatcaccagcgtgagggggttatctga

SEQ ID NO: 292285 - DNA, 387 bp, Morganella morganii
atgatgctttatgcccacatcgcagcaactgaatcggcaggcactgaaatgacaatcctggacatgatgaaaaaataccgggtttatcattcaaaagcctggtctgcgttccgtgtgctggagaaaaccggtgcaatagaagttacccggcgcaaaggtaaaacatctgtattccggtttacggctgacgcagcggaattaataaaagcctatgaagcggatgtttcgtcgcgccgccgtctgccaaggtcagaagaccgggtcactctcactgaacaggatatctctgaatcagcattcaaacaaaaacagaaccagttgatagcagcatttacggcaaaacagcgggtactgagaaaggtaaacgggatcagaaatgacggataa

SEQ ID NO: 292286 - DNA, 408 bp, Morganella morganii
atgcacgacaaattaaccctgcaccttccgttcccgccgagcatgaacacatactggcgctctccatcccggggcgctttcaaaggaaaggtgctgatcagcgaaaaaggtcgccggtttcgtctcaatgtgattgcggatgtactggagcacttcaaaggcagaacgccaaagccgatcaccggtgatatcagccttatgctgtttctgttcccgccctgcaaccgccgccgagatctggacaactttatcaaagcaatacaggacgcactgacgcatgcgggggtctggcaggacgacagtcaggttaaacatcttgatattgaatggggtgagaaagttgctggtggtaaagccgtggtgacaatcagcccttatgtaaaacgcgcggtatacggctgcgcttaa

SEQ ID NO: 292287 - DNA, 789 bp, Morganella morganii
atgagcaatctgattattgtggacgggattaatgtgcggcgtgatatcgccggccgctactgtttaaatgatcttcatcaggctgctggtggagaggaaaaacataaaccaccgtattggctgagaaatgcgcagactgagcaacttatcaccgagttgcaaatatgcgactcggctccggagccggtaaatgtcctgcgtggcgggattgagcaaggtacatacgtctgcaaagaattggtttattcctatgctatgtggataagcccggcgtttaatctgaaggtgatccgcacgttcgatacagtgtcaggtcagttgcaggttatccgcctggcagaccaggtacaggcgggaactattcttctggaatccatggcaaagatgctgaacctgtctaattcatcaaaattaggcggctatcagaaattacagaagatggcaggattgcccgacctgacaccatcgtatgccatcgatgcgcctgccggagctgcagacggatccagccgcccgacaacctccatgaccacactactgagaaatcacaataccgccatgtctgcggctaaagcctataagcgcctggctgagttgggtatcgttgaacagaaaacccgtccaggctcaaaaggtacacaaaaactattttggtcaatgacggcgcgcgggctggcatacggtaaaaacatgacatcaccgatgaacccacgggaaacgcagccgcatttctttgagagcaaatcatctgagttgctggcgctgatgatgacaccggcggtggcctga

SEQ ID NO: 292288 - DNA, 1017 bp, Morganella morganii
atgagttatcttcttgccggttatatccagagagaagcgcggatcctgttatttaatccgggagccgcatctggggacttttacagcggtacacgctatgtgctgagccgcgcaccggaatttatggcacatctaccatcagggaaaatcccccatgatttacagcctctgctgaatgatgcacggatcctctggtttatggatcagcctgaggtaatcgaggcggcgggcggcatggcatcattcagccacttcattacattcgttaaagactgtcagattaaagatgatgcagatccttaccatcatcatgaactggtcatcacaaaacacaaaggcgggtgcatccggacgtgctggtatcacgataacgttatcaggaaaggtaaggcccaccagcaacaggcagataaaatcatgctggataatcgccgcgtgtggattgttaacagcattctgacagatctgctgctcccggatggtcactttctgaatccgtctgatttattcacctggtctgttatgcactgtatcagcgatcacctgcctgaattcattcacatgtacgttctgtgtgaaaaagaagaccggggtgatgcctggcagataacagagcattctatcgtccagcgggatcgtacatttcagcagtgcgttcaagacagaatcgagcagataaagccggtggtaaagatagcggttgaccctgagccaccagccagttttttcaaaatcccgaaactcaagcggtgggaaaacaccaaatacctgcaatgggttaaaagccagccgtgctgtgtgtgcagccaacaggcagacgacccgcatcacatcatcggacacggtaccggcggaacagggaccaaggcacacgacctgttcactatcccgctgtgtcgtgttcaccatgacgaattacaccgcgaccggaacgcctgggaagcggagcacggcagtcagttagatttactgttcagttttttaaaccggaccctcgggatcagagcctttggttaa

SEQ ID NO: 292289 - DNA, 378 bp, Morganella morganii
atgagagatattcagcagagttcggaatgtttagtgaagagccgaaatataaaagactggttggaagcctgggggaactggagttcgtcacgcaccggaactgagtacaaaggggtgtcctacatgtcagtatcttctgccggagaccggccgtggctcgatgatattgaaggtatggttatcgatcaggcggttggcagcctgaagaaatacgatacagacgggtataatgttatccgcctgcactatcagaataatatttcatgtcgtgccattgctaaagaatggaaaaaacgcccggattacgtcacttcatatttgtcacgggcggaagcgtatattgctggcgtaatacataccacactgaagagtcattga

SEQ ID NO: 292290 - DNA, 177 bp, Morganella morganii
atgcgggataataatatgaaaaatgaaaaggtactccctttaatcaatgaagctaaaatggctgagtgggagctaaaatttgttgagccgcgcaaagccaataaaaaagcctccgacggggcgttacctcaaaaacaaaattccacatcgaataagtgtgttagctatttttgttag

SEQ ID NO: 292291 - DNA, 195 bp, Morganella morganii
atgcgtatgcctgaaaaatactccagccccgtagcttatatatggggcttcattgctgccatcttcggtgttatgtcactggatcagtgggctgtccttatcggcataatctgcaccatcgggacatttgccgtgaattggtactacaaacgaaaagaattccagcttaaatccggagggcagagtgaacaataa

SEQ ID NO: 292292 - DNA, 159 bp, Morganella morganii
atgtcacggaaccccgtagcactgattattatcgccatcatttcactgacagcttgcctgctggctggctgttatctgtattcactcccgaattactgtaagccgctgccgggatatcctcaggcgtctgtgattcattatgagtgtgaagcaccatga

SEQ ID NO: 292293 - DNA, 522 bp, Morganella morganii
atgaagaatgtattttcggtcttactaaatggctggctgtgggccgtagtgttcttcgggttatggatgctcagcttgttgtcagccgaacaatcggaagggcggcataaagacagcgtgatcactgaccagcaaaaggtgatagataacgcctacaccagcttcgatatctttgaccgcgctgctgctgcaaacgccagccggaacatgcagacggaagccaaatcacaggagaagcagattgaataccgaaccatcatccgtaaagagtctacctgtaatttgtacattcctcagtctgtttctgatgggttgctcggccactactacaccttacgggaatcagcaatgcgttccgatcccggcatcactgacgcaacccgtactggtgtcaccccctcccgccgactgacatattgtcaagctattgagtggatagaatcattattgaaagacctagataaagcaaatggtcaactgatggatatacggaaaattatgaataatggaatgaaagactaa

SEQ ID NO: 292294 - DNA, 315 bp, Morganella morganii
atgaataaaacactatcaagccatgaaattagtcagatattattaaatctaaataaactcactatccttagtaattcaataaatcatgatgattcatttgaaaaccttatttctacaataaaaaaatcaagcaacctctcgattatcatcgaaataacaaaggataaaacttattacatatatgattcatacaataatctatgggtagaaactaataatatatcattctataattttcaagttactcactcttatgattgtaacaacagtgatatctttaatataaaacttagtctttcattccattattcataa

SEQ ID NO: 292295 - DNA, 852 bp, Morganella morganii
atgaaaaaaagcaacctgccggcagcgccggagggtcgcccgtgcgcgtcggttcattatgaactcaagcctaaggcgctggaaaactggaacagcggtataaaagcggccagttctgataataccatttccattcttgatgttatcggcgcagacatgtggggtgacggtgtatcagccaagcggatctccgctgctctgcgggcaatcggcgacagcgatgtcattgttaacatcaacagtcccggcggggatatgtttgaagggctggctatttataacctgttacgcgcccacagcggaaaggtcaccgtaaacgtcctcgggatcgccgcctcggctgcgtcgattatcgccatggccggtgacgatgtactgatggggcgcgggtcgttcctgatgatacataactgctgggctatcagcatggggaaccgccacgactttgcaaaactggcaaaagaccttgagccctttgataaagccatggcgggtatttatgccgcccggacggggcagagtgaagaggatatcggtcagatgatggacgacgaactctacatcggtgccggggatgccattgataacggatttgctgacggtctgctggctgcggatgcactcgaaaacggtgacgacactccgcaggccgctatccggaaaattgatgcactactggcaaaaacaaacactccgcgctcagagcgccggaaactcatttcagctttagcaggaagcatgccgggcgctgtttctgatcctgacggtatgccgcgcgctgccggtgacgtaaaccaacaaaccctatctgaactggaagaggcggtaaaagcctttgctccggcctgttaa

SEQ ID NO: 292296 - DNA, 249 bp, Morganella morganii
atgaaaatgtgtgtgctgcgggcattttatttcaacagccgggtggttacagaaggtgaagaaattgaaacatcagaacttcacgggcgcgagctgatacaaaaaggttacgccgaagatatcacagataatactctgccagagccagagccagagccagagccagagccagagccagagccagagccagagctagagccagaaacaccaactgcggcgggatctaagcgtggagctaaggggaaataa

SEQ ID NO: 292297 - DNA, 321 bp, Morganella morganii
atgctttctctggaacgggcaaaacaacaggtaaggcttgatgctgattttcatgatgaagatgaattgctgaaatcttacatcattgccgccgggcgcatggtcgaaaaaaccacacgccgcaccctgatcggtgaagctgatgaaaacgccgatccggaaaccacgctgatttataccggcgatatcgaagttgccatgctcctgctggtgggcagctggtatgcaaaccgggaatcagttgtaacgggtgaatcggttacggttctgccgctggcggttgacgctttactgcaaccttatgtgaggtatctggaatga

SEQ ID NO: 292298 - DNA, 336 bp, Morganella morganii
atgagtggattacgtgcaggcgaactcaacaaacgcatcacccttttcaaacccgaacttcaatccggaaacctcggcgatcctcatacagaactgacgaaaatcgccacggtatgggcgaaagccgaagcgatgtccaaccgtaaaattcgcaccggtgaccaggagcaggttattgaaaccatgcaatttaccgtacggccacgaccggatgttcagattgactgggtaatagaatatcagcgccggtactttaccgtccgcgcctgtgaccgcaacgacccggcaaaactcattattaccacggaggcagatacacgacatgatcgaaagtga

SEQ ID NO: 292299 - DNA, 390 bp, Morganella morganii
atgatcgaaagtgacattcttgagtctctttccggtatcacccatctccctgttttccccctgctgctgccgaaagaagcacaggaaggcatcacctttcagcgcatcagcgacccacgttacagctccggcatggtaaccacccgtctggtgaaggcacgttttcagataagtattcacatcctgaataactacgaaaaagccctgcaactggataaggcaatctgtgaggcgtgggagccgattgtacacggttatatcggtaattatccggtacaagcggtgcagcgtggcggaatacagcagaaccgggaagaactgacaaaaaacagcgtccgctggtctgttatgcgggatttcatcatcacctatccggaggatgcgcagtga

SEQ ID NO: 292300 - DNA, 402 bp, Morganella morganii
gtgataacccgaattgaaatatccgggctggatgaactcggtcgccggttacaacagcttgatgttgagctgaaaacaaaaaatctgcgtgaagctgggcgcgaagcaatgaaagtggtaaaggacgatatggagcgccacgccggattcgaccctaaagggaaaggtcagcacatgcgtgaaaatatcaccctgagaaacacggaaatcaagggcaccaacggcggcgttatggtcacggttggtccgaagaaagccgattacatgaaagcccgcgcacaggaattcggcaccattaaacaggtggcaaaaccctttatccgtccggctctcgactacaacaaacgcgcggttctgaacaaattatcacagcagatccgccacgcactttctatgtattaa

SEQ ID NO: 292301 - DNA, 351 bp, Morganella morganii
atgaacggtctgaaagcatcactactgacggcaaaaccggagatccgcgaagttgatattctctgtggtgtaaaagtgaatatccgccgcatgacagccagtgaactgatggcgctggagcagaatgtttccgatctgaatatcgaagggaaagtgcgcgaagcatcactgctgaacgttgatatgctgctcaattgcattgtggatgacgcaggtaaacccgtcaccaaatccctgttaccgactgcggacgaaatggttgatgtccacgataacgccattctgatcgacgcgattaatatcgtcaaacgccactcaatcggtaccctcgaagaagcaaaaaaaaactaa

SEQ ID NO: 292302 - DNA, 3303 bp, Morganella morganii
atggcgaatcttgcagatctgcgcgttggcctgttacttaacgatgccagtttccggtcaaatatcaccagcgcaatgaaccacgccgggcgggaaacgaaaaaattctccgataaatcaaagcgtgatgcgaaaggtgttgaagatggatttaacagtatcagcaaaagcatcaccaatgtagcgggtaagctggcgttacttgccggcggcgggctgtctatcggtagcattctttccgtttcccgacagtatggtcaggcattatctgatcttagtgctattaccggcgcaaccacagagcaaatgaaacggtacgacgaggctgcgcgcagcatggggcgcacgacggaatttggcgcaacaaaagttgccgatgcaatgaaattactggcatcagcaaagcctgcattacttaaaaccgccggagcactcgaagaagtaacagcaaaatcaattacattagcgcaggcatccggtattgatcttgctgaggctgcaaaatcgctgtctctcagcctgaaccagtacggcgcatcggccatctctgcggagcgctatattaatgtgctggcagcaggtgccaaatatggcgcatctgaaatcaatgaaacctctcaggcgattaaaacgagcggtactgtcgcggcacaggcgggcatcagttttgaagaactgaacgccgctgttcaggttctggcggataaaggcattaaaggcgctgaagccggacggatgatgcgtaacgtcattctgacactggagcgatcagcggataaatccctgcgtccgtctattgtcggtcttgccgccgcgctggataacctggataaaaagaactacaccaccacggcatccgttaaattattcggtcgcgccaatgtcagcgcagcggtaaatctgcgtgaaaacaccgacaaactgaaagaactcacagttgcacttaccggaaccgacaccgcatacgatcaggccagtatccgggcgaataatctcaatggcgatctggaattactcggtacttcatttgaaggattggcgctctctatcggacacagtacagacgggcctatgaggtcaggcattcagagtattactgccgcagtaaacgggctgacagataatttttccaccctggctaatatcgtgacctatgccgttttgccggtaatggtgtcgagaatgacagttggtttgcaagggcagataaaaggctgggttgatctggaatcggcaaccaggagcacggcaaaaattcaggctgaaacgtcacggaaagccattgctgatatagaccaagaattaaaaagcattaataaaaaaggaaggcgattaaccaggcaacgacagatgacaatagaagcgggtactgagcttaatggtttcagagcaacccgcctggcactggaacgccaggaaacagaggcgcttaagcagcgtgaaatacatacgaaaaaattggcggcagcaaacagccagttatccataagccagagagctctttctgcatcaacttcaatgatgcgtaatgcgtattcagccctaggcgggccggttggtgtcattatgttggcgggttctgcactttattatttccataataaagcacaggaagcccgtaaaagtgcgaccgaccttaaaaatgccgttcttgagacaacagatgcattaatgcaactgtctacaactcaacttgaagtaaagcttctagacttcagacaagcatttcaggagcagaaagcccaggtaagtgaaatcagttctgaacttgaagaaatcaagatgcgcagaaaagtgaccgacgggttttggggggctggtggcacaaataaaggtcgtgacgaaaaaattacccggctgagtgcagatcttgaaaatgcgacaaagaaattatatgacgtcgatggcgcgaatttaaaaaataccgaagatgctcttgtgcgattgcgcgccggggaaaagccaaagccgaaaaaaaacgaggacgagctgccaaaagaagagccggtcgcctcaaccggcaccaacgagctccctaaaacaaaagggaacggtaaaaaagagcttaatcaatataagcaactccggcagcagattgaatccgaacacgcaaccagccttgaaaaaatctcactcagtgaatccgaaacactggaaaagctgaaagaactgcataaatcaggcggcatgtctcagtctgaaatgaaccgcttgtctcttgtcagcgcagagaattaccagcttcagcgcgtggttctggcagaaaaatactcaccgacagcggcaatgctgcgtcaggagcacgaagccggcaaggaaatgaaatcgcttcttgatgccagattgctgacggaagaagaataccagcgcgcccgcctgcaactgacacaaacaagccagcgtgaccggctttctcagcaggcaaaagatatcgcgttacccaatatctcgctggcgggtgatgtcgatcctgtcgtgcaattgcggaaccaattggaagaacagaaagcactctatcaggcatattacaacgatggtgtgatcagcaaagagcgttatgaagcccttattaaacaggcgtctgaaaaatcgaaagaggcgcagattcaggcgggtaaagagctgtatgccgcgcagggtgactggcagaaaatgcaaatcaacctgattgatacggtggagcagaaaacagccggttcactggcaggcatgctgacgggaacaaaaagcttttcagaaggattgcgggatctgtctgcgtcactcgcggagtcgattattcaggatctgattaaaattatgattcaggggcagataaccaatgcgattaccgggttatttggtggtttcggtgggagtgttgcgaatgggtcaactgtaccgatgcccccgaaaaatatctcagtaatgccaaatgcgaagggtggcacatataactcacctggtctgagtcagtacagtaaccaggttgtcagcagcccgacagtatttgcgttcgccaaaggtggcgcgccgaatgtggggttaatgggcgaggctggcgacgaagctatcatgccgctgaaacgaggaccagacggtaatctgggcattcgtgcgtatggcggaggccctcagtcgtcggcaccggtggtttatatcactatagatggtgacggcaaccagaaaacgcaggggtccgcaggctatgagcaatttggcagagaggtcggtgagttcgttgacggacgcttccgtgtgctgatggcaaaagaaacccgtcccggtggtggtgtctggaatatagctaaggggggcagatga

SEQ ID NO: 292303 - DNA, 708 bp, Morganella morganii
atgcgtaaagctattcaggatgccatttttgcacatgccgaacaggaatatccccgtgagagttgcggggtgatcgcccaaaaatcccgcgttataaaatatttcccgtgtcgcaatatcgccggtgagccggaagatcactttatcttatcgccggaagactacgccgctgccgaagactgggggacggtgaccggtattgttcacagtcaccctgatgccaccacgcagccctcagaactggataaagcgcagtgtgatgctctcggggttccgtggtatatcgtcagctggccggaaggtgatatccggaccattcagccacgcggtgaccttccgctggtggggcgaccatttgttctcggctttactgactgctacgggctggttatggactattaccggcaggagcgtggtatcacattaccggattaccgggtggattactgctggtgggagcagggcgaaaaccgctatgccgataactggcaggcggctggctttgttcaggtagaggatcagcagcccggcgatattatggtgatgcaggtacaggcaacggttgcaaaccatgcaggcatcctcctggcggataatatgcttctgcatcatttatacggacaccttagcctgcgggttccctatggcgggtactggcgcgaccgcacagttatgatactgagacataaaatattcatgacaaactga

SEQ ID NO: 292304 - DNA, 423 bp, Morganella morganii
atgaaaaaactactacttgttgctgtgtttactctggctgggtgtgccacctcagcggtgaatcctgacttagctaaagttgccccaggagatagagtttttatctctgatgtaaaaaataaaaacacagggtctgtaactattattcgtgattcaggtatggtcggtggtgggtgttttgccacagtattcattgatggtgagcgtgcggcaaaattagatccgtcagaaaaaaccacttttaatgtaaaagaaggtgagcatattctcggtgcctcactggaaggacgcggactttgctcatcgggagaggcgcgtcaggagcgcgagtttaatataaactcaggtgataataaatattatcggatattcacggatcaaaatggaaacatggatatcaagccgactacactttcccgctaa

SEQ ID NO: 292305 - DNA, 858 bp, Morganella morganii
atgattgcatacttcatattagttcaccgctacccaaatcaatttaaacggttatttaaatcaatttatcataaaaaaaatcattatgttatacatgtcgacaaacgcgctgggaaaattatttttgatgatataaattcatttctgagtgactatgacaatgcctcaatattagaaagcaaagaagccatatggggcggatatagtttagttgatgctcagttacgaggtattgaaaaattagtaaccgatggtggagaatgggattattttataaatttaagtgggcaggactttccattaaaaaaccaatcttttatacagaaatacctcagtaaatttgattgttgtgaatttataaaaatagctaatcaaaatctagtcagaccggaaaccatgcatagaataaaagaatatgtacaggaaataaatggtgagctagttgtatccaaaacatctaacagggcctttctaaaaggggttacaccatatataggcaatcaatggatgatattaagtaagaagttttgtgaatttattacctatagttctgaattagacgttttcaagaatttttaccgtaacacattaattgcagatgaaagtttttttcagaccgtattaatgaataccacatttaaatcaaaaatagtttatgatgataaaagagaaattgactgggtcgggtccggtaatattaaattacgcccccgtgattttttgactgaggattcagaaatgctcataaacagtaaaaatctttttgctcgaaaatttgatgaaaacaccgatagcgatattctcagcatacttgaacacagcatgaaatcctcacccaccgataatttatcatattga

SEQ ID NO: 292306 - DNA, 834 bp, Morganella morganii
atgaatacgccactactctacagcataattagatatgctccatacgcagaaactgaagaatttgcgaatattggtgtggtcatctgctccccaaaaacaagcaaaatcaaatatcgattgacaaaatctaatgacgccagagtgcagaattttttcaaagatgattctatatttaaggttgttaagccactgatagaaaaagaacttaacatagcttcagatatagcaacaaaaattggaactccagaaaaactcaaggaatttttctttaatctcacagaaaaaagagagtctatttttagctacagccctgtaagattgctcttagcaaaaaatatagatacagagttagagcgaatttttagtacatttgtcaagcaaactggtatcacaaaagaaagaagagaagacatcctcgctactgaattaagacatagatttcaacagcatgcgattttaaaaaattcatttaaaaaacttcagcttggtggtgagttaactagatttgagatgcctcttgttgcttcagcttccacccaagatgggaacgaaattttatgtgccatcaagccgctggcattcaaccaaagcgagccaagcaaaatgcttgagcattgtgataaatgggtatcacgtatcaaaagagctgttgatgaaaaaatattattaattaacagtgtgttatttactatagaccatggtagcaagttacctcgctcagagcaacatgctatagatgcgatacgtattacattagataataataagataacccactttaaatctcaggataacgattccgttattgaatttgctacaaacagggtaatttaa

SEQ ID NO: 292307 - DNA, 699 bp, Morganella morganii
atggatgctggtgccacgcaaccagttctatgccggtgtaatgatggtaacttgtatgttataaaaagtaccgcttctgcatcccgtaaagagcttgttcatgagtttgttgcagcatcgttagctaagtacatatgtctatcaattcctgattttgctataatttacatacccaatgaaatagttgattacttaccacctcaactcaagggaagattaagtcaaggctatgcttttgcttcatactatatacatgactcagcaaatatatcctttgacatggcgcaccaagcgatagatttacaatcacaaaaaaagatatatctatttgatagagtgataaataattcagacagaactctctctaacatgggaggtaatgtaaatattatttataacgttaaagaacaacgctattatctcatcgatcacaatttggcatttgacccgaactgtcaggacgctgattttaattaccatgtatactctcctcgtcaccggagttgggaatacgatatggttgacgccacctcaaatgaagacctgcttaatagcgtaaattttgtatgtccggaaatcgttgcaggcttaccggatgaatggttaggtgatgttcaaacaaaacagcatgttattgataatattttgtccatcctagcaagaggaagaaatgattcgttcaggagagcaatcatatga

SEQ ID NO: 292308 - DNA, 546 bp, Morganella morganii
gtgggtgctttgccagagcaaaatgaacaagcctcatcacatgacgtagtgccagcagatccagcagataatgacaatgaagtagcgattcaggagatcgaaagggctgttgtcgataaccctcaagtactgaaaagaatacttgagaatcctaaaatcatttctgttatgaagcaggagtatcatcgcgggcctttgcctagtcctaggcaaatgaagcagtataatgatgttctcccaggtgcagctgagcgtatttttcaacttacagagaaagagcaggctcatcgtcacgcatcagaaaccacagctcttaaaggtgcgatatcaagtgatagaagaggccagtggatggcttttattttgtcactggctgtatttgcattgggtggcacccttatatggcttaaagaatacacagctggagttgctttaatttcaaccactgtaattggtttggctggtgtgtttgctcttggaagaaaaggcaataggtcatcagttgcatctgatactgaaaagcctaatgaatcaaatgaagattaa

SEQ ID NO: 292309 - DNA, 516 bp, Morganella morganii
atgtttgatgatttttttataaaaacgggtagctcgctgctaattagtatagtcgttggattaactgtggcattttttactgcaaagtatgccttaacgaggttttataaagaaaaatggtgggagaaaaaattagctgcttttctggaagtaactgaacatatatgcaaaattaagagatctgaagattattggcttgccaaagcagaaagtgaacgatatgacgattcatcatttcaggaattatctccggagggggaagaggagcttcgcgctgagtattcatcaggaataaaggagctaacaagaatatcatacctttcatcatttactctatcacaaaaagcctctattttattgagggagtatattgatgagcatgataaaatatatccgtcatggtgggaagatgaaatagataatattcaagcgtcacgaatgtcacaggaattaattaataaattacttgttgatattttacctgaagcaaagcgtgaattgaaaataaatagttga

SEQ ID NO: 292310 - DNA, 258 bp, Morganella morganii
atgccaatcacattaaaagatatccgggaacatcaggagatattcgatattggcgatatcagccggatggatattgaagaatataaacagatgttatcgagagaggcatatttctggatggatcaccatgaagcactccggcatcagttatccggtgaaattattgcttattatcctgaacagattgatgctctgatagagcaattaaaatcgtataagcaaataatgcgtgaagccggaaaaggcgactttgattaa

SEQ ID NO: 292311 - DNA, 624 bp, Morganella morganii
atggattcacttataaaagatcttggtatctatgcacttccgtggattttccttctgattctgtcgaaggtgattattaagattgattttgttgatttaatgttaagtcgctacaaaagaaagttggataaattaaacagaattatttctgaactcaagggaaaagatatagtatcgattgagttggcagaaagggaaattatcagagcgagcagacgggaaatgtatggggtaaataattatcagatgcaggatgaggtaaaaaaaatagtactttttcattatccatcgctttcttgtaccagatactttgctccattttcccgctactttaaatgggaaggtaataaaattaatttacagcttagacaggtaatttgtttaaagatatttgcttctattatgattatagtcggagtgatattcggtatggttgcattggtttttatgtcagcacaggagccaatggcgtggagcatggataatttttactctggtttctattcaataatggccgtctgttacatgctgataggcataataggaatgccaccatcatacaccaaagttaaaaaagccaaaaaatacatatctgactactacaactcgatagaaaaaaattga

SEQ ID NO: 292312 - DNA, 570 bp, Morganella morganii
atgccactaaaattaaatatattccctctggtgttgttttttttattgtttacagaagtaaatgcaggtaataattcgcaaattgttaatttcaatgccacgttttatggcggaagttgcgaagttagtgctccgggggaaatacaacttggtgatggaatacctgtttcgaatgattctattcccggtgataagcgttataaacaatttaatgtcacactttccggttgtcaggggtattttatggcaccaaagttatcagtgtccggaaatataataacaggtagtggtggagtaaggttatttgctgattcgaccagtacaacaaagggttatggagttcggttagccacagatggtaatgcccgctttacagcaaacagcaatacagcagttaatggtattattaacgccagtaattggccgttggaaggaagtgataatatcggtttgttaaatggacctttagagtttaaaggttatttatcctgtgggacatgtattcagggggttaatttgcaaggcggggagttaagagccacgattacatttaagtttttatatgattaa

SEQ ID NO: 292313 - DNA, 1071 bp, Morganella morganii
atgtcattcaagatagaattaagtgaattacaaaaaaaagcaaaagaaagaacagtaaaaacgcaaaacattgaatatgacttggaaacgttagtcaaaaaaatagataaaaaagtaataaagttagatcctgattatcaaaggaagcatcgttggtcccctgacgcatcttcaaaactaattgaaagtcttatattaaacatacctattccttacgtctatatatctttagatatagacgtagatgatgaaattgatgatgatggacagtttcgatattccgtaattgacggccaacagcgactaacagcaatttataactttataaaaaatgaatactctcttgttggtcttgaggttttagataatttaaatggcgcatactacagagacctccctccattcctagttagaagattagaggaaagaaccttaaaatgcttacggattgattcaaccttagatcaacaagtaaaatatgatatatttgaacgattaaatactggggctttaaaactagaatcacaagagcttaggaatgctatttatagaggaccttttaaggatttaataaaagagctttccgttttccctgaatttgtttcaacctgcggattaagtgagtcaaaaaagaaaaaaatggaagaccaagaattggtattgcgattttttgcccttaattacaatgatggatacaataaatacaaaaaaggatttagagaattccttaattctacaatgcaagaatttaatcagctagatgaagatgacttgaaaaaaatgaaagaatcatttatttgcacttttaaaaaaataaaagaatcaaatatcaaacttcctttttcaaaatggaaaattgaagcagatgaaggcttgaagctttcatcaaaattcaatgcttcggtttatgattcagtttgtcatatattcatgaaaacaaataaaaatataaaagataacgacttaaaaaacatgtttttatcacaagattattttgatgcttgtacggggagtgtcaatgatatatctaaaataaagacccgcatggaaaaagctgaagaggtagcgtaa

SEQ ID NO: 292314 - DNA, 813 bp, Morganella morganii
atgaactcagctatagttgaatatcttgataaacttgataaccagtggaaagagatagatagactttctgagctagctaaaaacaatcagcacgacactgatttgtataactcattatgcagagcagccacagtattatgcgtatctcatctagaaggtttttacaaggacgctgttaaatattttatttcagatttaaattgcattaaattcatacatttacccaaggcaatgaaacgagtgttctgccaaagttttgtgggatttgataactcgaaagaagcaaatgagaaagtagaacgattgatcacggagttcgaatctcatgataaattttctttaagtgaaaaatcattccttcctgtaaaaaataaaaatccaaagccttcagtcctagagacagtttgtagttctctagggacgaaggatctttttaattccttggatggaactttatttgataatattttctcaatgacacccaaggaaatatccagaagcgtttacctgcttaacaaaaaagtcaagaagaaaatgtcaaattttccttgcaaagtcgataattatattttcaaaaaaataacagggcagacatcatcatctcaaaatggcaaaaaatcgaaaataaggacattgtgggaagagtttttagatgatctaaacacaaaaagacacgatatcgcgcatggaaataatttcgataataattcaagccatgactggataattatatcgaaagataagtgtcgaatattacaattgatatgtatattaatgattgcaacaaatgtttataatgaacaaaaattataa

SEQ ID NO: 292315 - DNA, 537 bp, Morganella morganii
atgcctttaaattatattaatttagatgattcaaccaagaaattcatgctcagagagattaaacttgatcaagagaataatagtttttatttgagtaattttcttactgatcaaggtaaagcagtgtggccatctttattggaagaagcatctcaacatgatgatgcatggcttgagcgagaaatcctaaatagaggattattggctacccattatcctcgaaaaaaacctaatagcactgagattattcaagttaaagtcccttatactgcagctcaaactttagctgaaggagaattcaatcgtttatatgcccgaggcttaagctcgcgagcaaaagcagaagggattgaatttgttgaagcttaccgagcaagacactcagaaaaacctcgtccgggatctcaagctataattgggaaaaagttccgacctgaagaaatccttgaggatttacgtaataacccaggcgtagatacggcattaggtgttcctcctggccctaactctggcataacaattaaacttgttaagtaa

SEQ ID NO: 292316 - DNA, 2181 bp, Morganella morganii
atgagcatactctctctgcgtggggtacgtagttattcccgtgataaagcaactcagattgatatcagcagttatgttaccttggtttatggtcagaatggagccggtaaatcgacgatatccggatttttttatcgaccggatagtgatgaatatgaacaatgcaggtttcatcctcaactagatatgcgatatcttgtattcaatcaccagtttgttgaagatctttttcatggccaggcggctcaacccggtatttttacacttagtaaagaaaatacggttattgctgctgaaatcgaagcattggaaacaagagccagtgatctgcgcattacacaacagaccaacagcacctctctgctagaaaatactgctgatcagaaaagaattcgtagtaattgtgctgagcgtatttttagcagttctgctgaaataaggtcttcagccgtggctgctctgatgggaggagcaaaacgtactgaaagcctttaccataaaatcatgtcatcatctgatgttattgttaccagtacagctgctttatgtgaagaactaaagcgtctggaaaacagccaaggtagccgtgttcaacctattgagagtttttctcctttcatatttacagaggaggaacttactttgctggaagagccattggtgccatcgggtgatagtgttttggctgctgcagtaaggcggctcagcaatagcgactggatagcgcgaggaacagagtggcttaaaggtgatatctgtccattttgccagtcacctgtaaatggcgaacatcttcaacaagaaattaccgcgttattcgatcattcatgggaaaccgctataagtgcgctgagacagttggagaagcgatactccgagtggaagagcttatttcctcgcttgcgtgaggcgctgaataaatgtcctatagtaggcactcaatcacctgtgctcgtgctgttatctgaatttgaacaacttgtccagtttaaccagaatgtgatttcacagaagcttgcagaaccttctatatgtatcagtccacgaagcatccttgatgaaacactaatcttgcagcaggcgcttgcggaactgaacggtgaaataagtgataacaaccgattggcggagaactacacaacagagcgtgcgttactgacaaaccgagtttttgcatatatacgccacctttcctctgatgtaattgagcaacaatatgctgaattggctgcattacaggaagctagaagaactcaagaagctgaatcagagtacattacagaaaatatcgagaatactgaaaaagaaatagccctgagatatgcaaaaactgtcaatatagataacacaatacagaatattaacaatacgttgacttcattaggcgtagatagtttcaggatcgttagatgtgatgagggcgttgaatcttaccggctcagcagaataggagaaaactcaaatcgtcaagtatttcagactcttagcgaaggagagaaaacattaatcgcctttttgtattttatagaaacatgcaaggggcggaatagtcgcaaccaatctgataatcgacctagttttattgttattgatgacccaatctccagcttgtcccagaattatatttttgaagtagccatgctgatacagcacgaagtaattaaacctcggcgtgccggaaaggtgatgatactcacacatagtttgttcttctttcaagagcttctgctctcaagtggaagcaggcctgcagggaaaaaaccagtagattggcaattatatcatgttaccaaagatcagttcagctgtgtcagttctattacagagaaggatctacttaacgactatcaggctctctggtatgtattacgcaaggctagtaacgacggaccttcgggtgtcattattccaaacgtaatgcgccagatacttgaacattatttcagtttttcagggaaaagtgaacgtctctacactgcattgaatactctggcagagaataatcgagaacctagatttcatgctttttaccgttttatcaaccgtcattcgcatgcagatagccgtaacattcgtcttcatgaagaatcatcagcagatatgtatattgagatgtttaggagggtatttgaggagacgggggatatagaacactacaacatgatgatggttgaaacctga

SEQ ID NO: 292317 - DNA, 987 bp, Morganella morganii
atggtagcagtttatgttttagatgcgggacatggtgattgcatacttttggattttgaacatacgttaatactaatcgattctgggcctaaaacgtttttgataagaaggaatgttatagagaagcttaaagatttattgaataatagaacaattgatattgcaattgttacacataatgatgatgaccatattggcggttatgagtatgtattatcttcagggattaaaattgaaaatttcatttttaatagcctcagtatttgtggtgaactctttaatgatcatgaacaacagatttcctataatcaagatgtcagtttagatacccttattaaggataaaacagtttccttggaggcattagtatttggtaatgaaccagtcattattaatgatataaagcttattcctttaacaccgactattgatgcacttcatcatatgcatgatgattatatcaaaaagaatcaacctcaaatatcatctgatgaaaaagtggaacctaccttattagagtgtattgaagaagtctctaatggaaccgataaattcctgcctgatagatctattactaacagaaccagcttatctctaatcatagagtataatggttttagggggttgtttttaggtgatgcatgggctactgatgtcattgaatccttcaggttaaacaaaattgaaccagatttttgtgtcaccaaattgtcacatcatgggagtgaaagaaactcaaatagtgagttgataaatataataggtaaaactgaatatattatttgtgccgacaagagtaaacataatcatccaaataataaaactattgctcgaattttggttcaatacccggaagcaatatttcattttagtagtaataatgaagatgttaggagtattttcaatgagaacaatgtgttagaatatcaagcggaatgcacttattcttcaaatggagtgaatgtaagatactatgagtgtaagtaa

SEQ ID NO: 292318 - DNA, 1470 bp, Morganella morganii
atgagtgtaagtaattgcataaaaatcagggtgttaggctctgaatcaacagggtatctattcaaggccagttcttgcgatgcagcttttgtgatttcctcgaagcatggcctttgccatcggaagggtaattgcgaaccatttaaggcgaaaattgcaagttgctgtaggcaatgtaacattcaacctgaagtaaacggtctttctttcgaccgtatgtcaacactccttaatgctgaagatgtatatagctttccagataaagatttagttattacacgagttagtggtaatgccacacatcccttacgcataggtgaaatagaaaatatatcaggtaagactttttatcttaatgctttcaaggaaaaagatactgaacctggaagaatcatgctcaattttccgcaaccagtcccgcaagggctaataaagtataatattgaatcaaattcgactcccgatttaatcgaaaaatcaaaaggatataaaggtgtttcgggcgggttagttttagaatatccagaatcagattttcctgttgcacatgctgtaataatcgaaaatgggaaaaataacgatcttatcgctgagagtttgaatgatatagatcatgatgtgattaataaattttttgactgtgtcttatttcataagccagtttggactgttaagttagataacactatagatgattacgtaaaggaaatattaagaaaaacaataaccaaagattttgagatagtcacctatataccaattcataatggttttcctcattttgacttaaatcctattgcaaagtttttgttgattgaatttaattacatgcttacaaacaataaacttttacctactcaaagtgtggcaagagcgggtatgttattgtctaatgaggtatctcatgaaccagctaataaactattaactggaagattggttgaaacctatcttaatgcacctcatctttactctacgggtttaacagctaaatattaccaccatatgcactatatgatcactaaggatggtagctgtgagttggcattttctaattactgcggtcataataacttagtagaagaacttaataatgaaattgagaaagtaatatctaattttaattcttatggttttaatcaggaactatttttagagcgtacatttttaaaccaaaaacttcctgaatcagagtgcgaaacgttatttaaaattttattcactggaaataaaaaccttaacacattttgtttagtttttaccttgtcgatggagcattataacaaagatgaatttaatactgtcagtgactatattatttctatagtcaataacgcatgtaaaagtattgaccaaggcattctaaaaactctttcatcaggtcttaaattaaatttattgattatgccaagcaacagaataaatgaattatcacaggctattgttagggagttatatggtgatgactag

SEQ ID NO: 292319 - DNA, 936 bp, Morganella morganii
atgaccagtttatataccgcaactaaacatccggaacaactggagacaaccctgttaaccggggaaagtcatcggtatgatgatcctttagagccccaaaaactggtttttttagatgctgtgaatgatcagcgttgtgtgattaattcaccacaacgtaacagtcaactaactaacacgattcctttttttatagccatactgattatggcttgttataccttattgggtttcgtggatagacatgcatctaaaatgtatacatttcaagatactataacttataataaagggatttataattcctatgttgaggataataaaaagataccgcgatatttagaagagtacgttccttattttagtaaggaagaaatagatatttttgactatgttaaggcctactgttcaggaaggcttagtaataatagcaatgctgatgtattattgatgattggctggcttattttattcccgggagcattatggttgttcggttatctggcattttttacgccaccggtttatttaacggcagacagaaaacggggtctcctgtatagccatggcaggggaaaagtgcatgtcacccgttatgaagaggcacaaatcgggttagccggtaaaatgccggctatcaagctgtatgggattgatgaaaaatccggtgaactgaaaacgattatattccggccgaatgtttcccactattctgcgtttctgaccagtactgacagcgaaaatcaccgctttattacgttcctgaatgcctatatgcaacaaggccgggatgcggtctcccccgtggattatcaggcacgaaaacctttcctgtcgtttggtaaaaacccgctccccgaagactttgaacagcaggttgcacagattctgacagaattggataaaaggaagcaacgtgatgcgcagtcagattaa

SEQ ID NO: 292320 - DNA, 219 bp, Morganella morganii
atgagtcagttatgtttggtgtttgttatatgtggttttaatttacttgggtattttttcgaaagtataatgccattaataatgatgtttaactttttaggagttgttttgtgtgcaataagtttttattttataaaaaagaaattaagagtctttagtttgtttaattttcttaactgtctccaatatggtgatttctcgaatgagattatcaattag

SEQ ID NO: 292321 - DNA, 552 bp, Morganella morganii; identical to SEQ ID NO: 291636

SEQ ID NO: 292322 - DNA, 420 bp, Morganella morganii
atgaatactgccgctcaggttactgaggatcagggcggcaccggcggcatccagatgaaccgcagcgctgtctgcacccagattctgtgcctgcgatacggtcagtttgccgctgccgttcaggtgatgttcaccggtgaagctgcggttatcaccgctgagggtgacggcagcctgtgtgctgacctgcccgtctccgctcagggcattcaccaggttgagattatccgccagcaggttcagggtgccggtaacatccaccgccgcagtgccgagagtgccgctgtcacgcagggtgacggaggcatttttgccgatctgcgtggtgcctgccagaccgctgttggcggccgagacagacagatcgccgccggtgacactgaaggtgccgttaccggtcagaccgccggtcgccgatga

SEQ ID NO: 292323 - DNA, 405 bp, Morganella morganii
gtgtcgttattctcctggcttcatgacctttttcagaacgcgctgttaagtagtgtgcggttatttgcggcgttctcttttttgccgtttctgaatgataaatttatcctcagccggaccacgcggggcattattatttttctcatggcgcagtgtctcagcggaaatggagactacccggcggcagagttctcagtggtcaatatactgagtgagatcattaccggcatggtaatggggttggtttacagcacgccgttttttattttttccgccttcggtgaatatattgataaccaacggggggcgaatatcagtgataccgctgattatattatgcggagtgagtgtcagctttgtttctctgatgcagacccgttttgctgttgcgacggaagcgattaa

SEQ ID NO: 292324 - DNA, 918 bp, Morganella morganii; identical to SEQ ID NO: 138482

SEQ ID NO: 292325 - DNA, 561 bp, Morganella morganii
atgacccgtctggcttcgcgctttggcgcagcaaaccttattcgtcgcgaccgcccgttaacccgcgaagagctgtttcgcgtggtgcccagtgtattcagtgaggacaaacacgcatcccgtagtgagcgttatacctatatacccaccatatccctgctggacagcctgcagcgcgaaggcttccagccgttctttgcctgtcagacccgggtacgcgacccgggtcgacgcgagcacacaaaacacatgctacgccttcgtcgggaggggcagattaccggtaaacaggtaccagaaattatcctgctcaactcccatgatggcaccagttcgtaccagatgttgccgggtttatttcgtgcggtttgtcagaacgggctcgtctgcggtgagtcatttggcgaggtgcgtgtgccgcacaaaggcgatgtagtgagtcaggtgattgagggggcctatgaagtgctgggcatttttgaccgtgtggaggagaagcgggatgcgatgcagtcgttgctgttgccaccacctgcgcagcaggcactggcgccgcgctga

SEQ ID NO: 292326 - DNA, 228 bp, Morganella morganii
gtgactgagtcgcagatcctctccccgcgccgctggcaggatgagagtagcgacctgtggaccacgtaccagcgtattcaggagaacctgattaagggtgggctcagtggccgtaatgccaaaggaggacggtcacatacccgtgccgttcgcggtatagacggggacgtgaaacttaaccgggcactgtgggtgatggcggaagcgatgctcacgcaactgcagtga

SEQ ID NO: 292327 - DNA, 441 bp, Morganella morganii
atgaagacagaaaataaaccagtgtattttttcagcccgtcaacggtcagcttttatcctgaagtgatgcttgatgattaccgggatgccggaacgttgcctgatgatttagtgagtgtggaaaatgaggtgtttgcggaattttccggaaccccgcctgatggcaaagttcgcggcgttatcaaaggcaaacctgcgtgggtagatatcccgccgttaagcacagaggaattaattcagcaggcggaagaaacaaagcaaaggctgattgccgaagtccataccgaaacagctatgctccgggcaaaactggcacttggtcggattaaagatgatgaaaaggcgctgttaaacgcctggctggattatctggacgaactggaggcagtggatgtatccaccgccccggatattatctggccagtaaagccggtggtgtag

SEQ ID NO: 292328 - DNA, 123 bp, Morganella morganii
atgtgcaacgaaatcttgaagcaggaggaagttagcgtctgcgaccagtgcgccggtgaatgcccgcatctggaagtggtcgagaagataaaaggagatggtgatgccgaggaagagaattaa

SEQ ID NO: 292329 - DNA, 579 bp, Morganella morganii
atgttggctgaaaatgttaaggatattccgggttttgagggggtttattctgccactgatgatggcagggtttattctcactcaagggttgtaaaggcggcgtacggcaagacgcagctaaggaaaggcagatggctaaaggcaaaaataaatcaaggtagggttttttataacattggcgctaaatggacatcggcgcacagaataattgccataacatttatccccaatccagataataagcctcaaataaaccacatagatggaaacccgctcaacaatcacgtttctaacctggagtggtgcacgcaaagcgaaaatatcaagcatgcgtatgccaacaatttaatgaagccaaccagattgttgggggagaatcacccaaggcacaagcttaatgatgaaatagttgctgccattaaggaatcaaacgaaagccttaaatcactggccgagagatatggaatatcaaaaacgtgggtcagcaagataaagagaaacataaattggtctcacgttaacggagaagaagatgacagcaataaagctaccgctagtcaggggagtaggaaaggatag

SEQ ID NO: 292330 - DNA, 429 bp, Morganella morganii
atgatatggtcaagtaataaaaaaatcatagttgccaaagaaaaagaattagatcagctaattacacacataaaaaaaatggtaagggaaagagattctttgttttactcaacctcgaaaagggttgaggttgaagcgaatgaggtcaacattgcagtctcagaatatataaaaaccccccaaggcaaggtttcaatatcaatattgtttttaaataagcaatatattagccacttaatgatgaaagcatacgatctaaaaatggatattgataaactcaatggcaccttacaggcaacggaaaacaacgatgattggtataaaaaatccatgcttccgctttttggtgatgccattgaggaattagtttctgaagattcttatgtccttctcaattatatgagttcctatggggcaaccgagtcctga

SEQ ID NO: 292331 - DNA, 312 bp, Morganella morganii
atgaaaaaactaccggcgctgttgttcatattggctccgctatattcaatggctgaaaataacacgaagcccgatgatatattcactattgtttcagtgtcggccacatccggtgaatgcggcatgatatctcagctttacaagttccaaagtaccagaaaaacaccggaagagaaaaaggtcattgatgatttcatagaaactgaaatgtcgcgaaaaggaacaaatattgttgatttcgctaatgaatgtgataaatctttctctgtcataaaaggcttagttaaagaatcaaacaacaaaagctattaa

SEQ ID NO: 292332 - DNA, 573 bp, Morganella morganii
atgtctgacgaactgaacgtgaacatcccgccgcgctttgctgctgcgacatttgagacgtatcacccggcgaatcctgatgcaaaaaacaatctggaaatctgccgcgagtatgccgaaacatggctgtcccgtaaaaccgccggagaggcacttattttgtgcggaacacccggaaccgggaaaacccaccttgcagtgtcaatcgcccgtcaggttgccactgaggcgcaggaatcggtatttatcaccacagcggcgcgtatcatccgggcttttcgccgtacatgggctggcgatgcggaatacagcgagctcgacgtactggaaaaatactgcgggccgggcctgctgattatcgacgaaatcggtgttcagtacggaactgactcagagcgcaatattttgtttgaagtgattaacgaccggtacgaggacatgctgccgaccatcatgatcagcaacctgccactgaacgaactggccacgctgctgggtgaacgcgttgttgaccgcatgctggaaggtggcgcagtgctgtcgttcaactggccaagttaccggagtaattga

SEQ ID NO: 292333 - DNA, 1002 bp, Morganella morganii
atgcctgccggaaaattgctcgcgatctgggggtgtgacgtgaataaatcaacagccgtaaatgttacaggtaccgttgagcaaatcggacggataaatattactgggaatgtgatcccgcctaaatggtggcatcacattaaaatgccggacggaaagccggatagtacggccattattttattatcggaaatcatttactggtaccggccggcagaaatccgtgacgagtttaccggtgagctgaaagggtggcgcaagcgcttcaagagcgacaaattacagcgcagttatcagtcatttgcagatcagttcggattcacaaaacggcaggcaacggatgctttgaaacggctccagtcacatggtgttattgagcttgaattgcggactatcagtacaccttccgggctgtgtaataacgtgctgtttattcagcctgtcccaggtcgtgtcaatgagataactaacactatcccgctgattaataatgaatcagaaaatgattcagtttccggaacagctattacgtttgaacgtaacaggggttccgttaaaacggaacaggtcttacatcctgacgtaacagctcttacgttcaaacgtgagacaaatacagagattactacagagattactacagagaataaaacccccttaatcccccaggggaaaacgcaatctcaaaaattaaaatttgatcctctatcagctcgtccggaaaacatcagcgaaccagtctggcaggattgggtaacgttccggaaagaaattaaaaaaccactgaccgaaaccagttgccgccagattgccaaaaaactggccgggcatccggatcctgatgcggtgctgtgtgattccatcgccaacggctggcaggggatatttccggaacgcaccataggtcggaaaccggctaagccgagcacacactccggattcagcgataaaaactacgagagccgctcagcggcatgggtgaacgggggcaagcatgtctga

SEQ ID NO: 292334 - DNA, 216 bp, Morganella morganii
atgattgatatgatttcatatcgtgatggctttcgcctgaacggtaaccccgccacacttgaagaaattcagcctatctatgatagacgtcgagctaatgccttatctatctggcagcagtatgagtttgaaaaatataaattaatatcaaaaaatctgacaccagaacaatatcagaatgcctgccggaaaattgctcgcgatctgggggtgtga

SEQ ID NO: 292335 - DNA, 444 bp, Morganella morganii
atggaaattgatatcaatttgctcagaaaagaagttggatcttgggcagcagagcgaggtcaggaacatgttgcgatcgagatcagtaaggcttattttgagcggaattcctatgctaaggctcggctatctccgattgaggatgagcatgagtgcgtgaactggaaagcgataaataacaatcgccaacaaattttccgctggttacatagtgattcaaaagcagctaaggctaagttttatgagcttgtaccctcaattatggaaacattaccgactaaatacagattgaggcttgaacgcggttctttaaatagcttaatatcgatagcgataaaagaatttgcagaagctattactgaaacattgttagatggtcgtgacatgtcacggcaaatcactaacgctgtagtggcacttaatgcgattcaaatccgcgcctga

SEQ ID NO: 292336 - DNA, 474 bp, Morganella morganii
atgcgtaatgctacaagagaaattattagacgtgctgcgagcatcgcggggtcgcaacttcaattatcgcgtgagatagacgctcgcacccgtactctcggggtctggtttaatcgtggtacggaatcaggttcaaatttgctaaaggtaatagagtacgcaaccggagggcaaataacagcatcaatcatcattgatgctattgctcagaacgaaaatatgaaaataaaacgtattcttaatggtgaagatggcgactgtaataacgcattagaaaaagcaataaaaatagcgggtaataccagtaatcttgcccgacgcataggggtttcccatcaagctattcacatttggaaagttaaatataattcaagaattccagaggaaaaagttcttaaaatctatatagcgacgggagttacacctcacgaaatgaggccggatctttaccctaacccgaatgatggaatttaa

SEQ ID NO: 292337 - DNA, 396 bp, Morganella morganii
atgatgaaagcaattgagatttccatgtacagaatcagcagactcctgacagagcaaggatggagccaggctgaactcgctcgaaaaatcggggttactcagcaaaccgtacaacagtgggtccatggtaaagccagtcctaagcctgcaagcctagataaattagttgaagtaacaggacaccctgcatattggtttatgatgccaccagatgataacgagcaatcatccaccccacagatgcctatgaccaatagtcaacgtgaattactacaaacgtttgatgcattccctgaggatgaccagaaaaaaatacttaaagaaatgaaagataaaaaagaagaaatggaagaaactattgctcgctggatgaaaaaaagaggccgcagagcataa

SEQ ID NO: 292338 - DNA, 633 bp, Morganella morganii
ttgggaggtaaaggcaacgataagctatatggcagtgaggggtctgatctgcttgatggtggggaaggaaatgatgtactgaagggtgggtatggtgatgatatctatcgctatctttcaggttatgggcatcatattattgaagatgaaggtggtaaaaatgataagctaagtttagctgacattgatttccgagatgttaccttcagacaggaaggtgatgaccttgtcatgtataaagcagagaataatgtagtttcgtttggtcataaaaatggtattacttttaaaaactggtttaaacaaacatcaaatgaaatttcaaatcataaaatagagcagattattgataagaaagggagagtcattaccccggactcactaaaaaaagcacttgaataccaaagcaaaaataatcatttaaactatgtggatggacataatgcagcaacctatgaaaatgaaaataatcttaatttattaagaaatgatattagtaaaataatttcagcagctggcagctttgatatcagggatacaagacctgctgatatttcaacattactgacttctcatggtatcagtaatttttcttatagcaacagtgcactgactgtaacctcattagtgtaa

SEQ ID NO: 292339 - DNA, 1017 bp, Morganella morganii
atgaaaccggattggggggtgttacagcaacagttcctcgccgagcattcagtaacgggaatatccccgaaagaatggtgtgagatacagggactgaactacgcaacagcgcgtaggtacatcaaaaagccaactgcgcagagtgcgcaaaaaactgcgcaaaagaaagtgcgcactgcgcagaaaaaagaatgcgcaaatgaaccggtgtgcaatagtgatataccggatgcgcaaggcaataaatccgacaatgcgcagaatgatgaaacagagttcgatctgcgcaaatacgggcttaacgatatgcaggcacgttttgtcactgagtatcttatcgatatggacaagacagcggcataccaaagagcgggatataaaagccagggtgaaacaggagcagccgcagccagacgcctgtatcgaaatgtatcggtgaaccgggcaatacgggatgccctcacagcacgggaacgccggactgaaatcacccaggacgcagtattaaaaatgtggtgggacattgccactgcagacccgacagagctgacggaataccgccggttatgttgccgctactgctggggctttggttttaactatcagtggcgtgactcgatagagtttgaggacgctgtcagtgatgctatgaggaagagtcagaggccaccaaacgacaggggcggctacggttacgacagcacactggacccgaatcctgattgcccccgctgcaatggtgccggcattggccgacctcatttccacgatacacgggatttaaggggcgcaagccgccggttatttgccgggataaaagaaggcaagttcggtaccgaggttatcacccgtaatcaggatgaagcgctgaaaatggttgcacagcatttggggatgctgaaaaacaggactgaggtcaccggtgcagatggcggcccgatacaatcaacgggatttgacctaagtggcctgacgacagagcagcttctgcagttgcgagaaaaagcggggaaatag

SEQ ID NO: 292340 - DNA, 339 bp, Morganella morganii
atggctaagtccccagcagaacgcaaagccgcacagagagcgcggcaaaagaaaaccggtatcgtcaaacttgagttgctggtggatgaacaggaactggaaatgctgcagcgcaattgtgcgttgcggcggccagggcgggaaccttatgagttgaatgagtacctgacgatgctcatcagaatcgatgaccggtcgctaaaatctgaaattgaggaacttagtaagaaaacttgtcggaaatgtggtgagaaactaccagtggaggaatgttgtatggctggtgatgctgagtgctggaatacccttgggtggcatgaattaaagctaagtatataa

SEQ ID NO: 292341 - DNA, 405 bp, Morganella morganii
  misc_feature (389)..(398): n is a, c, g, or t
atgaaaattgattttattcttccatgggttaatggtaatgatcctaaatggcttaacgaaagaaatttatatataaaaaaggagaataagaaagagaattctgattttagattcagggatttcggaaccctaaaatatgtattgagatcaattgaatataactgtccgtggtacaataaaatatatctgataacagaaggccactatccagaatggttaaatttatctaatccaaaaatagaactgatttctcacaaagaattttattttaatactgaagatttgcctgtttttagttcttcctctatagaaatgaatttagctaacatccgtagtttatcagataattttgtatctgtctcttatacacatctgacgctgccgacgannnnnnnnnntaaatga

SEQ ID NO: 292342 - DNA, 288 bp, Morganella morganii
atgggctccgataacaagttggcattcgtcaccattaataccagcaaaatggaagagaagattaaaaatattatctcgctacttccgccggaatcggttgataagttcctgactaagcttcttagcctgactgatgatgtcatgttcagtgattactctggaacaatgcagacaggagtgaccaacgagatcgtctattttatcgattttgacaatggtttctacagcaaaatcctgtccgcagcccgggcacttaatgcggatattactcataattcagttccttaa

SEQ ID NO: 292343 - DNA, 636 bp, Morganella morganii
atggcgctcactgatggcgcatatctgatcaatggtcagattactggcatcgataatgtgaatatcccggtcaataagatgagcgattgccgaactgatccgcgcccagccctcgtcgtccagatcacagttgcgcattttggaaaccggcagttgtgcagcaccggcaatcatgcgctcggcgatctgcatatttgccatttccatggagaacatcagcacagaatcaccggcagttgtcattttttccatcatcgtgagtgccagctcagttttacccatgcccggccggccgccgataaaaatcagatctgtagggttaaaaccaccgattttatcgtccagtgcttcaataccggtccggatcatcatgccgctgccctcgccccggttccgtttctccagcacatcaacataaccgtcaatcagttcgttgagatgaaccggtaccaggctttctttctcactggagagcagggtaaactcactgctgaacttctgaatgacgctttccgcttgctcatgcgtcgccgcatcagtaatttctttctgaaatttatttatcagcgctgtaattttgcgaactgccgcgtagttcctgactttctcggcataccctttcaggtttgcgtatga

SEQ ID NO: 292344 - DNA, 369 bp, Morganella morganii
atgcacttcaacttcttcagcagacatcttgtgcattcctttaattttctcgtcaatttcgaagaaaatctccgggatttgctctttttcgttgtcgaaatcaggcgcatttattctgtcaataacggccatctgttcgttatcgaaagcaaaaacttcgccagtttgtttgtttttgaaataattcatcatgacaactccgaccaaaacataaaattacttgacgtgtatttatatgatgagcctggaggcactatagctgatgtcgccattgcgggtccgcttccagttaaaatgccaacttgcaccccattgattaataatccaccgggctctccttcagagctgccctttcctatgctaacgtaa

SEQ ID NO: 292345 - DNA, 282 bp, Morganella morganii
gtgacagtgaaaaaaacatcactggatgcgcagacggttattccggcggcggttgagtcatgggcccggggcgaaaccgaaggggatggcgggctggttgtcggccgcgaagtttccccgtttgaaatatcggccggtattaatgcttctgagccgcgtctgtttgtcacacgggtggaactgtcagccaacggcacggactggtcatctgatacttacccggtaaagctgactgaggttgccggaatcagccgcagtgcggtgcaggtggtatttgtatga

SEQ ID NO: 292346 - DNA, 168 bp, Morganella morganii
ttgtttgaagtgattaacgaccggtatgaggacatgctgccgaccatcatgatcagcaatctgccgctgaacgaactggccccgctgctgggtgaacgagttgttgaccgcatgctggaaggtggggcagtgctgtcgttcaactggccaagctaccggagtaattga

SEQ ID NO: 292347 - DNA, 204 bp, Morganella morganii; identical to SEQ ID NO: 288963

SEQ ID NO: 292348 - DNA, 261 bp, Morganella morganii
atgtattatgacccggttgaggttcgcgggagctggcaggcggtggatacccgggacattcagtctatggggctggacaccagtcaggtataccgccgtttgtatacatcccacgatatcagcgccattcagcgtggaacttcaccggattatctggtcttcggcggcaaacgctacgatgtgaccggcgatgccgactggtatgcacaggacggctggaagtcggttatctgtattgaggcaggcaatcatgacggataa

SEQ ID NO: 292349 - DNA, 243 bp, Morganella morganii
atgaacagcacgtatataaaccccgtgattgtgggtttgaatgtccgctcggtattgattgatgtattcaaagaggcacagcatgccggtgaagttccgccgggatataaccctgccctcgcaacaaaacaaccacgccgaaaggtaacccggcaacgacttagcccggaagaatggcagaaaatttatgatatcgcctgtaaggaccataaatatcccagaacgccatgttgcgggatgtga

SEQ ID NO: 292350 - DNA, 183 bp, Morganella morganii
atgaccggtaatctgcagggtattttggggctggtgatcaccagctccgtgctgattgccattccggggccgagtattttgtttctggtcggccaggcgttatctgccgggaagaagcgggaaatgccatcggtatgtacagcattgcggtattgctttctttcggaattggtgcggtgctga

SEQ ID NO: 292351 - DNA, 1236 bp, Morganella morganii
atgatgccggttaaaatgaaactatctgacaaacctaaacttaaacaactttcaatagaaaaaattgaaacctcttacgaaataacacagtggcttactcaatttagcgatagtgaacaatcttttgctaaacttatattgagtaaattaatctttgttagcagagatgagtatacgaaatggctgcgaaaagcgatttctagtttaccaaataaccataaatatgccctattttcagttaggaaattaccgaaagaaaatcatatactatgggattctcaaggtgaaattgtcgatagaccgggctgttctctaggaagcgaggacttagtatattcaatcatttccaatctggtacgctcaaataaagactttttgatagagcacccatctctaaatgaactaaaaagacataagattcataattatattcttattgatgatgctataggtagtggtgacagggtatctgaatttattaatgccatgcttagcaatcccacttttttaagttggtggagcttagggataataaaatttactttactttcatttgctcgcacacaaggttcagagtgtaatataattaataaaatccgaggttcagatcatggtatcagaaaattcagaaaatcagataaaataaatttcataagcgaaattgtttataatgagaaatggttggaaactcgttggggaaaacaatatgatgaagtgataaatctttgtcataagaaaaaacagatcaaactgtgggctcggcttggatatggtgaagtattatcgaatattatcttttatcatagcgtaccgaacaacatccccgggatgctgtggtttacaaataaaaagtggcaaggtcttatgcccgatagagcgattcctagttggttacttgacttaatagaaaatgattataaacaagaaatatctgcttcatcacccttatcgcctgaaatattgaaattactaacactcatcaaacgtggtatgagagataaaaaaagtttagctttgcgtttgaatattgactgttcttatgtggaaaatttaattcagtattcggaaacactagggctattgacaactcaaaaacgtttgactaaagttggtctcgatttacttatagcttctaagcatattgaaaacaataatgtatgggactttagtctatacattccagagtcttggtgtgctgatcggtattctattcagccgttaaacaagaatgagtga

SEQ ID NO: 292352 - DNA, 1164 bp, Morganella morganii
atggaaatctggtcagtacaccaactttatcaagaagcagaggcgtctttaggtaaagaatccgcattaaatttaagaaattacgcaaataatctgaaaaaaagaaatttccctgttatttttagtttacggcatctttcaataattacaggtgttgattatagcgtattacgttcgacagtagcacgcagacgagaatcagctaattatcgcatgtttgccattaaaaaacgttcaggtgggcgacgtcatatacatgccgtaactagcgaattattcaaagttcaacacttcatcaatagtgtaatactacaaaagataaaaccccacaatgcttcttatgctttccactcagatggcggagttagaaaatgtgcagagcaacattgtggtgcccgttggctgtttcaatttgatattgctgattttttttattctattaacgaatcagatatttataatattttcgttagtgctggatatcgcccattgttagcatttgaactgtcaagattatgcactactttgcgactacctacacatttacgttctttaattttattaccaaaatactcagtaaaagaatataaattttataatcaatataataccaaccaccactcacggataataccagagccttttcctttaggtgtacttccccaaggggcaccaagtagcccaatgctcagtaatttggcttccgaaaaactcgatgtttctttagccgattatgctcataaaaatggtttcatctatacccgatatgccgatgatataacattctcttgtggtaatgatctagcggatggagtttcagttaaaaaagttaggcgagatatcataagtatcattcgtaaacatcattttattgaaaacacaaataaaataagaatatctggcccaggctctaaaaaggtcgttttagggttacttgttgatggtaacgcaccaagattatccaaggaaacctataaacgtattgaccgccatctttatgcaattcaaaaatttggtcttaatgaagttgcaaaatatgaaaaattcgactctccaataggtttttataaccatgtagctggtttgattgcgtatgttaaagatgttgataatgcaagatggttgcaatttcatcaaagattttccattataaaccatccataa

SEQ ID NO: 292353 - DNA, 1959 bp, Morganella morganii
atgaataccgtgtatctatctccaaccgatttagtcgagttgaagatgctagttaaagatttgaacttcgatgacactgaacgtcgttcagctttgcttgaaaacgggtctcgtgactttaatgcagttcctggtagcggaaaaacatcacttcttgctgcgaaattgttattactcgctaaaaagtggactcattcacgccgtggaatttgcgtcttaagccatactaatgtggctcgcaatgaaattgcagatcgacttgccagtacgactgagggcacccaacttctaagctatcctcatttcattggtactatccatagtttcgtcaatcacttcttttctttaccattattgcgtagttgtggaatgaaggttgacgttattgatgatgatgtattcgcagataaagctagatcactgctgcggatggggaaattttcaaaacttcgcttttatctggaaaatcagatgaatggtgatgtaatagctacaacgatgttctatcgaacagctgagcttaaagtgcatgttgaagccggtagtttacctgcaccacacacaaactcgtacagatctcttatagcccttaaagaaatgcttactgagcaaggcatttttcgacacagtgacatgtttgcatttgcagactatgcgctcaaggtttgcccgagattacttgatgttgttcatcgtcgtttcccatttgtattcatcgatgaaatgcaagatacctcttgggaacaagaatcattgttgaatcgtatttttgatggtcgttctacaatgcaacgctttggagacatagatcagaaaattattccgaacgaggaacatacggagctactcacattccccagagaagggtatggatgcataagtactagcaaacgtttcggtaaagcaatttcagatgcagtaggatgtgttcgagtcagtggtgaagcagttgttggtgaaggaggggatactcacgctccaaccttacttttgtataaaacgaatgatgctaccaaagtagttccgtatttcggtcgaatggttatcgagcagcttagcgaaagcgatataggtgctcgagaagtgaaagcaatgagtgcacgcaaaagaggagaaggtaatgttgatgtaggacgccatcttctcgactattgcccgagttatagaggaggaacatcaagcacacgagtaaggtctgagagtttctggggtcttgttggcaatagcaaagataccttaaataaaaaatcaatcaattcaagatgttatgatatacgcaggtcattactgcttgttttgcgcgcagcaggttcatcacttgtacaagatattcgtgatgcacgagcattaccacgcatattgaataccgcaataacagaaaaaaatattaataagctaacgcgacaacttgtactttttagtgaagatctttcttcacgtgatcaaagagacacccttattagattactatttactgaacttgaaccataccttcctatagatatgaattttaatatattcaaaggattgaatgtttttgaagacactctagatactgtctcttatacacatctcccgagcccacgagatatagatacatcaaatagttctacttcagctgaatatgaaattaaccataatgaaagatatataaacattgggttaggtacggttgctggaatgaagggagaaactcatgctgcatctttgattctagagtcctacggagggactagccgtaagttcgatgttgcattggggcttgaatacatcactgggacagcaaaaaaagatatttcaaaactccccaaaacacagcaggcgcaaatgagaaacctttatgtagcgatgtcccgtccaacaaaactactgtgtcttgccgcaaatgagaatcgtgtttcaaaggaactggtcgacatacttacagctaaagggtggaatatcgaaatagtgacttag

SEQ ID NO: 292354 - DNA, 1959 bp, Morganella morganii
atgtatcttaagcacatccgcgcacgtaattatcgtgcttttggtgataattcatcagcttgtgagctcgactgggagctaaatcctgggctaaatatccttgtaggagagaacgatgcaggaaaaacctgcatcgttgatgcaatccgccagatattactgacaaccagttatgaaaatatccgcctttttgaacacgattttcacatccacggctcaagtcgctctaattctctttgtatagaagctactttatgtggactaaacgaagaccaagaggcctctgtacttgaatggcttactcttaatgaagatggaacttgctcacttatactacaccttgaagcacgttttcacccaccactcgcgaccaagcgatcacgggttgaaactatcattcgaacaggagttaacggtagcggaccagaaataggttatgctgtaagagaattagtacgaacaacctacttaagacctttacgtgatgcggaagcagaactcagttcagggcgtcaatctcgcctatctcaaattcttggagctcataacaatattacaggtcaagaagtaaatgacttcgaccctacattaccaagtaacataccttcttgtttggttggattaatggcatttactcaacaccatttaggtcaacatcctgttataaagagtgtagaaaaagatattaatgataactatctgagccaatttgcattttcaggaagtactattcagtcacgtattcgtattgccccagatcttgcactaacacctattttagaaaaatttgagttatcattgttaccagatacacatattaatcctgatgcgcgttgcgctcgaggtcttggatataataatgcattgtttatggctacggaacttgtcttgttgcgagatggtgaagagttcggtttacttcttgttgaggagccagaagcccaccttcatccacagttacaagaacgcgtaatggcacttttcaaagagtattcaaaagaaagtcatgaacaaaaacgagtacaagtaataatgacgactcatagcccatctttggtatcaactgcaaatatcgaagatatgacgttagtctaccgagctcaaacatttcctctagctattggtaaaactaagctcaaacgaactgattactctttcttgcgccgctttattgatgcgactaaagctaatcttttttttgctcgaggagtcataatggtagaagggcctgccgaggcaattttactcccagctattgcagagatgtgtggtcgttctttatctgagcatggagtatcgattgttaatgttggtaatacaggtctttaccattacgctcgtattctacagcgagaagggattggtccagaaattccaattcctgttgtctgcctgacagaccgtgatattgtaccagatgtcgcaaaaacgtatgtttcagcaccagccaagggaaagcgctttgatactgattatactgctggtgaaatagagatagttgtacagaaaaagaaagagcgagcagaaggcggagcaacaatcgtctgcgtatcggacagatggacactagaatatgatctggcattgtatggctgcgctaaattaatgtatcttgctatatccttagctgttaaagctaaatcccgagatgaaaggcttgaggaaagtgacgaaactgacactcttgccgcagctgaagcagaatggtcaatactggagggggcgggacatagtgccgaagagctcgctgcaatcatttatcaacctttacaagaaaaggatgcttcaaaagcaattgctgctcagtatgcagcccatctaatctgtactggtgaatatggtacgaatgaagaactgttcagtaaacttccaccttacctacaaacagctctatcacatctgacaactctatcggttcttagagcaaaagccgatacagagacatcaatcggtgtgtag

SEQ ID NO: 292355 - DNA, 855 bp, Morganella morganii
atgcgagcagaatttgaagaaaaaacttttgaaaatgcatttaacgctgaatttagctattgctatgggcttggccgagtttattcttttggtcaagttcaagagggaaggataggtttagattcagcgctatatctagaaaaaaactattggctacatttgaaatttctatcgtctccttttttgaagggcgagcatttaccttttattgcagaacgaatggaggaattcctaaaccatagattttcagaaacatttgaaatgaccgtcaatttactattgcaatacaaacgtcctgaacttttaacaaccgaaacagcaggtgaatgggaacattggaagaaaccttactttcggtacgtcattgatgaaaaccaacaaactctactagaacgtttatcaaatcagtttggctcccaagcgctagtactttatgcttcccccgcatttattaagatgaaggaacttcaaactgcgttacaaaacaaagagttaattaataagactaacttttgtccagcatcaaaattaactaaccatcacagcaatacatatattgaaaatggctcttattctattgcatgtagtgaaccagaggaattggaatattttgatctaatccagacattgactcaaacaagtcaagctgaattcgatgctaactcaatcatcgaatttgcaaacaccgttagtcatatcatctctgaaaatgaaatatatggtcattactatctatataggatagagcaatattctgattttgaaaggtatcctctgctattttcacatataaggatgcgaatttttagtgacataactggcattcaatggggaatagttatacagggcaaataa

SEQ ID NO: 292356 - DNA, 618 bp, Morganella morganii
atggaatatacaaaaaatattcaggaagccatttttgatacaaacggtctggccgttgtaacgggctgggctaaaatttatcgctgccaccctcatacacgggaatttatcggcgcagcaatggataatgttccatatggcgcatctgtaattgctgatgcttatcttgatgagccagaaataccgtctgcaccgaatttagctattatccgctcccctgacggaaaatcatggatgcacgttccggattatcgaggaatcgcggcatatgataaagagacaaagcagcagactgaaattactgaactcggtgaattaccggacaatctgactacagatttgcccaaaactccgtttgataaatggaatggtaagaagtgggtaacagataagactgaacagcaggtgtatgaagttactgttgccgaaaataagaagcggtcactgttatccgtggcagaacagacaattactatgctggaacgtaaggtgcgcctcggcatggcgaccgatgaagataaacaaaagttaacaaaatgggaaatattcagtgtgaaagttgctgatgcggacacctcaaccgccccggatataatctggccggagaaaccggaatga

SEQ ID NO: 292357 - DNA, 234 bp, Morganella morganii
atggacgaactacgcgaagtgaaagagatgtataaacctgaagatgtagaagctggaagatactatagccttgcaataaaaaaattaaattccggcaaagttaatttgaaaaagaacatccatgaaaatattgaaattggaattaaatgtggaatgacagtttcacagatacaggatgttttaaacgacattagcagagagtttttttctgtatcggaattaattaaaaattaa

SEQ ID NO: 292358 - DNA, 1296 bp, Morganella morganii
atgagtatggataataaagtgccggagattcggtttaaggggtttagcgtggcttgggataagaaaatattaggtgacttggttaagttagaaaacggtttcgcttttcagagtaaatattttaagaacaagccaactaaagttatagttcttacaccaggaagcgtaaatattggcggtggatttaaagctggtaaaggacaatactacgatgagaaacaggaggttccgtctaagtatgtatttaagcccggtgaaatgttcataaccatgacggatttgactccaacagcccaagctttgggttttccggcaataattccaaaagatgaaaacacatatcttcacaatcagcggctcggtaagttagttgaattccaaggtgatttagcttttttgtataacctgttgcgcactacgataaaacaaaaagaagttgtcttagcttcttcgggtaccacagtaaaacacacttcacccgacaaatttttgaatcgtatttgcttcttccccaagaaggaagaacaaaccaccataggcaactacttccaaaagcttgacatgcttattaatcaacaccagcaaaagcatgacaaacttaataatattaaaaaagccatgctggaaaaaatgttccccaaaccaggtgaaactatcccggaaattcgctttaaagggtttagcggggcgtgggaagagaagtcatttggcgtttgctttgttaacgtaccaaacaatactctttccagagctgacttaaactataaagctggattggcaaaaaatattcactacggagacgtattgattaaatttggtgaaattttggatgcaggcaatgagttattaccatttattacaaatgatgatgtagttaataagctaaatagtgctgcgttacgagatggtgacattattattgcagatgctgccgaagatagtactgtcgggaaatgtactgaattatttaatgttgatgagcagttgattttctctggattacacacgattgcagtcagacccattttgtcttttgcttctaaataccttggttactacataaattcatcgtcataccatgatcagcttgtatcattgatgcagggtacaaaagtattatcaatatcaaaaacggcaatacagaatacgaatgttaaatttccaaaggattttaaagaacaagcggccatcggcaactatttccaaaaactcgatacactaatcaaccagcaccaacagcaaatcactaaactcaataacatcaaacaagcctgcttaagcaaaatgtttgtataa

SEQ ID NO: 292359 - DNA, 207 bp, Morganella morganii
ttgcatgagaaggaatttaattcagtatggattgaaattcagctcgtgcatattgacaagaatgttattcgtggcgcgtataactatgctcagtatttggagggggtaaaaatgatgcaatggtatgtagattacatggatgagttgggggaggggcgtaatttgggtgaacttttaactaaaactagctatccttatttgtggtag

SEQ ID NO: 292360 - DNA, 582 bp, Morganella morganii
atggaaaaattcctaaccgctacttctacatttattgaaaaatcaacagatacgaaatattttcttttatttgctagctttttaattttaacggatattgccctgttgaatacaattaatatctcaatattgcaactaacatatacggatattacaaataagttggctataggtgcagttttagtttatatggcattatttcttttttatgtttcaatattaatgcctgttgtttcttatgttttgtttgaatttattaagtttgctccattacgtttttttgaaatttttccagatgtaaacgaagggaagtttagtaaagaaggatatatatctatagataacctaaaaaatgaggctgtattggaaaatagtagcgtaaagctaaatttgtatttaaagcaagaaagtaaaaataatgatgaattgaagttgtaccagttagcttttacctgtttgattactggttgtctatctttcattctggctcccaacggtactcgtttctatatcaatgttacttttaatggggtattgcatatttttagggataggtggatattgcttgtatcgcttcactga

SEQ ID NO: 292361 - DNA, 321 bp, Morganella morganii; identical to SEQ ID NO: 103996

SEQ ID NO: 292362 - DNA, 825 bp, Morganella morganii
atgccccatccaatacaggacgccgtgctgcgggtcgaccggttgagcgtcgtctatccaggcggcgtgacagccctacgcgatacctcgattgcatttcggcgtggtgagttcaccgtgctgcttggtctctcgggcgcaggcaagtcgaccttgctccgtagtctcaatcgactcgtcacgcccactggcggcagtgtcaccagcgaactcggtgagctcggcagcggctcggccttgcgtcagcatcgtcggcgtaccgccatgatctttcagcaccaccagctaatcgaacgtcaaagcgcactggctaatgtgcttaccggtcggctggcctttcacaacacgctccgctcgctgtttcctctgccgcgtgccgatcaggagattgcgctcagttgcctcgctcgggtcggtctggcagacaaggcgctaagccgggtggacaaactgtccggtggccagcagcagcgggtaggcatcgcgcgtgcgctagcgcaacagccggcgatcattctggccgatgagccggtagccagtctcgacccggccacttcggtccgtgttctcggattgctgcgcgacatctgcaaggaagacggcatcaccgccatcgtttcgctgcatcaactcgaatatgcccgccgcttcgccgatcgcgtcgtcgggctggccgattctcagatcgttttcgatgccgcgccctcggaactcaccgatgcgcagcttgagcgcatctatgcaggccgctctacgactcagccagcgaatgctccggctgaaccacctgtcatgctcgaaccttcactggagatgtcccgatga

SEQ ID NO: 292363 - DNA, 864 bp, Morganella morganii; identical to SEQ ID NO: 103998

SEQ ID NO: 292364 - DNA, 828 bp, Morganella morganii; identical to SEQ ID NO: 103999

SEQ ID NO: 292365 - DNA, 1011 bp, Morganella morganii; identical to SEQ ID NO: 104000

SEQ ID NO: 292366 - DNA, 870 bp, Morganella morganii; identical to SEQ ID NO: 104001

SEQ ID NO: 292367 - DNA, 636 bp, Morganella morganii
atgaagcagatgaccttcgccgacgccgagtacgctggcaagcgcaagcaaacccgcaaggagttgttcctgatcgagatggatcgggtggtgccgtggaagggcttgattgctttgatcgagccacattatccgaagggtgaaggtggccgtccggcctacccgttgatggcgatgctgcgtgtgcatctgctgcagaactggttcggctacagcgatccagcgatggaggaagcgctgtacgaaaccacgatcctgcgccagtttgccgggctgcacctggagcgcatccccgacgaaaccaccattctcaacttccgccgcttgctggagaaacacgagctggcggccggcatcctcgctgtcatcaatggctctgggcgaccgcggcctgtcgctgcgccagggcaccatcgtcgatgcaacgctgatcaatgcgcccagttcgaccaagaacaaggacggcaagcgcgacccggaaatgcaccagaccaagaagggaaaccagtattatttcggcagtgcgacctgaaagtcgcatgggtttctgttccgcaggttaacgcccgacggaaccgactgttccaccactcgttccctacccagacaggcgtggccggtaacagccgggtctga

SEQ ID NO: 292368 - DNA, 462 bp, Morganella morganii
atgtcgggagccacggacgaccgcgcagggttgcagcagctgcttgcccgggcggaaaaagacgacattatcatttgtaccaaaatggaccggctagggcgcaataccgcagatatgatccatatcgttgatgcctgctataaaaaggggattgccatccgttttcttgaaaatggcctgagtaccgaagggacaatggggaaaatggtgattcagattttggctgctgtggctgaggctgaacgggagcgtattctggaacgtaccaacgagggacggttgattgctatggcgtccggtgtgaaattcggacgtaagccccacctgaaatcggactcggccatggcgcttattgatcagaaacaaccagccagagtggttatggaaaaaacaggcatttcgcgggccacttactttcggttaaaaaaatacattaaaaatcagcaatcgaataataactaa

SEQ ID NO: 292369 - DNA, 909 bp, Morganella morganii
atgattaaaatcgatcgctcagttgaaccggtgccagcctcactaaccacagtaggtaatgttgttgataatgaacgtattgctgcacgaagatattatgcagtcgtacctgcccccagtaaaacgtataaatttaagcgatataaagaagatgatatcgtcgaagctttggaacacctttttcacggtaagtgcgcctattgcgagagtaaatacataggcacccagaaaatggatgttgagcattatcgtccgaaaggaaaagtgaatgaaagtcaggggcatccaggttactggtggctagcattggaatgggagaatttacttccatcctgcactgactgtaaccgccgacgtgggcaaaagtcctatactttacaggctgatggcacagctgttttcatcgatgatcccgaaaattcaggcaaggaatgtgcttttcctgtatctgggacctatagagctcagggaagtcaagacgatctaaaccaagaaactcctctattaatcaatccttgtaatcatactccaggggaccatcttcgctggcagatcaacattttgaagattcccctgttactagcaaattctttgcagaatgttccagatgagatgggagtaaaaagcattgaaattatgggactgaatcgttttgggcttgtaactagaagagctgaagtactacaacctgttgcagtacaagtgaacaatattcatgagttgatagagatcacgacaactttacaacccggggcgcctcgagatcgctatcttgcgaagattgggcgagatattgaagcattgcagacctgctatgaacctaaccgggaatattctgcaatggtgaagtcatatattgattcacatatggataatctaaaagaatatcttgctagattattggaatga

SEQ ID NO: 292370 - DNA, 2172 bp, Morganella morganii
  misc_feature (2119)..(2128): n is a, c, g, or t
atgagaaaaattaagagactcaacgccgacatccctgacacattaaaaccggctcgtattattcaagaagaaagcgaattaaggaaatattttctccaatcacctaaattgcgtagtcatagccgccctcccatcaataaagaaattttttattctgaaagcgttaggtctgcactgcaaaaaactttctatagtcgctgtgcctggtgtgaaacccatatcgcgtcacatggtgaggaaattgtccattttcgccctctcagtaacgcaaaagggctaaaggaagaggaaagtctggattcttacggttggttagcatatgtgtgggacaatctttttttgtcgtgctctgggtgtaatcgtgtgcgtcgtaattacttccctgttgggtctgcaagagctccagttctttcgacgtggaaaggtgctaacattctagaaacggtattgttgattaacccctgtctggatgaccccattcggcacctgtcgctcaaccgtgatggaacactgatggccttaacagataaggggcagcacaccctcatgctttttgatctcaaccgaactgacctgatttctgcccgaaaaaagcaaatcaatcatgtccactccctattctccggcagggaaggttctgtcgatgaattccaacagttttatttaagtgataattgcccacagggtgtagtcaatttgatcatagctatgtttatgaaggaacatgttggggggcgacgatgccgttccacaaacaaagtcgaatcctttattaacgacagcgtgaaacttgggtattttgcatttgataacaatgccgatacccaaagcgaaataattgaggagattaagctgctgagttatggggacgttgaatatgacaaatttgccagcatcttagattatgaaagtcaggcgtctcgccatttaaaaaaaatcgatattcatcattttaaaggccttgatcacttcaccttaaacctgaaacatagcgagtcgaaatctcttgccccctgcacaatgctactaggagaaaatgctacaggcaaaagttcaattcttcaatctattgcactagcaatgatgaccgcaacgcaacgcaaaaaactgaacctgctctatgatgactttatcgctcgggacaatggcgaatggactgtagatcatattcaacctgccgagattaatcttatatttaatgatggttccagtagcatgtttcgtatcgatgaaaatttcaataccatcgggaaaggtgctagcaacattgtttttctggcctatggggcaagacgctttgtgaagccacttaagcgaggaggtctaggaaatagtattatcagcaatacgttattcaacccagttgctctgttgtcaaatccaaccgggtggctacaggaatgtgatgataacgtatttcagtcagttgccagggcaatgaaggagatccttgctttaaaacaggatgacatcattttccgcaatggacaaggacatatcatggtccgtgcgcacaagcgtaatacaccgcttgaaaatatgagtgatggctacaaagctttgttttacgtggctatcgacattatgcgtcatatgcttaagcgctgggacaatctggaatatgcttctggaattgtcataattgatgaaattgaaacgcatttacatccccgatggaaaatgcaggtggtgggggctttccggcgggcaatgccaggagtccagttcatatttacaacccacgaccctctttgcttgcgaggaatgtatgatggtgaagtgcatgtgttaaaacgtgatgaattgcactcaatcaccgaggaagacaacctacctggatttcaggggctgagaacggaacaactattgacatctgagtattttggccttctctcgactaatgatccagaacttgagcggagactagaaaatattactaggaaagagggaagcactcagacggaatatattcgtcagatagaaaaagaacttagtgaaataactgtacttggtacaactattagtcaacgggtagtccatgaagcattggcgcgatatttaatttccgtaacaagaaagcgacctgagaccaaagatatgaaagaggatgcaatcagannnnnnnnnncaatcagagcaatccttaaagttcttgagcaaaaaggctattga

SEQ ID NO: 292371 - DNA, 1848 bp, Morganella morganii
atgacggctgaatatcagttgttagatccacgcatacaaaagtggatatatcggcaaggctggacagatctccgagagctgcaaaaaaaagcaattccttcaatattgtctggtgatagagatgtgttaatcagcgcggctaccgccgcaggtaaaactgaagctttttttctaccagcctgctcagtgactgcaaacattaggaatggctttggaattttgtatattagcccgttaaaagccttaattaatgaccagtaccgacgattggaaagcttaggtgatacactagaaatgccagtcacaccttggcacggcgatgttacacaaagcaaaaaattaaagattaaaaaaaatccttctgggattttactgataacgcctgaatcactagaagcaatgcttatccgtaatacaggatggctaaaacaggcttttactccattatcttatatcgccattgacgagtttcatgcctttatcggatccgagcgaggtatgcagcttctctctttattaaaccgtatcgaccatcttctaggaaggattaataatccgatacccagagtcgcgttaagtgccactctaggtgaactggaacgagtaccattatctctccgaccgaatcaaagtttgccctgtgatatagttactgacaatcaaactcactctacactgaaggtacaggttaagggctatttggaacctctagtcatttcaggcaagcaaccccctatgtcagccgaaatacaaatctgccacgatatttttcgattttgccgtggtgattcccatttagtgtttgctaatagtcgtaagagaacagaaagtattgcagctacacttagcgatctcagtgaaatgaatatcgtccccaatgagttctttcctcatcatggctcattatcaaaagagctgcgagaaacgctcgaacaacggctccagaaaggtaatatccctaccaccgctatttgtacaatgactctagaactcggtattgatattggtaaagttagttctgtagtacaagttactgcccctcactccgtcactagtttacgccagcgaatggggcgttcaggccgacgaggttcccccgctatattaagaatgttaattgccgagaatgaactggtacctacatcaggtattgttgaccaactcaggcttcagcttgttcagtctctggcaatgatacgcttacttattggcaataaatggtttgagcccgcagatactcgtcaaatgcattattccacactgtttcaccaaatcttggcaattgttgcacagtggggaggtgtacgagcagatcaactttggttacagttatgtcaacaaggaccttttcggaatgtttgcatcgatgacattaaaatactgttacaccatatggggcaacaccaatttctgacgcagacttctagtggtgaattggttctcggagtggaaggtgaatatcacgttaatcagtacactttttatgctgtattcaataccccagaagagtttcgtattgtcgcaggtaataaaacactgggctctattcctgttgattcaccactaatgccagaacagcatattatttttggtgggcgacgctggaaagtgactgatatcgatgatgaaaaaaaattattcatgtcgaagcaacaaagggtgggcagccacctatttttggcggtgaagggatgtctattcatgatatcgttcgccaagaaatgtttattatttatcaagaaggcgactaccgtatcgcagttaatgatcgcaaagctgattttgctgatactacagccagagcattatttgatgaggggctacaatgttttcgtagtaataatctag

SEQ ID NO: 292372 - DNA, 267 bp, Morganella morganii
atggataactatcttgttcctgatgaggcattaacagcatttttacaccattgtagtaatactatcggtgatgcttactttcgtacaccacgaaacaccattaaagctttcctagacatgctagctgtactcgaacaaaacccttcaattcaatggactcaattaatttcaaatgtcaccattgagaaagagaagccgagtgatatggatgaaattatatcaacagggaatactgatgaggacagcctcgcggatttcaaattatga

SEQ ID NO: 292373 - DNA, 429 bp, Morganella morganii
atggaggtcggaagagttaacaagacactgtatcttctcaactatattgatgatgaggactatcgccgcaggatcctaacacagcttaaccggggcgaaggtcgccatgccgtggcaagagccatttgctacggtcagcgtggtgagatcagaaaacgttaccgcgaggggcaggaagatcagttgggtgcgctgggtctggtgacaaacgcagtggtgctgtggaatacgctttatatgcaggaagccttgtcgcacctgcgtagcactggggaagggccagaagatgaacatatcgcgcggctttcgcctctgatgcatggtcatatcaacatgctgggacattatacgttcacactaccggaggatattatgaagggggaattgaggccgttaaatctcaatttaaacaatgaattacctccttag

SEQ ID NO: 292374 - DNA, 180 bp, Morganella morganii
atgttcataattactgatcttgcccagcttatagacccgctgatcgtccggggttgcgataaatctccgcctgaaaaaactactgatcatatcctgcattcccaaattgtccgacaggttattggtaaagtgatccccctctttaatatcaaactgtacttcaccaatctcacttactga

SEQ ID NO: 292375 - DNA, 1158 bp, Morganella morganii
ttggatgcttatagccgctatctcggtaagaaagaagcgtcaagaagtgatattgccgccataatgcttctccctgatgaagtcctaaacgaagatgcagaacatacgtttacgaagtttaaacgctgggctgatgaacaaattagtgaaaatgcaggattagcaaaagttgctagcttttgggcaatactagatattcctgccccagataagatcaataaaaaagaagccgaattgatacaaaattttattcaacgcacaggttacggcgttgcaccagatacacgttatcaccatgtaaaacctgagcctgacggaaatatcgttttatttttagagggtcatggtgaattcttcacaccctctaccgaatttttgtcagtgtctgtagcacttcgattgggtgcaatgattgcgcaaatggaccaagatatagacattactgaacagattgtactggaaaaaacgattgatcataatgacaccttgtcaccaactgaaaaacgctcgctacatgcctacctaaaatggttactcaatacacctgccaatatggctggcttgaaaaataaaattgaacaactgagcgataaagaaaaatctactattggtaatgtaattcttagggtggcttgcgctgatggaagaattgacttagctgaaattaagcaactagaaaaaatctactccagccttggcttagacagcaaaactgttactagcgatctccatcatctgtcaatgacaggaaaaacctcagagcacacaacacaaacagtattggaaagaaataatattttctcacttgatgaacacgctcttgcccgtcatgaatccgatacagcaaatgttcatcagttgctgagcacaatttttgaagaagatagtgccacagaagagcgaccaaaagatattccattaaattcaacagttactcttgatgaaacgcaccatcaactctatcaacttttgttagagaaaaatcgctgggaaagaaatgaagtcgctgaactatgtcagcaacttaatttgatgttaatcggtgcaatcgaagctattaatgattggtctttcgaacaagttgatgcacctcttcttgatgaagacgatgatggcatttacgtcgacttagaaattgcacaagaactcaaaggataa

SEQ ID NO: 292376 - DNA, 165 bp, Morganella morganii
atgtgggtctgctggtacgatttgttgctaggttttccgttagatgattggctgaataccctgaagatgaaaactgaagaacaactggtggaatggctcattggtagacagatggaaaactgggggctagagagtattatgaatgattatgttttgtttggttga

SEQ ID NO: 292377 - DNA, 273 bp, Morganella morganii
atgaaacgtatttctcctgaacgaaaatcagcggcattggcgaaattgttgccaccctataatatgtccgtagcgtcggtatctcaatctgatggaatatccgaagccactctctattattggcgcagccaaatgaaagcggaagaaaaacccatgcatggtaccgataaaacaaccgaacaatggcctgccgacgcgcgactggcggtcattattggaaccgcaacgctctctgaaactgagttagccgaatatttgactaatacacggtaa

SEQ ID NO: 292378 - DNA, 303 bp, Morganella morganii
atggaacgctgtaacaaaggggatcttataatgaaaagcagtcttatttttgtgctctcatgtgtgctgatcacaggatgcaaaccggacaatttgtcagagcagcctcagaggatccgtgggtttgacggcgtctatacatgcaggataagtcagtcatttaatcaactggcaattgagcagaaaaataaacatgtttttccggctgtaatgacaaaaaccaccattacggttaaaggcggtatcatgacaattcatggtatgacgtcactcatcagatgtcggtcactgaaccaccgatga

SEQ ID NO: 292379 - DNA, 606 bp, Morganella morganii
atgaagttcccaaagcctaatgtgtatgaattatacgtcaaaccaaatggaaagaagtctacttttactataaccaatactgctggatcaaataaattcgaacaggaggatatagctcgaggtgctaaaatttatatgctggtatctaaagatactggtggaacggtaaattatgtagggcaaactattacttcaatacaaaagcgactttaccaaggtatatcgcatcaaatttaccgttggtcaaaacagacaaatcattatgatctttttgtctggaactttagcaaccttattggtcgatcttcatcatactcattggattcaatagaagcagaattagccttagctactcgagttaatcaaggagaatggcccatatttcaaaccagtataaagtttaggtggtttgctttatcgagttttggttcctctgctcaagcaatagcacctgtaatgattgaacaactttatgagcatttacttgctagggggaatataagcgatcatgacattcaattattgaaagagcaaaaatcacgtgcgaaatatttactggaagccatgatgataggcacacagcaaccgcttaccatctcgacttga

SEQ ID NO: 292380 - DNA, 2724 bp, Morganella morganii
atggctaaaggtgcccaagaaaacttcgaacttaataactcgttttatatccacctacatgagttttacaagcagaaacgtggtctcgtgcgtaagaattatactcgactgagtaaggcgttcctcgattataatgacccctcacgaccaggaagttttctccgaacccctcaatttgaagcgcttgaaatatatgtattcattaaagagtttttagataataagcctgtttatcagttgtttgaagattggtataccagccaaggtaagtttgaaggacgtgtaacaggtattgaggcagttgaaggtcaaatagtacaaggcgatatgttttgggagatgtcccaacaagattacaaaggtatctttaaaaatatgaaggccagcaatgctggccgtttgtatccaaactatatttttgccctgacaatgggaacgggtaaaaccatcttaatggcaacttgtattttttatgatttcctcgcaggtaacaaaaaaggtaacgatgaacgttttatccaaaacgcgcttatctttgccccagataaaaccgtcttacagtcattaagagaaatagaatccttcagtcacgccaaggttgtaccaccagaatatatgccaatcgtggcagaatttaaatttcactaccttgaagatgcaggtgtatcactcaatacgcttgatggctcaaagtttaatattattgtatcgaatagccagaaaataattctaaaacgcgatagtaaaggtaaatcaagcgtcgataaattgtatagctcaggcaaggatatttaccaaggtttgggcgatattggtgatgccgttgccgatatcttgaatattgatccagattcacttgctgtagcacctgaaacagaaagtgacttggttactaatcagcgttttgaaaaattaaaaagactaccccagttagggatctttgttgacgaagcacaccatgcttttggggatcaattagccaaagatatgggtgtgaaaaaggccgctaattcgttgcgtaaaactattgatgagttggcgattaacttaaagcatgccggtacacgggttgtaggttgttataactatacgggaacaccttatgttggtaaaagtgttcttcctgaggtggtatacgcctatggcttacgtaaagctatcgataacaattatctgaagcaagtccgtctaaatggctacagtaatacaaggcacgaagattttctcgagattacaattaataactttctcgatgagatggaacgtctaagctatatatcattagatataaatggccaagaaattgttaaaaattttaaaccggaaaatatgctaccaaagatggctatctttggtgctacaattgaagaaattacgacagagattcgcccagctgtagagaatatacttgccaaacgtgggatctcatcagacagaattctggtaaacgtaggtgacgctaaagtcacaaccgatgatgatattcgtgagtttaaccgtcttgacacacctcaatcagagaaacaatttattctgttggttaataaagggcgcgaaggttggaactgtcgctctctattttctgtagctctgtaccgtgagccaaaatcaaaaatatttgtgcttcaggctaccatgcgctgcttacgtgctattggcaaagcacaatacacaggtcatgtttatctcactcaggataatctgaaattgctcgataaagagttagaagctaacttccgagtatcagtggatgatattaaagagcctgatccgaacaaagaaactgttcatattcgtgtgctacaaccaccagttaagatcccaattaagcgtgtcagacgtagttacaaattggtggaaaaggatgaaattgtacagggctataagctaggcttagacacaatagagctcaatgattatcgtttaatccatgaggttcgtgaaggcatgagaatgcctgatgaccttggtaatacgaaaaaagcgataagagatgatctttcttacctaaaaattcagagaaaattctcacgtatttctctggtcgctgatattgcacgttacctcaataaaccgtgtattgagatcgataaaattatctatttaacagaagaaagctttgatggaatattatccttagtcaatcagtttaacgaagtactttatgaccaagtgattcctcgtctatttaaggcgatgtatgacatcaattcagagagtatcgaagaagagttcgaagttgaattgattaaagaaccgccgatagaccctggttattacactgtaacagcggctaaagataagattattcgcaaattggattctgaggtatctaagatagcagaacgcagtttccacttagataattactgctttgattctaaaccagaaagacagtttttctgggatatgctgcataacgataaggtagaaaaaatctggttcactggcatgctaacacatgggcaaagtgattttgttattcactatgtagattccgacactcagcgagtccgtagttactatcctgattttctgatcaagaaacaggacggttcttacgtgatgattgaagttaagggcgaacatatgattgactctcagaatgtaaaggacaaacaggaagccgctgaacttatgggggtttcagctggaataggttatgaaattattaaggggaaagatgccgcagctggttcgtatggtcgagactttttaaattaa

SEQ ID NO: 292381 - DNA, 1773 bp, Morganella morganii
atggccaacgaagaacaaaacaacattgaaaagtatgaattcgagccaattaaaggctatccgatgctgaactggaaaggaaagcgcccgtttcgttctacacagtattttcctgcgcagttaaaagaagtgtatggacatgaagatgaaaatggctggataaataaaattttctggggtgataaccttcaaataatgagtcatttgctcaaagaatttagaggccaaataaaactcgtatatatagatccaccgtttgattccaaagcggattatcaaagaactatcgaattaaaaggtaaaacagctaatagtgacaatacaagttttgaagaaaagcaatactctgacatgtgggctaatgatgaatatcttcaatttatgtatgagagactaattattattcgtgaattacttgctgatgatggagctatttatctccattgcgattacagaaaggcccatcatttgagatgtatcatggatgaagtctttggatccgagaattttctaaactctattgtgtggcaatttacaacaagaagttcaattaaaacttcttggaagagaactcatcacgatattttattctataaaaagagccgtaatcctatttataactgggacgatgagaacgttattgaacctctatcagagagtacaattaaaaagtaccgtttggaagatgaaactggaaagtatagactaaacggacggtttattacaggaagtccaataaaaggtgctaaagatgttgaccaaaaatgggaaattagcaaccctgatttagttgtcagagattatttacgaaagggaaaagtagcgggagattgtttttttatagatattgaaaaccaaatgtctctaaaccgtactgattatccaactcaaaaaccagaagctcttttgaagaaacttttatcagcgtccacaaaaccaggtgatatcgttttagattgtttcatggggtctgcatcaacacaagctgtagctcataaactagggcgcaaatttattggcgctgatattaacatggggtccattcaaacagctactaagcgattaaacagtatgcaagcgaactttgaggtttacactgttaataactatgatgtttttcgtaatcctattgaagccaaagagctccttatcgatgttttagaaattcaaaagttggattcaaatacagcttatgatggtgaaaaagacggctataaagtaaaaatcatgcctgttaaccgcattgcaaccaaggaagatcttaatgaactagtagcaaacttcccatataaaaaatttgaagagcgcaaagctgctaatccaaataaaccggttgaagaaattatgctggtatgtatgggacatgagcctagtttgggtgcgatacttgaaaatgaatgcggttataagctgaaagtcgaagtagttgatattttacgtgataaatcagaattaacctttaaatatgattcagaagcaattattaaaattacaaatgggaaattggttgtggaggcattttatccccgtaatttgctacaaaaacttagccaacaaaaagaagatattaacgaatggcgagagatggtggaatccatcatgatcgactggaattatgatggtgctgtgatggaacccatcgtcattgatattccggataaaaacgattttgtttcaggtgaatatgagattccgggagacgcaagcaacattaaaattaagatcacggatttgctctctgagtcttacgaagaggtgattgcacatggctaa

SEQ ID NO: 292382 - DNA, 2607 bp, Morganella morganii
  misc_feature (627)..(636): n is a, c, g, or t
atgtacttaggaacctttcactcaatctgcctgaggatattagaggaataccgcgaatatactcgtttgaagcgttccttcgtattgatggaccagtttgatcaacaatattttatttatcagaaactgcgagaattcaatgatatcgaaggtatagaacatatccagggggaacataaacttccagcatggataaaatcagaaaatttaatcggatggctaaataaagtttctgaagaggtcttggatgttgaagagttgtgtcgttcttcggatgtagcaatcaacgccttaggtaatagctataatgtgtatcaaacactgctagctaaacataatgctttagatttctcctgcatccagctcgaaacctactatcttcttcgtgagaatccacatctacttaaggaacttcaagagaaacttgaataccttatggtcgatgaatatcaggatacgaatacaattcaagaaaaattactctacctcttaatgggagaaaaacaaaatctctgtgttgttggcgatgatgatcaagctttgtatcgcttccgtggtgcaagtgtacgcaacatacttgaattcccgcaaaaatttccaccaagtagatgtcagcaggttaaattnnnnnnnnnntctataaactatcgttctcatcctgaaatcgttaggttttacgatacgtatatgcaagagaagccttggctgagaaacgggatcaattatcgttatcctaagaatattgttgctcgagatgatatttttccgaatggtccgacggtagttagtgccattactcctgaaggaaatgattggcatgatgatgtttatcagctattaattcatctgagagacaatggtaaactgaaagactggaatcaggttgctttcttatttcggtcagtgaaaaacgataaagtgaggctactggcacaatttcttgaagataaagggattccagtttattcgccgcgtgcaaatctgttctttgagagagaagagattcggttaatgctcggtgtattacatctcgtttttccaatggttctacctgatcgaaaaaagcgtattcaggaaggtaagactctacctatttggacctattatgaacaaaaatgtctgtcaccgcttctctctgagctaagtaaaaaagaacaatcagatttagtctcttggtgtaagaaaaaagcacatgaacatatcaaattaaccaaaagtgcagataattccttcttagggatattttacgaagtattgcaatttccgctattttctaaatatttagatcagaagagcggtaatgcacgtgctcaaagaaatttagcacagtttagccgcatgcttggtaagtttgagtatttacatcatatcagtgttttaaatcccaagtatatggaacggaatcttagagatctctttgataactttctaagatttttacatgatggagggattgatgagtacgaagatatgtccgaatatgctccttcaggttgtatctccttcttaaccatacaccagtcaaaaggattagaatttcctattgtttttgttggctctcttgaagcaactcctcgtaagcaatatacggatcttgatgaaatcatcgaaacccaatatatggggaaaaaaccatttgagccattagatgacacctattatactgcattttcacggccgcaaaacttactcatactcaccggccaggaaaagtctgggcatggaagaacaccgtctcggcattttgtcgactgcactgcaagtctaacgtattggcgtgaggctaaatttcaacttgctgcgttagatattgagtcggtaaaagatgtgaatataaaaaatgagtatgcttttacatctcatattacgttatttgaaacctgtgcagagcaataccgtttatttaaagagttagaatttcagccagtcaaagcaagccctatgctctttggtacgttaattcatgaaacccttgaagacattcacaaagtggctattcgaggtgaagtgtttaacatcaccgaagataatatcaaaatatggttgatggataattatcgaaatttggcaaaccgcgaacgtatgtatttgggggaatctacattaggtgcggcgttgaaacatgttatgcgctatgttgggcgtaagaatggcgattggtctgatattaaagaaacggaagtcgatatttctttggttaaaagccactacgtactaacaggcagcgtcgatttaattaaaggtgctgatggaacagtcgaactggtggactttaagtcagaacgtaaacctgatatggagcgtgataaagaacgtatccagcatcataaaaagcaacttgagatctatgctcatttggtagaagaacgttacggttatcaagtgagcaaaatgcacctgtattttaccggtgaaaccaatggattacctaacatatcttttaacaaaacgagtggtacgatcgacaaaaccgtagcggaatttgatagaatcgttggcagaattgagagcaaagatttttcgcttaagtcacgaccagataagacctgtgttgactgtagtgcaagagcctactgtgaccgaaagaactggaatttctgtggttga

SEQ ID NO: 292383 - DNA, 219 bp, Morganella morganii
atggatgaaggctcggctagcggacgtatgaatcattacgaaaaggggcggcatatcccggatagagatatgctcaagaagctagctagtgaacttggcgtcccgctgagttactttttttgtgaagatgagttgagtgcagaactcgtctgcctgtttaataatctcgatgagcagtcaaagctgagtctgattagtaaactgcgtcaaactctatga

SEQ ID NO: 292384 - DNA, 474 bp, Morganella morganii
atgaaccaaggaatcttattcagtagtagtaaaaaatttcgtcatattttaaaccagttaactagtcatcaggtcttgcgtagtgatttgattaatctcgcaattactgaatttcgactctctgaaaagcaggctgtagggctggttgaacgtggtatctatcagctaaagcatcaaggccttgtaaaggctaatgggaaggtaaaaaatatcagctaccagttttcttttggcgtgataagccattcaccacttcatgtcgttaatgatgcagagcttgtgctctcttctgaaaagcagatattagaaaaagaattggcgcagatccgctacgagctggaagcctatctagagtttctggaaaaaataccgaaacagaagctcaaaataatgagattacaacaagatagagctgaaaaactaaatcagttaaatggcaagttacgggcaattaaccagctgttatctctgtaa

SEQ ID NO: 292385 - DNA, 1929 bp, Morganella morganii
gtgattttgtacatagctgaaaaaccgagtgtcggcagggcggttgcggatgttctgcctaaaccgcatcaaaagggtgacgggtttattaaaaccgccaacggcgatgtggtgacttggtgtattggccatttactcgaacaggctgagcctgatgcctataatcctgaatttaaaaaatggcgtagggaacatttgcccattgtgccagtggaatggaaacactcggtaaaacctgccacgcagaagcaatttaacgttctaaaaaaactgattaacgaagccgatgtgttagtcaatatgggcgaccccgatagggttgggcaaattctggttgatgagattatcaattattgcggtgtcccaaaagagaagcgtgaagcagccaagcgctgtttaattaacgatatgaacgctgatgctatccaacgtgcgttaaatgacctacgccgcaatatcgactttatccctctggctacttcagcattagcgcgtgcacgcgctgactggctctatggcatcaatatgacccgtttatgtaccttacgagggcagtcatcgggttataacggtgtgctgtctgtaggacgggtacagacgccggtattaggtttggtcgttaatcgtgatttagaaatcgagaaatttgtctctaaacccttctatgacgtgtttatcgatcttaaaaccgataaagaccaaatttatacggcaaaatggaaaccgagtgccgcctgtgaaccctatatggatgaagaggggcgactggtgctgaaaaagctggctgaaaccgtattgaagaaggtaacaggccagccaggaactgtggttgcggtaactgaagaacgggcgaaacaagctccaccattaccctataacttgtccgcactgcaaatcgatgcttccagacgttttaatctaaatgcccagaagacgctggatgtttgtcagcagctctatgagaagcataagttgattacctatcctcgttcagattgtcgctatctacccagcggacactttgacgatacacatagagtcactcaagcgatcgttaaaactgtcccaggactggcgacagctgttgaaattgccgatctgtcagtcaaatctaaggcgtggaatgatgataaggtcagtgcgcaccatgccattatcccgaccagtcgtggggttgatacgagtcgtctatcacttgatgagcagaatgtctatgaattggtcgccatacagtatctgatgcagttttacccaccttttcaatatcaggaaaagcagatcgataccgaagtgggtggcggcttgtttatcagtaggcaaaaagaagtggtggataaaggttggaaagcattattgcccgatcggaaatcttcatctgaagattcagagttctcagccgtaagattgccagaggttgtcaaagggcagggggtactctgtattgatggcaagctggatgaaaaaaacacctcaccgccacgtcactttaccgatgcctctttgctatcagccatgacgggcattgccagatacgtcaccgatagagcgattaaaaaggtactaagagagaccgatggtctaggaacagaagcaacccgagcaggtatcatcgagttactgtttaagcgtgactatttgaccaaaaaaggtaaagagattcatgccacagatattggtcgtagactaatcctctccctgccagaagccatgacaaagcccgatatgacggcgcactgggagtctcagttagaagctatttctgagaaaaaaatcaagtatggtcagtttatgcaaccgatggtcgatggcttgcatgtgtttattcatcaggttgacaatatccgttttgaaggattgaggggcttaggtaaggcttcctataaaaagccctcagtaaaaaagtcggtaaaacggcagagtaaagactaa

SEQ ID NO: 292386 - DNA, 477 bp, Morganella morganii
atgattgatgaagagacgctctctgaccgaggtaaacagaccataatcaggcttgaacgggcacttgaacgtttgttgaacggcgtcccggagcggactccccacgatggacgagtcagtctgagccgtatcaatcaggaagcgggtctgagttcggggggtatctactattacgatgagtttgtccagaaagctaaaagagctattcacgaaagaaagctcgataatgcagtgtctactatcgagtcaggtaaagcctcggtggataaaatgcgcgtacaaagggacaaagaacacgagttaaaagagcgttacaggtctcaacgagacgatatcaaagccttctgcgataagattattgctaaaaatgctcagttagaattctctttgttcgaagcattagataagatcgaggatctggaaagggaagtatcagcactcaaggttgttgatataagcagcaggagaagtcagtga

SEQ ID NO: 292387 - DNA, 1875 bp, Morganella morganii
atgaaagaagttctgaaatttattgatagcaataatatttatgatgatctgatcgtttcttttgacactgaaggcaatccatatagctactatggttctgataagtggtacttatggtcattaagctttaatgtttctttctccagattatctggtacgttccagtcgacagtaaaatacctagtccacaaagtgatatctaatgatagcttaaagtcaaaaaaaagtgctattaaaaatatcattgagggggctgttatttttgaaaaatgcatcactggatgtaatggagtatcatatgactttattgatgatgatgagagttttaggcggttattagttgaagccaaaagtaaaagtttaaaatttaaaacatggaagaataatcttgtttttttatctcatttacataacgcagaagtaataaccagagagataaagaactacgaagaactagcattatatttatctgtgagtggtgcatcagtctcacaagcagtatgcattccagaatctattgcgtctaaatattatggtgaggcactgagcgttattgaaacttattatccttatagaaatgaaatatcttcatgctatgatgattatgtgtctgagtatttagaatcatcaaaacgctataagtctaatatttctgcaagaagatacgcacttaagaatgttaaacagctaccaaaaaacattgatattcaatttgactatagcggctcatggttatcctggctccgtggagcctgttataccgtgattgcagcatttactggctgtcgggatggtgagataaagtcttttgatattgattcctatcaagagaagaaatatgcaggtatgactgttcctgttttgcatggtcttgataccaaacctaatgcaggaggggtagcacgacacacctcatgggtgacgataccgagtgttaaaaaagctatcttactgctttgggatgcatttagctttgcgcgtgaaaagtggcgagaaaaagcggattcaatagtacatcctgatgaaagaaatgcttttcttgaaaagatagatagcttatttgttacgcttccctatatgcgaggacatcggcctgaggctggaaaacaatcattagctcattctcttaacaccttcgttaaatctattggatatcgtgctacaaaggatgatgttcaagagttcgacttattaaatccctcaagaaaaggtgagcttaaaattggacaaatgttgaaggttcatccccatgcatttcgtcggacttttgctgtttatctggttcgtaataagttggcctctctgctagatattaagtatcagtttaagcatatgaatatagccatgacatcctggtatgccaatcaggccaatatcgcttcttatgttgatatgatgattgatcaaaatctccaggatgaaattgcgggtgaaaaccagaactatatgacagatgttttttaccatatttataatgaagctgaaacattagctggtcatgaagggaaaagaattaaaaaccttagggctgagggtgacacgcgtatctacttaaatcgcgaagaaattcgtaagcaagttcaggatggtcggctttcgatagttgaacaccctggaggatactgcaccaacccagattgtgaccgaatttgtgatatgacaacttgccagtataaaattgtcacaaaagacaaggcaaaaacactcgttaatatcagagaaaaattaattataaaatataatgatattgaatctcttgggctggatatgccgaatgtcacctcgaaattattttacgaaatcagagcaattgaacaggttttatcagagcatcatcttgagtatgttgcttttaataaaaaggatacctattga

SEQ ID NO: 292388 - DNA, 1785 bp, Morganella morganii
atggcatttttaaaagagaataaacgcaaaacagtaacgacatcgaacattaatactgacacagtaattaatattagcttatgcgacaaatttataaaagatcaagatcgctctgcaaattttgagcgtttactctacgaaaattgccctgctattcctattactgacaactatttaaatattaaaattgataaacctggttttgtttatgctaatcgacaatcacttgtagtacgtatttgtaatgcaatacacagtttagatgcaaccgatcggactaaagtaaatgtttttaatgaaactatacgtttcttaaaaatggcagatgaacaaaaaatcaagaatgctttctgcattgacacgatatcaatgtatataaaaaatcttgttagctcatataataaaggaagtaaagggaaaacattatccggtcgtcaaaattccattaaagctttattgaaagctatggactatgcactatataaaaaatgtgaaagcatgtttatttcttttccggcagatacgcagagtatttctccttatactgatgatgaagttaaagagcttttttctgcattgcaagctatatatatttgttatgctgcgcatctcgaaaatggtactaagcctaaagcttttcctctatatgaactaaaagatctagcaggtaatcataaatataaaaataagacatcgacagagagaacagtctcatataaaaatagtgatactgtatggttatctgacttagttagggtggcctattttatgacatgtttctatacaggtgcaaatgcatcatcgctattaaagttaagactgtcggactttagcgaagatctatttaaaggtcttaatagaaaaacgtataaattaagcacaaaaaaaggaagacagtcaggtagaaccaatggaattgatgtgggttttacgaaggaagcaagagttttttttgagagctggattagcgttagcaaaaaaataaataataataaagatggtttcttgtatcctaatccctcagttaataatagatcatatatgacggatagcagtatgagtatcttgaataaaacgtttgttgatcttggtttacctgcattgagtagtcaacgatttagaaagacaaaagcttcattaattatgagagctacagagagtgttttctttgtttctcaggggctgaataattccgttgaaacagcagcgaaacattatgcagatggtaaccctgttaccactgagttctcactggcttccgcactgtatatccgagagcagactgccttgggaaaaccgttagataaggccatcactgagagtgcattcctgtaccacgacccacttaaagagagcgaagccggtaaagaatttaaaaaactgaccaatggcttaagatgcggtggagcatttaaagataaggcgataaaagtaaaagaggtactggttaaaaatggcttggctgaacacaatgatgcggtggcttgtcataaatttcttgagtgttttggatgcaagcatcacgctattgtcgcagaggttgatgatatatggcttttactctcattcaacgatgtgattctggagtctgtaacaaggccagcgattaactcccgcccgtcaaacttactgaacaaagtgaataatactattcaggtcattatagagcgaatgaaaatggagcacactgcggtatacaacgaagcctatgataaatacttggatggaatgcatcctctttggcaggatacgaatgacctggaattaatactgggtatttactga

SEQ ID NO: 292389 - DNA, 1332 bp, Morganella morganii
atggggatcgtgctttgggaacttcctgactttgtacttgatcaggaaatcagaagggaaattgatactggcaccggcgaaatatcgatacgctttgaaggtactggtcagcatttaggcaagctcccattattatttatggaagatggcggcagtatcagagtcgccaataattggctgattcatttaaaagctaatttgcgtaaaaaagaggttaatacccaggctcaagctttactgcattactttacctttcttaatgagattggcatgtcttgggatgatatgccaatctctatcaggctacgtcccacctatgcctttcgtaagcatttgcgagagatgttcaaacagggtgaattggcgcgcagtaccgctaacagttatatgggatcggtgattaatttttataaattctatctggctcgcgagcacttttttgcctatcctccctttaaatatgaagtagtacggttacatagaaattcatcccatgaatatatgagaaatcattttatccatgtcgataccacggatttaagattaaaactgcccagtgatacccgacactttggattatcacgaaaacttgttccattgagcaataacgaatggcaagtcgtcgagtctgtatataaaattcgtggtataggcatttcaaccagtgcaggtgagggtaatgaggttccactatccgaggaatgtaagttagctattgatcttagccgatactctggtcttagaagaactgaaataatatcgttaagagcaaagaaaatttataaaccagatactgaacagctcaagaaaaaatatcttatcaatacggagggattactgcttgatccccgacaaggtgttgaaaccaagaacggaacaatacgtactgctgagatccacactgaattaatgcagaccctgtatgattatattaattcatccagatatattaagcgtagaaagagatatgaagagctttatccggaaagcaaagataacccgccattattgttaaaccaaaatggtaaaccctatgcttccaaaacactggatgcacgctggggtgaaataagaaatgcggtcagaaaagagttacccaactttagtcataaatttcataacttacgttcaacctatgcagtggaaaggcttaaggaattactggatgctgggctaaaagagggaaaggcgcttgattacctgcaatcggtgatgggacataaaagtagagcgaccttactgggttacctaaaattatgcgagggagaaacaatgacggctaatgaagtgcatgagaaagcattaaatattattctcaagagtgataaatag

SEQ ID NO: 292390 - DNA, 771 bp, Morganella morganii
gtgaaaagaatatcccatgctccggaatatcagtcattacatgccggaaattgtactcagaatcaacctgttttcagccatctgaaagacaacctcgcttccgttattaatagcgtcaaaacattctcaaccggatgtcatacacagaaagaccataatatccgcaaagtgtgtgaacgattaattgcgctgacctgcatgacccccgaatgttatctgacccctgaaataaaagcgtgcgctgcggaaatcggctttgtattaccgaatcagatcgagcccgtttcagcagagaacgggcaggcaacggcgtcaatcggtaaattatctgcactatccacctcatcgctctcagcacaggctgcatataatatgctcagacaacaacaggataaatatctgtcagccggatacgaattctcacaggagagtgcggataccatacagatggtgcttgcgatggcagaacagggtttttgtctggccagagatcactcttcccgttacggggacaagtatattgttaccacaaaatccgcagaaaatactccggataacgctctcagcattacaccggaacaacgtcagatacttcacagcgcagcataccggatgaaccttgcactgaccctccaattgaaggttgtgaattataacaatgaaagcatcataagtaataccgggggcgctacattgagcgaagagaatttatcaaagctttcgcgtcagcttttctatcctgattttaataatatatctatcgcaacataa

SEQ ID NO: 292391 - DNA, 747 bp, Morganella morganii
atgttcagattaaataacagagaagctaatgccgtctggtatgacatatcgaatacaagagaggcgccagtaaagccggatgttccttccgtattaagtatgcaactgacagagttgaaaaacagtgcggctgaattttttactgcggctaaatgcagcatcagtaatgcagtgaacaaatttggtgactgggttaaacgcgtgtttatctgcacagacttccgttcatctgacgccggtaaacctgcggatagtttgttgccggaagaaacaatgattcagcaacagcaattagagaatttgcgtgcattaacacagcaaccattaatagatatgtataataaaaatctgataaatcagactgacacgatgagtgaaaaaattgaagataaaacacaaatcagccaaagtgaactgattgatatatcaacgaatagcaaacttggattgcgaaatattacgacagcactgcaaggcataatgcagtttaaaggactggatcagttatcaggtaacgcaaaggcgatttatgaaactgaacttaaatttgacggacttgccaaaggtgtgcaattcagtcagttggggtcggttaataccagcagtcctgtcatgggtgctgtcaataataaggtgttcactgaacagtttaaatctcagatggccgatattttcagtcggatccgtgaagatattgtcccgctgctggcattacaggcgtccggttctgccggtaatatctgctga

SEQ ID NO: 292392 - DNA, 303 bp, Morganella morganii
atgaatgttatagaaattcctgtttccaacaaaaaccagcaatttgatattcagcttggcgggggacgttaccgcattcgcttggtataccgtcagttttgcgggtgggttgcggatatgatggatcaggccggtgccgatatttttacaggggtcccgctggtgagcggaacggatatcctggagccttaccggtatatggggtttaacggttcactgatctttgtctgtgatgaaacagccggggaattatccctcagcgaatttggccggcaaaacaggctctattttcgtgcgggctga

SEQ ID NO: 292393 - DNA, 213 bp, Morganella morganii
atggcaacactgcccaatagaattgttcacagtgagattaccggcaaattccgcttcgaaataagtcgctggagcttaaatccggttttaattgtcgaggtaaagcagagaatcaagagatttgctccactcaatgatgaaatagaacgctgtgtgtgggaaaaggctacttatcagcaagctatcgaaattcaacatatacataatacctaa

SEQ ID NO: 292394 - DNA, 1323 bp, Morganella morganii
atgaagtttaagttattatcagccgttattctgacagcgctttctgccacggcattctctgctactgaacacacgttttctgatggtttaaaaataaaactgaatgaaaaaagtatcggttctgacccgcacatttcttctgatctgcgcccttatggcggtaaaacaattctggcgattgctaatccggataaaaataaaatctctcataactactttgatgaatttaatgtcggaaaagagggtatgtatattggtaacaaaaaaggtgctgacactattattactgaagttatcagtaattcatcatctgtgttgaaaggtagcatagaggtaatagttaacccggctaatcttatcattgccaacccgaatggtattacaacacgctcgggatttacaacggaaaatataaaaaacctttctttagcaacagcaaaaatcactgatacatcagataaagataatatcaagatgattaacagcaaggacggtaaattacgtattatacgtactaatatcacccctgatgccaaacttgataagttatcattaatctctaataaaatttccatcataaatagcaaattaaatgctaacgaattaaatttcaatttattaacctcatcaaaaagcaaaaaaacacgttcagatattgatgtctattcggatgcgcatggccctgccggtgtccataaaacgaagaaaaccaacctcaatcgaaaaccatcagaattatatatttctgctgactccgaagtaacagcaaacaatgttaacattaatcttcttgaatctaaattcaataacaaaggttcaatccatggccgggaaaatgtgcgtatcacctcaaaaaaacaaaatgaaggagataatactattgtaaataatggtaatattaccaatatgaataataccgggtctatcaaaggaaaaaatatcaaaatagttgcccatgacagaagccatatggaaaacaatggtgaaattatcgccatgaaaaatatggatattaatttggacgaaagcacattcgttaataataaaaacatccataactatggacgctatggcaatcaggaaacaacaatcactttttatcatagcacattcagaaacaatggtgagatgaaaaatgataatttattaattacgaatatcgcaagcggaaaatacatcaacaatagtttattagatttcaaatactatgatttaactgattacagtgaacaccatccagacgaccatccgatgcgtccgttctcatttagtaacagcgaaaaatcaaataatcctgaccatgataccagtgacattctctga

SEQ ID NO: 292395 - DNA, 837 bp, Morganella morganii
atgaaaaaaaatggattgttactttcaatattagttttatcaccgttatcattttctctggcaaatacaacagatatcagtatcgtgaataatacggcaacactcagtcatggtgaaaataaaaaaattgttactattttggaaaaagataaatcaagtttatcacatattaaatatgataagttcaatatcggcagcgaaggtgtgattttcaataatcatattggcgctgataccataattaatgaagtcatttctcaatccgtatctgaactgaacggcgaaatacgcatcaaaggaaaaaaggcaaaatatactcttattaatcctaacggaattttttgtacggaggcatgcagcttcagaaatgccatccttgtaaaaccggttgtcggaaaagtaatgcttgtcgatggcagcgttatcgggcgttccccaggagaggatgccaaactgatcatcaaaaataccacaaaaaaaattgctgaccgtttaattcttgacagccagcatatcgaaatcattaatagtaacgtgaaagcagattaccttcaggtcactaatgtatttaaccatatgaatggcagtcctctaagaaacagcataacccttgataagcaatcatcgataaaagccaaaaatatcaaacttaatattatcgataccgatatttctaattacggcattatccggggtaatgtaagcggaactcttcttgtttcagatatcgttaatgaggggaaaatatccggaaataatatttcttttaccctgcgtgatgctgttaatttatccggtaaaggtaaaatcaaatttacaaacggtcagaatttttaa

SEQ ID NO: 292396 - DNA, 924 bp, Morganella morganii
atgaacaaaacaatattatcatttgttttcatattatttacatgtgaaacaaccgcacaatcagaacatacccttcagtcaggtcgtgagataaaaatagagaatcaggatgctgaaatcaagcaagggaatataataccagaactcatattgaaaaataaagaccatgaccacaagtcccatataacatttagcaaatttaatgttgatgaagatggcttggatattaacaactcaataaatgcaaaacatattattacagaagttatctcagacaatgaatcctggattaacggaaatataaacattactcacaatcccgcgagtttgttaatcatcaatcccaatggcattattattggtaaccaattcaaaataaccaatacgataaaaaataatattgtgacaggcagaatgataactgaacccgatgactgggaagatatcactgctgagcagtttgagagcagtggcggaaatctgattatttatggtgcagacgcccatgataactttaacaatacgactttaatcagccggaacattgagatccgtaaaagtaagctatattcagataaccttcacattgatatcatgttaaatacagacggcagatacccgtattctccaaaaatttctattgatagtgactctgaaattaatgccggtctgttcagtggtaacttaaccggagtaagattatctaacgcaggaaaaataacagggaatattgatctcagaacgacggattcatctatagataattcgggagaaatgacaggaaaatccggaaaaatcacataccggggtaatttttattttaacgggaaagataatacaaaatacactaacagtgatgttttccggtcagttgatgaccacagttttttcgatacaggacttaaaacagtcactattgaataa

SEQ ID NO: 292397 - DNA, 240 bp, Morganella morganii
atggcaaacgtcggtgaaatcgtatatcaggtgcagatggatgttgctcagttgctaacatcacagcgtcaactggatcagcgactgagaaatatggagggcggatttaaccgcacaacgaccgccgtcaatggcactgagcgctcaatggcctcgctgtcgcgggttgccatctctgactgcttacttgtctgtatcagccgttaccagctacgcggaagcttggacggtgctgaataa

SEQ ID NO: 292398 - DNA, 651 bp, Morganella morganii
atgtctttattttctttctggcagcctgaaatgctggctgaacgctatcagcaccgggatgatgtcatggtgttacaggaacttcgcggattatacggcgacgatttttattttgatttcccgccgggcccgtatttcggtccgctgaaaaccgcaaaagtggtattgtgttatgccaatccaggcgcagataaaccctcaaaggacaccatttctcaacatcataaccgccacttattgttccggcagttacagggcgatcagtcttatccgcataaacttcccggctgggaccgctggttcacgtcacgtgccaacagtttattcggcggtgacattgatacagccacgaaaaatacagcggtgttaaatcttcttccgtatgcctcggaagatatgagtaaggcggagaaaatagctaactgtttgccctcagcatgggctgctcagcgctatctgcgggaaaccttaatcccgaaagcacaacgcggtgagattttactgatgatgtgccggtcggcgcatttatggggattaatgtcatcgcggggaagtgacagtattctgatcaaccgggtccgcagcgggttttcggcagagataaaatcacaggcacaaaaatggattgcggaacatattcagcccggctga

SEQ ID NO: 292399 - DNA, 426 bp, Morganella morganii
atgtccttagttataggtaaaggttgctttccgtgtattattgatacttataaagtcttagatgtatttaataatactgctccccctgccctgagtatctgggagaaaattaaggagtttttctgccgtactcatcagacaaaggctatgtcataccttcataaactctgtcatcctgctcctcccctgaccaaaattgaaacaaaggcactcttcgaaaaattacgtgagttggcttatcccggctttgaggattatttttcaattgatgaagctgatgacgttaatgaagataataaaattcttaatttacgcatcacgagtactgaaggttacaacttgctgacaatacgtattaaaaataactattttattgagtggaaagacaatattcatcatctttatccactccgtcagtcagactga

SEQ ID NO: 292400 - DNA, 264 bp, Morganella morganii
ttgttcttcagcgagaaaataaagggatgtattgaaacacacaccttcgtctgtgtgaataatacacgatgttataatgccggtgatcgtctcaccggcattattgtcgggcagggtggcaatggcaccgaacgggatgctattggtgttctgttcagcgtcacggcgttacccattgagcggttattgaattcctgtcggacagtaataaaaaataaaattgtatttgtgactgaatattcattagttattttcaatgaataa

SEQ ID NO: 292401 - DNA, 2547 bp, Morganella morganii
atgaaaatactcacaaactcacagaaagaaatcataaataaactattaaagattgagcataataattatgcatctatgcttaaattgataaataatggacctcaaatcattgatcgaaaattattaattcatgcaatttcgttaattgataaattatcaagatatgaacaagagtttccacgtagagtttcaatcctagctattgcgttatgttgggaatattcggatccaaattacaaagagtctttaagagaaatattcatcgttgcattaacacgcatgggaattgctccttctactatgctaatagatgaggattataaaattgatgggcattataaacctttctcaagctatcttaatgaactttcagttttagtaaatcaacttaaatatgaggtcagcatcaactctcgaacttttctgctgacacaatttcaaaaacaggtatgggactcaatagatcataataaaattatatgtatttcagcaccaacatctgcgggtaaatcatttgttatatatttaaaaataattaaaaaattgctcgaaggcaatactagaattgtatatgttgttccaacaattagtctagtaaatcaagtaactaaagacctaataaagttgctgaaagaattttcaataatagatgttgatgtatttactggaatacaaaaggatatctcttcaagatttatttacgtgcttactcaagaaagggcaatttctggatttggagaaaacagtcactttacagaactaaatttattggttgttgacgaagttcaaaatattgagcgagttgctaatgatagtgaccagagatcaaaaatactatatgattttttaaaagaaataaaaaaccaaacagttacagataatattattctaagtggaccaaggctgaaaaatattggaaatctagggtttgatatatttgatgaaatatcatacgaagctgaaactaagcttcctcctgttgtaaatatcacctactcaatttcagaatcaggaaaaagatactattttaatcagtatagtgatatttatgaaaatcccactactatagaaatatcaaatccatcagaaattaaaggtatcggtggtactcaatacaacaataatttccacaattatctattatcaatcttgaataaaattgattcaaaaaagagtaatttaatattttcacctaccgcacggcaagctagaaagacagcaatatttctttcagaaaataaaccaaacatcgacagtgatcagatagagagcttatcagaatatattgagtactttgtacacccgcaatatgatcttgctcaaatagttaaatgtggtgttgcctatcatactggaaaactgcctctacacatacggtctgctatagaggatgctttttcatcaaacatcataaacaatattgtgtgcacaacaactttaatgcaaggcgtaaatttcccagcgtcaaacattataattagaaatccgtatttattcgtaaaacgacgaaatcacgcagaaaatgttaagctatctaactacgaattctcaaaccttagaggaagagcaggccgacttttgaaagaatttattggcagaacaatagtacttgatgaatcaacttttgaagttgaacctactcaagattctctattcgaacatgtagaaaaagaaattaatactggttatggtgattattataaaaaatataaaaatgaaatagaggaaaaaatatcaaacgacactatagcagatgatggaaaagagaagcacttactgacgtatattcgccaaacaatctttcgtcatcgtgaggctagtatcacaaaactaattgatgtaggtattgatatagatgaaaatcaggtaagacatacaatccaatcattagatcaacttgaagtaccattaagtgtaatatggaacaaccgatattgggatccatttgatctagagttgatttttcaacacaaaaaaaataaagagatagaacctatccctaataatatttgggatcaaaatttacaaagttctttgataagagcaatgaccagcttttcagaaaaactcccttattattttaaaaaatatattggtaatacagatgaggataaggaacgtctgaaaaaatttatttggagtatatgtacatacgcaacagattggggtcgcgaaaaactattacgggagatcttagctgatagggatttttctggtaatgctagtgacggtattgacaatgcagtacaaacgatcacttcaaaagtatgctttggcttacctatgctacttaagccattagcagacatgtcacctattgagaactcagttttaggtatcattgaaacaggagcattcaataaaatcacaaatttccttatttcaaagggagtgccaagagatactgcaatatttttaaaaaacacatacctccaagagttcgatatcgatgagcctaatcttcatgacgtacaaatttatttaggcaagataaaatccaatttatctccttggatagaaagtcaaattgagagcgtatgcatttaa

SEQ ID NO: 292402 - DNA, 891 bp, Morganella morganii
atggatgaaaaaaaaatacaaagcttactatcaaatgttgactcattaataaaacatacctaccatttccgattagatgtatcaaaactaaaaggaagtagccgtcaaggtatctcgataaactttactgatgttcaagaacgcaggaatgactttgtaagagaattaaagaacacggtatgtagctgggtttacggaaaagaaaagtatcgtaagctattccaaaatgaactagaaaaaagagggttcgatatacagaatgccacttcacatattgactttttagctaaaaataaatttagaagaggtattcctcaaggtcagtttggtgagctacttttatttaattttatacaatacctattcaaagctcctgccttgcttagaaaaatgccacttactacaagtaacagacatgaaagattcggcgctgatgcaattcactataaaaaagatggggaaagaaatgtaatatatattggtgaatccaaagcatataaatcaaaatacaaattcaatgcagccttagaagactctttaaatagtataataggaacttttaataaccttcaagacgaattacttctgtatacctatgatgattttatagatcccacactacaaaatattgctgaaaagctaaaagaaggtgagcttgaacaaacaagatatgagctagtatgcttaatttcatataatgaaaccaataaatattgtggtaagtgtgaagatgatattaaagaagacataaaaaagattgtaataaataggcttgagtcaaccaatgatagcttaactaaaaatattgatgaagtcttgctagaaagaattcattacattatttttccattctgggagtttgataaactgctcgaggaatttgactcatga

SEQ ID NO: 292403 - DNA, 474 bp, Morganella morganii
atgtcacatgaaaataccccgttaaatgcagtattagaaattgatttggtagataaaggagaacttggtcatatttacccgcacaccgttgtctatcatgtaggtcgatattcctatctgctggctgaagatgagcgcggtgattacctgataaaacctattttcagtaatggtacgttaggccccgatatcgtcaataaaaaattccgtcactactacgatgttattcaggccgcttatgatgacctcactgccacaacctatatttgtgcagtcagtttagctggtaaaagtatggaaatatttacaaccacaaatggtggtttgcaaagtaaagttcgctttaattatcaaattgatgaccgtaaaacatttaacttcttctttattgaaggaaatctttatttctacgaaagtggtgaagacgcaaacggtaaatatactgtaaaatccattcgcgtgactgttgaataa

SEQ ID NO: 292404 - DNA, 798 bp, Morganella morganii
ttgtcaaataatcgtgatgatttctcgctagcaactaaaagaactcttgccgatcgtgttggttggatttgctcttttccaaactgtgggcaaagtacactaggccctgcttcacaatcggaagaggataaaataaacaatggcatagcagctcatatctgtgctgcttcgcctggagggccaagatatgatacatctatgacctctgaaatgcgtaaatctatcagtaatggcatctggatgtgccgtaatcatgggaatttagttgatgcaaatcatagccaatatactgtcgacatgttgattaaatggaaaaatgatgcagaaaaagccgcttacaataggttgtctcagcctgcacagcatttaacagtcgggtattcccctcgtgacctaaatatacttaaaatttattgcaatctatttaattacaattaccttcagcaactaaaaaatgaaccatttagagcgaaagtacctacaaatattatcgatcctttatatacctgcatgagtttcataggcaaccctagttaccagttcaatgctgttcaattagaaagtttaaggcaaaaattgaatggcaaggttcttgattttaataggcactttggtgcagaatctggaggtaatatatcttattatgactatattgatttaaattcaattaggcagagaaatccagataatgttgactactatgtgaaatatattgagagcacgcaacaattcgcatatgaaatatccgagttggcattagaattcttaaacattcaagctgagactggaaatatataa

SEQ ID NO: 292405 - DNA, 2667 bp, Morganella morganii
atgaatgttaaaaaatacgctgtggaaacagaaaaaaaagcattgaatcattcaggattgaaatcacgtaaaaacatcacttacttcaataacgtgacctttcccagtgacactcagggggaacttgaaggaactgtctactatgtacagaatagtattatcccggcgggagaacatatttatggtgatattcagccggatattatatctaacagaaaaacaatgatgatgtttaagccacatactgattcgttaagttcatcacccatttttttcactatttatcataataatgaagttttatttcatgaagaaatgctgccgcctgatcacttaacaaagatatgtacaagagtatatacgaaaatagatgcagatttttcattaccttcacattttgatttcatattagatgatagtgaagaactacaaaattctaaagacgccatttattttaacaactttattaaagaatatgattccatcaacgtagttacttatgatggtgggcattctctctcttttgagcttttttataataccagctatacaggtaaaaaagttttttttgaatgcacatcaacatatggaattactatttcatttaatgcatcaaaaagaaatcttgagaagggagaatctatatttcttgtcaataataaagggacatggtacgaggtaaacgatgacaatagtagcgggaaattttcatctgaaattaaatatatgggaaacacatggtctgtgattgtaccttatcatgtgatgtacccggggataaaatttaaattttcgagagaggaaaaatctggttttatttataacccggttattaaagcaccgaatgaattgattttaaacacaatagcaattggtatgctaacccctcatcgtgaaatttttaaatttcaggaaaaccctgagtatcatcgccaatattttcagcaaattcctgtatcacgattaaccgtcaatacatatgaccccattgatttagacgaagtaatgttacctgatggccggctgcttacgggacatgcccccggaaatggcggttggcatgatggaattatgagggaacaaattgccaagtctcttattgcatccggaattaataatgctaattatggtattaatgtaacaggcagagatcttagccctgcaggaaaggtatctcaatttactgcacatacgactattggaatgtatgaaaacggtttaatagtccatggcggatctggcggaagtggcatggtgacgttagatgatacgatacgaaatgaatttagccatgaagtcggacataactttggcttagggcactatcctggtggatttgatggttcagtaaatcaaataccaactcaccgaaactcaacatggggatgggattgtgataaaaatttctttctgcctaatttcagacaaaaaattacccatcaacctacttatttagaatatgaaggcgttggggagtacgctcttccctttgaagggcattcactgggtaaagatgctatggctggtggtgcacctatgtatgaaaaatataatgcttttactttacatacgccatattcattatattacattcaaaaaaacctggaaagtaaagcagtatttaatcctgattcaaaaaccggatttagtatttgggacagcaaaaaaaataaaatggtggattataaccacatcatcgaaaattttcatttcaaatatattaaaattaagaacgaaataaatatatctgctgataacataagtaaataccttgatgagtatgattatatttacatttctctttataatggacggtgggcaaaaaatatatatttcccaatgtctgactctgaaaacaatggtaaaataattaaaataaaaacatcagcatcatatcgtgtttatttacatatgaatggaagcagttttacagcaatgaaaaatgtagatttgtattttttatcccatgatggctcttggttggaaatgaaatatccggatttagaacaatataaagacgttgatgtttctaatgacacatcaattaccagtacggaaataaatgattatttcaacatgtctccttatttatttatacattgtcaaaactaccgctggacacccgacattcattttccgcctgctaattcgaacaataaaggtaatgtaataaaaattcatgtagaatccggatatgatgtcagaattcacatgaatggaataagtttcttagctgaaaaacacattgatttacactatatttctgatggttatacttggtttttcgatagtatgctatatattgagcgcattccttttgagcaaggtattaaagtcattacaatacttgggtactatgattctaaaaatcaattgccgagttatatctacccagccctaaacgctgcttttggtatggtatataaatcagatgaaattaaagataacagttgctatctggaagtcgaatatgaaaatggaacaaaaagcactcatatattagctcatttcagattgacagataatgaaatgaaccagtttcatgttaatgttagccgggaacgattaccgagaatagctcgcattattattctgggcgtagttgcagcggaaaaatcaataaatcttggcagtgacaatctaacctatactattaatggttattaa

SEQ ID NO: 292406 - DNA, 144 bp, Morganella morganii
atgaaaacggatttcactgttgcagaaacagaacagttttgtgatacccggattatcctgttttcagaacagtgtttatcgatcacggtggtcgtcagtcggacagcggaccggaaggggttaattctgttattcagcaactga

SEQ ID NO: 292407 - DNA, 609 bp, Morganella morganii
atgttatatattgatgataacggattagtaaaatcaaaccgcattaccattaaacgattcagtaaaatcgagcgcgacccgatggataaagtgaacggtattattgttcaccagactggtacgcctgctgaaacacatgtctttaacagttacagtcatgcaggcagtaatggtgcccacttcttaattgataaagaaggcatgatttatcagacagcttcgctgtttaaaacaacgtggcatgtgggacaaatgagatcccgctgcctgattacaaagaaatgtgagccttcagagttaaagaagatggctgacatggaaaataaagcgcttacaaaacaaatttcagatctggaaagagctaaaccatttccggaacgttatccgggtaatatagatagtattggtatcgagatagtgggtcaggcatatcgcctcaaaggaaaaaatgtggctgaatatgaaaatatcaactcaaaacagaatacttctctgaaatggcttgtatctgaactaattgacaccctgaatattcctgtctctgagatatatcggcatcctgatgtaggaagaaaaaatgaaactgaagcgagtacagcatcatggtaa

SEQ ID NO: 292408 - DNA, 435 bp, Morganella morganii
atggtaaaaaaaagatattttctgttatttataatagcgttcattcctaacataatgaatgccatagctattaaaaatatagcaataaaagataccggtgttacggtcacagagaaaccaagcgaaggggaagtaaatgcctgcaaacggtttgtgccaaacaaaaatcagcttctgaacttttttaaatcggctgaagaggcagaatatgataaatggatgcatgaatactattcgtcttgtatatcaacgggaagtgttgaatttgagaatggtacatcaggtgattgggttatccagtcaagtggtattgcatccgtcattatgaatgacggcagttccgcttattttttctataaaaataatgaatgggatgatccgaatgcctgtacctatggtttaggcgatgagccgaatcctgatcccggatgttaa

SEQ ID NO: 292409 - DNA, 417 bp, Morganella morganii
atgccagcctgggggaaagcaatagcatccgtattcttttttatcttatccgctgctgtaggtatgctggtttttagttatattatttctttgtataatatgacagatattattgtattttcggggccgattgtaatagtggcaataacaacaccgcttttattatacgttatgttagtaagtacagttgagttttctcttgggaaaaaatcaattcttttcatttttttgatgaaatataataaattaattatgagatacttattatatttgggtatagccgggttatttatcagcttccctgtttcttttgctgtaaatatctatcttctcgataagggatatgaaacatgcgggaagatttcgtggatgtcacccaccatctatgtaaaagatttatcactttgtgacaggtaa

SEQ ID NO: 292410 - DNA, 654 bp, Morganella morganii
atgcgcattatcaccagggttaatgtatgtattacagccgtcaagaatcaggctgtctttagccttgatcttaatttgatctgcagtaatcaccaggcatcccacacaaccgatagccagttcaccaccggctgtcagagagaatgcaccaccgacgcccatctgcattgcaccgccgaccgcaaccgaatggtaaccaccgacgttagtggaataagcaccacccacgttaatagcatatgcaccgcccacgttatacgagctggctgccgcgatattcatggaataggcagcaccatatatcccgctgaaggcaccgccgataacaacagaatccgacaaaccaacaatacgggaggccgtaccgacgatatcctgggagaagttagcacccacaatctggctgctgttagccccgaccatactgctcttgttcaccccgaccgtttcactgcggttaacaccgatagtagagtccgagctcacaccgatagtctgggaatgattgaccccgataagctgagtttcgttcagtttggtcacacgggacatatttcgttccgcctgctcccaatactcttccagccccggtttgtcatcaaaacggataccgttgtagttggttttaccgccgccgatggtacggctgattaa

SEQ ID NO: 292411 - DNA, 198 bp, Morganella morganii
atgtctgacaaaaagtacaaatgtcacgattgcgggaaggaaactaaaattcttccaacaacagacatgtatggcaatgactgtttttttgtttcatgcagtcactgcttttatgaggctggttcatttcgtgacgcgagtgaagccgaagagtttatcagggataaattggcagggatgctgataacagaggaatga

SEQ ID NO: 292412 - DNA, 132 bp, Morganella morganii
atgagaaaatatgacctcctgttagccgatcccccctggtcttacagcaataaatcctccaacggcgcagcagataaccactacaacaccaccgatttttattccctcacccgcttatccatcgaaaaatag

SEQ ID NO: 292413 - DNA, 150 bp, Morganella morganii
atgtcttgtttctggatacaggataacaaccaggtctggacacatgaaagtctgtacaatttttcatttgagctttatcgaaagaaaccggaaaatcctaatcagcactatttgagacaaggtgaagtggacaatattacccaagcataa

SEQ ID NO: 292414 - DNA, 1029 bp, Morganella morganii
atgccaatagaacgattgcatgttaaaaacattaaacaattttcagacgttaatgttaaatttaatgagcgatttaactttattactggccctaatggttgcggaaaaacctcgattctagctgccattgcacattgtatttcctggaatggagaatattccagacactcagatgacagtgagtactggatagatgtaaatgaaaataatgaaaaatttagattcggtctgggacccggatttttacgaactcaaaagtacagaaatgacaggataggtcgatatgttcaaccgttaattgaagatggacgtagctcattgacagttatggatgccaaaaatacatttacactaccgcccttagttatcggtgcgcagagaaaaataaactataaaagtatcaatggagttaccagagagcaaaataaccaagaaagtaaggcaacatattgtgattatgcactaaattttttgtataacaactcttcacgtgatgtaaaacaatggctaattaacagatactttgtaatagataaactctgggcaaaagaagaaaaagaaaattgggaacatttgattaaatcattaccagctatcgggccatttaacagtatgttccaatatatcgaaactggtcgtgatctcgaacctgtattctcaatttatgaaaaacaatgctttttagaagaactttcatctggattccaagctattttatatatcataattgctatatttgaatggatagaagcctgcttgccagaaggaaaaagggatgtagcaaccgcacatggaactgttcttattgatgagttagacaaccatcttcatcctgaatggcaactgacagtaagacaaggaatggagaggatattccctaatctacaattcattgtgacgactcattcaccacatcttttagcttcggcgaaaaaaatgaaattattatgctcccaccatcatatccaaataaaagatatgaattccaaccttcgaaaaacgcgtactctggctggagtacagatttaa

SEQ ID NO: 292415 - DNA, 192 bp, Morganella morganii
atgggtgtaaaaagtcttgataataaagattacgaaaaattagtgaaagcttgctatgatgatattaataataatctggcttcactcaagaaaaattatgttcgtcttaaatttatttgtcatccgggagatgaaatcttaattttactaaaagctcgcattgcaggtatggaggcgaaaactcatgattaa

SEQ ID NO: 292416 - DNA, 759 bp, Morganella morganii
atgattaaattgacccgaccaccagaaccacagattttatgtgataattgtgaatcatggacacgggatattatgagattggtaggtaaatatggtgagtataaaaaaataccactttctgaaaaggagtctgtattacgattttaccgccacgatgatataaagaaggctttgaaagaaagttcttttcaaaagtgcgccttctgtgaaggaatacctgctgaaactggctttgctgaagttgaacattttcatccaaaatctctatataccgataaaacctttgaatggacgaatctcctctatagttgtaaagcatgtaacaacaagaagcttaaccatgacacacagcgacaaccaataataaatccttacgactttgaccctagtaattgctttacctatacagacataatgattcaacctaaagctggactcaatcacgatatcgctgaaaatactatcgcggtatgtggattatcagataaaagacttttttctgcaagagctgctattttggtacactttcgcgcttttgaggctgacattcgtgaagctctggatgagtttaatcaggctcgtactttccaaaacaaacaaaaacgagcaggaaagataaacgacgctttatgcacaattgaagaattgacgcagccaagcgcgaaactttcaaatttttgtacctatctgctagccaattctaatatatatctggaagctaagcataggatacaggaatacactagcgaaaatatgtga

SEQ ID NO: 292417 - DNA, 324 bp, Morganella morganii
atgcgttcaatgaacaggttactgcttgaagttggttataagcgtagtgaaatacgtcagttcagaaaattatgtgcttctgcaaatgtcgactttgataaaaaaataacaaaaacagcaaaaaaatcttttatacatagctctttgtttatttttgttttacttatgtccatacctttatcatttatatcaaaaccaacaaatgatatattttttatgatattaccttacatattatttgttttatttagtttgtcatttaaaacatcccgggagtacattaagttttccatattatatcttaaaataaagtctaataaatag

SEQ ID NO: 292418 - DNA, 1467 bp, Morganella morganii
gtgatatcaacccgttcccgagtcattatccatctgagcagttttctgatagtgatttacagcctgacattattattacctatgctggttgcgctgattgcgcaggagcagagttttttcgcgtttgccggtagttttctgattttctttccggccggattagtgtgctggtaccgcagtaaaaccaccggcctgcaattacagacgcgggatggctttctggtgattgcggtattctggctactgttttctattatcagcgccatgccgttctggctggatgatcatctgaatatggcctttgaggatgccttgtttgagggtgtttccggtattaccaccaccggtgcatctgtatttcacaatgtcaccgatttaccccgctcggttttatattaccgcgcccagcttaattttatcggcggtctgggggttattgtcctggcggtggcgatatttccgctgctgggtatcggggggatgcgtttatatcaatccgaaatgccgggcccgtttaaagatgagaaattaacaccccgcttagccagctcggcccgcaatttatggttcacctatttattactgggattttgctgcaccgttgcctttaaactggcgggtatgacatggtttgatgccttatgtcacggactttcaacggtatcgctcggcggtttttctacttacagtgaaagtatcggttattttaacagcgccgcgattgagttagtggcgggggctttttcattattatccgccgtcaactttaccctctattttgtggcgctggcaaaacgcagtctgaaacccttattcagtaacacggaattacggttttattttgctgtggccgcctttattatcgcgctggtcttttttgaagtgtggcgggcaaatatgtattcgtccgcagaagaatcctttgtccatgcttttttcctcaccagctccatgctgacagataacgggcttgccaccggtgattatgcgcagtggccgtctcatattattgttttcttattatttgccagttttttcggtggttgtgtcggctccacctgcggcggaataaaagcgatccggtttttaattctctccaaacagagctggcgggaagtctattccctgatccacccgaaagctcaaaccctgattaaagtcggtgatacggttgtgcagcaccggctgattaattccgtcctgagctttttcttcctttatgttatttgtacctgcttttttatctggtgccttaatctgatgggctacgatttaatgacctcgtttgccagtgtcgccgcctgtattaataatatggggctgggattcgggttaaccgcaccgggattcggggagatctccccggcagcaaaatacctgctctgttttgccatgttattaggccgtctggagatatataccctgctggtgctgttatccgtcagtttctggcgtaactggccgtag

SEQ ID NO: 292419 - DNA, 276 bp, Morganella morganii
atgaataccatagggtcagcaattattaatgccgggctggttgcagttcagccttcggtatctaccggacatagcgccagttttacgaaaagcacaccggttacacaggtctgcaattcaggggcagagtttgtccggcaggatacgattgcgcctgacgggataaaagtgagtgtgaagtcaggtgaaataaatctgctgatgctgaatacgttgtataacatcagggctgaaactaaccgcccagttttgtcacaatcactccggccacaataa

SEQ ID NO: 292420 - DNA, 510 bp, Morganella morganii
atgtattcatctgcttcaaactctatttctgtagacgctatcccggtttcacggcaggataatcattgcccggcaatttccgggaaaattgatcttctgaaggaaaaattaaatgcaatagaaccgaacaaaacaactcatgaaatcagatatttcacaaatttcattgaaaaaaatgaaaccaaaatgagggatatcacggcaatcagtgacaaattgttgactgcactaagcgtgatgaattcgataaaggataatatcgcaatgggtgaggataataaggcgaatttaatccagcttaataacctggcacgtgaaatggaggacatgttaaagccggatgaacgtaaaaatgtgggtgagcgcgtcgcagctgaagtgagcagaagtgctgaaaaggttgctaaagaagcacagagagctgccgaaagagtcactaatgaagcagaaagaagtgcagataaagtgaaaaatgaatttcagagattgagaaaaaaatggaaattgtaa

SEQ ID NO: 292421 - DNA, 252 bp, Morganella morganii
atgacaacttcagtaactactacaggttctgtcgaattattccacttcaataaaattgaaaaaaataatcaagacgatatagtaacattaagcagcaacggaagagaatcatatttaaccgcagggcgttcattaggtgatcgttttattattgtgttgaatagaacctgcttaggatctattggttttattaatgcaatgtataaaaagctggagcacagggaagctcaggctgttaatacttcttcctaa

SEQ ID NO: 292422 - DNA, 1050 bp, Morganella morganii
atgggtatttctgttggaagttcatattttactgccagtatcagtaacgatagaataaatgaaatgttcacctcgaacatgcctcctcatatgactctatgggggaaaataaaacactttttttttgccacaggagaaagagaggctttagattgtttgtttaaattatgtaatcccacgccgtatttgacgtgcagcgaaattgaagatactttcttcaggctaaaagagctgtgctcgcccgcatacaaagaaagattttgttataaccatattgatagctcatctgctaacaggttacatattaaagatgataatggacacgatttgctatatatagaaatgaatggtgaggaattcaattatagtattttaaataagttatttattttcgaaagtgatatcacaccagtgtttacacaagagcatgaaacaaacattaatgggctatccataacacacaaaaaaatcaatccgcaatcacttagtaataacattgcatggatgaaaaatgatttctattacttatcatatagaaataataattttaatttgaattttgaaattttttacgatgatacaataaaatttatcacttcagtaaacaaaggtaataacttccatttatggcgagaagaagaaaaagaaacatatatctcatcaattattaacaaagagatagatattcaatttagaaatcagccgattaacttatcaaaaaaagataaagatgatgttttcaatcacatcaaaaacaaattagatgtttgtaatttaaagttaaatagtaaatgcgcacaaagttcaataacacatactgtgctaacattaatatatagaaatgaatcgtttcacgattttttaaaaaaaacagctaatgatatgaatatcaaaaatgtcatcatcacagacatagttaatgtgctatcaaatcatatttttgaatacatgtttatggatgaaatgagcctgcctcgtgactggattcacgttatacgtaagtcagttcgtggtttattgttaccaacgatgcaaaaattgcctaagtga

SEQ ID NO: 292423 - DNA, 642 bp, Morganella morganii
atgtgcaaagtcgtttttcctgaaattcataatgtcaatttagacgttgagaagattggtaaccccataaacccgctgttatctgttaatggcagcgttaacgttcagggcagcagcgaaggaacgcccgatataaccgactttttggctggcatcaatgaaaagcttatcacgatgttgatgctgataaataaactgcgcgacgcgctgcagctcattaaccaaaagaaacaggccctgggctgggggcttgaagtcaacgctctgcagcaaaatgttaaagccattgaaagtagcttttgtgccgcggtgcgcggggcggttagcggcattattgccggcgtgatgatggccgctggcgcagctgtgggcgtctcttgcggcgaggtctggacgatagcaggtaacgctgcggagaagatgatcaacaatgctggtgccttggcttccgcaagtaaaacccgcgaagcggatcaggagaaagccattgccgggctgcagaatcagggcgcgcagtcatatgtcaaaacacaggatgactcgttggtgaagggcaatgaaatcaacaaacactggatagattttaacagcaatatggtggagcaggggggccagctgcggcacacgctttcccgctactaa

SEQ ID NO: 292424 - DNA, 204 bp, Morganella morganii
atgaatggcagtatggagttatattacaaaataaaactgacggaggccgctattgtcagtcttaactgtttctatccgaactctgtcacacataacgattcacaaccggaagaaagtctttcaatccgctttaagtccataacatgggagcacgttatggccggaaccagttcttacagtatctgggatgacaggagtttctga

SEQ ID NO: 292425 - DNA, 909 bp, Morganella morganii
atgaatagtttaatttcagaagcaagaaataattttcatcgctcattgattgaaaataacacactatgtttttcaaaattcaacaaatttggtgaaaccaaaatagcgagtaatgctgatagcggacaaaaatcaagtgtattattatctaatttattattaactgaaattgcaaaaaatttatctatagaattacctgttaatgaaaagaaaaaggatggtcaaactacaggaaatgactttgaagctgcatgtggtctttttctgaaaagcacatttccttatttacaaaatctgagacccggtaagtgggaagtattacaaatacaccagagaaatgaatctgtattaggtagatttgaacaatattcacatttatacgagctatcaactctcgcacaagaaaataaggtattacgtaattttttaggtgacggttatacaatagcaccagatgtaattatatccagaaatgcagagcctgatgattttattaataaaaatataaaagtagtggatgattcagtctgtaaaaacacgatgttaagattaaaaaaccatgaagaatcccaagtaaaaccactactgcatgccagtatatcctgcaaatttacaatgcgctctgaccgtgctcaaaatacaagaactgaagcattaaatttgatacgaacacggaaaggaagaaccccgcatattgtcgcagttacagccgaaccaacatccagccggttagcctcgctcgccttaggtactggcgacatggatcacatttatcatttcgcattatatgaattactcgagtgttataagtatctggaaaatgatgaggctcttgatttgcttaatacaatgatagatggtaaacggttacgtgatataagtgatttacctttggatttatcaatataa

SEQ ID NO: 292426 - DNA, 1020 bp, Morganella morganii
atgcgaactattgaaatgtgtgccggtgccggtggtcaggctttaggtctccataatgctggtttcaggcatcgtgtattgatcgaaatagacgaacatgcctgtaatacacttaaccacaataatacaaatttggctcttggctgggattctgtcctccgggaggatttgcgcgtatttgcacagactcaggcaataaaatacagaggtcaaattgaattagttgccggcggagtcccttgccccccattcagcaaggcaggaaagcaattaggacaagaagacgagcgtgatttatttccggcagctctcgacattgtgcatgccataaaaccaattgcagtaatgatcgaaaatgttgccggattattggataaaaaatttgatacctatcgcgattatatccaacaacaactcacttcgttaggttatcaatctgagtggaagctcattcattcaagtgatttcggtgttcctcaattaaggccaagggcaatattgattgcaataaagaaaccccactttaaactgttttcatggcctgaaccaacgatcaaaagccctctgactgtcggtgaagcgctttacgacctgatgtcatctgacggatggccgggggcagaacaatggaaattatcagcaaataatattgcccctacactggtcggcggttctaaaaaacatggcggaccagacttagggccttccagagcaaagaaacaatggcaattactgggcgtttatggtcaccgggtgggaaattataatgaagtgcccgggcctgattttaaaggcgttttattgcgtgacgggacaataaaacccggatttgaaaatatgccattattgaatattcaaatggctgcccggatacagggatttcctgataattggcactttacaggctctaaaactaatgcttaccggcaaatcggaaatgcatttccacctcctgtggcacaggcaatcggtgaaaagctgagagatgtaattcagaaagtaactaataaaaaaggttag

SEQ ID NO: 292427 - DNA, 576 bp, Morganella morganii
atgtctttgttaaaaaataaattatttatttcttctttgttcttattgtcagttaattcatttgctgcggacgtagaagaaattatcggggaaattccttctgaagacccggttgaaattaatggcaatattgtatttaaaggtgaaattacagattcaagttgtgatatcgctcaaaagaatatagaggttgacctcggtacccattcagcaaagttgctgaaaaacagagatgacagaacaccggcagaacagtttgatattgttgtgacagactgttccttattcatggcattgttaaaaatccaaatgagtggtacagcgcataaagataatgctgcattattcgcactggatgccggtgagaagaatgccggtaatgtcggtatcgtgattaccgatattgccggtaccggtaatcatttgatgagccctgcgggtggcgatcgcaatattacgctgaaaaatgattcccgtgattacacactgacctatagcgcagcctaccaggctaccggactggcaacaccgggcacaggtaatgctaccattaattacaccgtttcttaccagtaa

SEQ ID NO: 292428 - DNA, 174 bp, Morganella morganii
atgtctgcttttcgctcaaagcagccatacttgcttaaaccccctactcacctgaatcttaaatacaccaaaaaacgtacaaatttgtaccgttttggggaagagttttggggatgttttggggaagattttcagtggttaaaaaaagaacgggaactaataagttcccgttaa

SEQ ID NO: 292429 - DNA, 807 bp, Morganella morganii
atggagttacatgaaattgcgataaaaaattctgcctgggtgtggaattcattgagggaagccaaaaagcacggttatcaaattggagaggagtcgattactgatttccttatacttaatataaaaaagtggggtagtcacaaaattgttgttaatacatttacccgcaaaaaagaatctgtcaatggttctgattgggagtggtggtttacagggccgagtggtaaatggttgggaatgcgtgttcaagcaaaagtaatcaagttaagttctgaaaaatatgaacacctgcactatagcaatactaatggtcagcaagttgatcttcttattaaggatgcgaaaaataatgatcttatccccctgtattgtatgtatacaaattggaaaccaggagattataaaattggttggaaatgtaaaacttataaaccaagtattcgtcactatggcacgtcgattcttaatcctactatagtaaaaaaacttcaaaaaagtgggttaaatcatttgaaagatgttattagttatttaaggcccatgcattgtatattttgttgctcaggttatggtggcgtggatcttccttacagagctttaatgtggttattcaatgcccaacttcttactacagataatacacgtcaagttgaaaattttcttaaggactcacctccggattatgttaatcaaatattacatgacaaaatagatggtgatcttataagactggaagatcatagactcaaacgcgttacaatatttagggctgttaatgacgagaatgatgaaagtatattaatttaa

SEQ ID NO: 292430 - DNA, 819 bp, Morganella morganii
atggcaaccgtagcagatgggatccggtacgccgaacaggtggttgccggagaaatagttacgggcgaactgatacgtctggcgtgtcagcggtttcttgatgatttagagcgcggacctgagcgcgatatctttttcattgaagaacgcgcccagcatattctggatttttaccagtttgtcccgcacgtcaaaggggcgctggcaggcaagccgatagagctgatgccgtggcatacctttattctgattaatatctttggtttcgtgatcccgctggttgatgaactcagtggtgaggctcagtacgacgatgacggcgatccggtactggttcgccgtttccggacagcctataacgaagtggcgcgtaaaaacgccaaatccacactttcatccggcatcggtctgtatatgaccggcgctgacggtgagggtggtgccgaggtttactcggcagctaccacccgcgatcaggcccgtatcgtgtttgaagatgcaaaaaacatgatcaaaaaggccaaaagttcactcggtcgtctgtttgaatttaataagctggcgatttaccaggagcggtctgcatccaagtttgagccgctgtccagtgacgcaaacaacctcgacggtctgaacattcactgcggcattgtggacgaacttcacgcccacaaaacccgtgatgtgtgggatgtgctggaaactgcgaccggtgcccgtctgcaatcgcttctgtttgcgatcaccacagcgggatttaaccgcgagggtatctgctacgaactgcgggattacgccatcaaggtgctgtgcgtgtag

SEQ ID NO: 292431 - DNA, 882 bp, Morganella morganii
gtgatcgggccaatccgcccgcatcccggaaggctcccggcggatgaaccagtacctgcggacagatggcagtccttcagacaggaagataatgctgacgccttcagcaccttcccggacaggctgaaggagacggagaacttcagaaaagaccccggttttaaagctcagatagcctcctggctgacgcaactggctgaagatgatgcactgagagaaaaaacctttgccatggcaaccgcggcaacatcaagctgtaaggaccggggcacacttgcgctgaaccggatgaagaacgtggtgcggctccacgattcagaaaaaggaaaatacgataacaatctctctgaactggtatccgcagggcgtgaaatgttccggctggagaagctggaactgattgcccgcaataaggtccgtacactgcgtgaagttgatgaaacagaagtttatctgggctaccagaataaactgaaagaacagcttgaactgagcagtgtaacagcagaaatgcagtactttaatctttcacatattacagagtcagacctgcggggcgccgaaatccgggtgaaaattgtcgaaaaccttcggttcagagagtggattctgcagtgggctccgttacacagcgtgctaaagcgcacaaacccggaacactgggaaaaatgctgtgaaaagaaaatatcagattatagtgacacattctggatgctgtctgacacggagctgaaaccgaatggactggctggtgatatcgatgctgaacggactgtcggagtaagaacgttggagagtgcagagcgggcattcctggatgaactccgccctctggtgaacaatatgccgggcaactatccggggaataaatggtttttataa

SEQ ID NO: 292432 - DNA, 2829 bp, Morganella morganii
ttgtttatcgcggatatcagtaccgcgaagattcagagtgtgacggttgaaactgagaatgacctcgtggtggcaaacggacaggcgaagcacaacgtgctggtgacggtgaccgataaccggaacaatccgctggcgggtgcgccggtcaccatcagtgtcccgggcaccgcccgttaccagactcagccggtaagcgggatcacggataaccagggtcgcctgcgtgtttttatcaccaacaccaaagcgggttctgaggattacaccttcagcattaacgacagcagtgtcaccagacagctggtgtttaagccggatgaatccacagccaccatgacagactcgcaactgaaaatcgtggatgacgatcagaaagcggacggcacagcggtaaaccgggtgcaggcaacggttctggatgcttatggtaaccgtatcccgggctattccgtacagttcattgcggacaacgatgctgtgccgccgcagtctcagctgacaacggacagcaatggtgaaagtgtttttgagctgacgaacaccaacgccggtaaaacgaaggtgactgcgcaggtgaacggtaaaacggcattcgtcaatgtgacatttaccgcagacagtgcaacggcggagatccttgacggcaatatgacggtaccggtgaataacaaaccggcagacggagtggctcagaataccgtcaaagtgatagtaacggacaaaaaagagaaccgggtaccctttgtctctgtgacgttcagcaccgatccggcggcaacgccggcgggagagacatcactgacgaatgagaagggagaggcctttttcagcctgagcagcacggtggcaacggatattatggtaaccgcaaaggttaatgataatacaatgtcaaaacctgcgacatttgtaccgggcagtgcggtgccatccatgtcattgattcgcactaatcaggagacttacattgccggcagtgatctgacggttacggtgacgctgaaagatgcggagggtaacggcatctccggacaggaggctctcctgacagagaaaactgtcattgtgccgaatgctgccgtaaaagccggtgactgggatgataagggtaacggtgagtatgagcgcgtctataccgcagaaaagtcgggcacaaatctgaaggcatccctgaaaccggacagctggaacagtgcagtacactcttccgtgtatgccataaccgcaggcagtgtggcgcagacgacctcacaggttataacggataaacagagttacacggcaggcaaagatatcaaagtaacggttatgctgaaagatacctacggtaacagtgttaccggacaggtctcatccctgacagcacagactgtcatcgtaccgaatacaggtgaaaaagaaggcagtgactggtctgacaggaacgacggcagctatgaacggaattacactgcaaaaaatgaaagtgctgacaataaggtctcagtaaaactggacggttggacaacgccatcagaatcattgccttacagtatcactattggcggcgtggagcagtctgcttccggggtgcgtgttgataaggggacgtatactgccggtgacgatatcacggtcacggttacactgaaggacgggcagggtaacggtatccggggacaagaggcagctctcctgacagaaaaagtcgtcattgtgccgaatgctgccgaaaaagccgatgtctggacttataagagcgatggtgagtatgagcgcgtttataccgcgcagaaagcgagtaccggtaacaaagtctcgctgaaactggatgactggggcagtgcggccgaatccggcgtgtatgcggtgacggcggataaggatcatccggccagcggtgaatccgtgctgacggcggataaagaagagattgtggcaaatgacacggataaatcagaactgaaactgaccctgcgtgatgccagcggtaacctgatctccggacagacagttaagctcaaaacaacgctgaaaaatgcggttatcaccatgacgccgggagatcagaatggtgtctataccgggaccctgaaaggcacaacagccggaacggcgacggtcacagtgacggttaacgaaacagaactggcggggctgaccaaagatatcatactgatcggggacgagaaccagctgagcagcagtaaatcaaaactggaggtagcacctgataggattaccgctgatgatacagatgcgtcggcactgaaactgatgctgcgtgatgtcaacgataacccgatcaccggacagactgttgaattcattacagcgttagacaggaccactattaccgatcaaccggaatcaccgcaaggtacgtaccatgccgtgctaaaaggaaaaacagccggtaatgcggagatcaaagtgaaggtgaatggtgcagatttcggcgttgcatcaaaaacggtgaaactgattgccgataagagtacggcaaaaatggttattacgaacttaaatcaggataaacatgcggttgccgatacggtatcggtcaacaacgtagaggtaaaagttgttgatgcccatgataacccgattagtggtgtaaagatcaacgtcaccgaaaaaacacagcctgccatggtgatgattgacaatgcggaaggtgttaccggcgcggacggggtatttaaaccgggggtcagaagtaaaattcagaatgtcagtttatcggtatcggcaaaagatgcaggcagaattgaccttaatgaagattatgcactgatatttgacctggtgaaatttacgctgaattcagccatcgtcaccgattaa

SEQ ID NO: 292433 - DNA, 972 bp, Morganella morganii
atgaaaaataaaataattgccatggcattgattgtgttgtcgggcaatgcgtatgcacattatacggtccaaaatgtaaaaacgaccacaaagatattttcatttgagctggttcatcagtatctcggaggtacacatgaaagtcataggaatacatgcaaaaaaaactatacaaataatgaactgaagtcctgcacgctgaattataaagtgacatccggtggtaataataaagtgattcaaaccggttttgttgatttgcggggaaacggcagttttgatcaggaactgatgaatgccgcaacacattatgatgcattacgggtggctgaggctcatggcgttgatttaactcagctggttgaaattccgcgggagaatattacatcactgaccggtggcaacaaccggtatacagtcaatacgtcatcggaggggcgtgtttgtaatgcaaactctccgacaacatgcagagatgatgcagattcaggctattccaatgacacattagatttcacgacgatgaaagagttacaggttgcctgtgaatttaccagcaaagatatatccgttaagacctcattatctgagggtaatctgtatttgtatgatggtgctgccaatcagaaaatactgtcctataactatgattcggataatgtgtcggttgactgtgttaactggctttcaaccccaatatcaaaagatgtcacgctgaagtatcagagcctggaaaaaacagcggaagatggcgatactaagctgacctgtaaattattcggtaacaatgccggaacaacctcaccgttatcgtcaacgagtaagatgaccattcagggattctcgacgaaggacgagaattttaaagttccggaagcatttctggggttttatgtctcatcaccctcaggaagcgcgcaaacgtcggttgcatttgattgtgatttcttgctgtcaacagagattaagtaa

SEQ ID NO: 292434 - DNA, 891 bp, Morganella morganii
atggtaaatattgaatgttattacagtgagcctgaatccggttttggtggggagaggatgagtaaacaggtgaccgatttattatcagtgatgataaaaagaaaagaaaaaaggtggtgtgacaacgatattccggtaatcagttcatccattcaatattataatgataaatattatgatggtaatgtattatatcttcttccaaagataaaaaacagtgattatcctttccgtgaaaggcatgatgctattttgaccttgatgtcatcaacaggaacgataaaaaatacaacccggcagaatactattcccggatatattttatgtgaaaatccggcagatgaacgccctgatacgcatccggaaaatgtgacttctgcaaaagaacccaaaagtatggcagcagaaaggagtacggcagaaaacatccgggaatccgcagacacaccggcggcagaatacacaccggtggcagaatacacgccggagacagaatacatgccggagacagaatacatgcaggtggcagaatacatgccggcagcagatatgactccggcgttaccggaggttccggctctccggctctccgggggcacatcggagaaaaagagtctcacgttacggtattatgagcaggaaaagggatcgcaggaaaaagcgactcaggttatcggttatgccggaaaaaatcaggctgttccggaaagcaacagacctgattattattgttcttatcatttcagacagaaatatcagccgcctgaaccggtgcttatttaccgggaaaaacaggggcggtttaaactggaaaccggttcagaactgcttaaccgacgactgaaaacgatgaacgcaataaatggaattgatggtgttgatatagtataa

SEQ ID NO: 292435 - DNA, 1302 bp, Morganella morganii
atgagtattaataattattatactatagcatccggcatattaggcgctgaaaataaatctggtcatgatgaacatataaaatccggagaagggagtggtgatatatctaatattatatttgatgaggtgattctagagttatattacagtgagttgtgtaatataaatttagcgctgtctgatcccctgatcacagaagagcaagcattaaaagaattgaatgaatataataaaataataagaacaccgggtgttaaagcatttatttcaaccacaaaaaatgaactttcagataaaataaaagatatagatgaatccatacaatattatcttttaaaaaaagaaatggtcacttttggttattttgttgacaaaatggatgttgcgtcaagatatggtcataatataagcgtgaagtgttaccgtgatggatttagtcagtatacagaattctataaaacattagcaaaactgttgagttattatggtgaatattccagaggggtgatcgatgatggtaaaaaaacgaaattcagacaaaatctattttattatgatctgcataaaatattgatgaagtattatcccgtcacaggtgatttaaaaaatgatgaaggaaatgattgttcaatatataaaggaaggtttgaaataaatacagtaaatggaatgaatgactgttcaatatatattgatggggagttaattgattccggtgttagttataatgacgccattaagaaaatggagtattttttctccattatgaaaagtccggtatccggaacccaggttataaaaaaaataaatgcagaaacggatagcagtggccggctggttaaaataacgggtatggctgatgctgtagttatgccggatgcattattcaggtggcttgaattccctataaaaaaagaagactatgatgaagtaaattctttttttaatcaagcgatagataaattaaaaagttttaatcatattaatgatgactactcatctgtatcttctctatataatgatgcattaaaaaaaaccggcgaaatatttaatgataaattaaatgagagctacataaaaaaagcaaaggccggaataaatgaagagtgggagttagatcaagggaaaataagttcatataatactattatagatggaataaaaaaagaactgcaaatgacacttgatgaattctctcagcgatataatacgattaacagtaactatgacaatatgctcagagtcatcaccacaatgattaatgagttaactcaggaactaaaaggttttttacggatttaa

SEQ ID NO: 292436 - DNA, 1719 bp, Morganella morganii
atggatgtatcagggatcaagacagcacaattaatcactccgggtgtcttaacaggggacgttgatgaaacagaaaaaagtaagattattaaccaatcagagggtgtctcacattctgagaaaatcatcgaagaattaggtgaaagatataatctggaaaatgctaaaaaagcaaagccaaagcttaacggaaatcagacgggtaaacaacgcgatgataaagcacctgtaaaaaaaatgtcaatcaatgaactgtttgcacagttatcagatgaccttcttggggaaaaaattaaaaactcaggtgtaaatgccaatattaataataattttttaaaaaatatatggtctccgcagaaggagtctgatttagagaaaaatattatcagttattttaacgcgctatctgtcaaaattaataatatagctgattattatttttctatcgtcaatgatcaggatgatgattataataatgtcagaatgtttttctctgaaggtaaaaatgtgaacttcagtgataagaacgcatttttagcctgttttaataataagcttggtactgatagtatccttgaaattatatcgggtaaggcagggaattgctgttgtataacaaatttaataaagaaattacttgatgatattatcagtttaccaaaagtaaaagaccagatgccgataatagggccgcaggaaatggttttactgaagtcggaaataaatatattacacagtgcggctgaaacactatcttcagtaagagagtgcctctccgcagcacaatccctggttaatatgaataataagaacacaaccgagtataataactcactgactgttctgatgggaaaactggctgacttgcgcgataaaatggctcagcaaaagctggaaaatgaccgggaattagcccggttacagcagttggcactacagaaaaaaacagatgcagatgctgcggagataacagaaaaggtaaataaagcaaaacgcctgcaggccttatttaaatggctgggcccattgctgatagcgattatggccgtgttgacagcgttgactggtggcttgctggcaaaagcactggcagccgttattgttgtaatgacgattatcagtgagatcgtaaaagcaacaggtggtcccgatattatggcaaaaataatggaaccggtaatgaaactggtggaagctattcagaaatttattaaagatattgccatggctattggtaaattcatggggaaatcaccggaagagctgaaaaagctggagaaaattatggatattgccgcgatggtattggctattgtggctgtcgcattattatttgtagcactttcttcagtgattggttcaattgcaggaaaatttgtagggcattttgcgtcaaaagcaactgaggctgcaataaatagtttttttgctcagataaaaacattgttaattaatgtcatgttgacatcaaccattataaatagtgcgagttctgttacaaatgcggtattacaggcacaggtaacacgattgcgggcagatattgaacttgattcggaattactcagcaggataacagagttgatgaaccttataatggaaacttatactgaatcacaaaaggaacttatggcattaaatgaaaaaataagtaagtgcggaaatgagtcttttcagagaatgaaatcaataatacagcaagggcagcttgctgtttaa

SEQ ID NO: 292437 - DNA, 768 bp, Morganella morganii
atgagtattattgataatattggtagtattaatacggtatctgttggttatacaccagaagagatcgctgctgtaaaagaaaaaccggtattgctggttaataatgtcaatcagcagatggttcagtcagttgctgataatgcctgttttcagcaggaagctgtagccggtaaaacgaaggaaggaatgatcaggccattctcagagcatattttgcctgcattgctgactgattatgataataaacgcatgagtgctgttattgaactgtgcaatgttctgttgcttgacgcgattagtcagcagaagcgacggaatacgttagaagagcaggctgtgcagcaggcaaaacagttaaaagaactaaaatatgaagaggccgattatcaggtagcggccgcagttgtcggggcggttgtgtctgtggcgattgcctatgtgggcgcacgcatggcaataaaagggatcaatccgcttgacccgagaatatcaacgccgcaaggtctcgccggtcaggctatatccggtttatcccagcctctcagccagctattttcccaaccgatcgcggcaatggcaacccggatacagggggatgcggaagtcgttcgtgttttgaaagatgctctgctcaataacatgtctgtacatagtaaagtggcagatgatcagaaagcgttccagaaaaaattactggagatgctgatcagtgaatctgagaaccgcaaaagtacaacacagaatctgattaataatatgaagatctga

SEQ ID NO: 292438 - DNA, 1602 bp, Morganella morganii
atgtcagattttaaaaaaaagctcagtaatatggctaaagaccgtgaagaaaacccgcttgtattcccgtctgatcccggaacaaatgttaacggtacgatatgggccgccggtgcggcagaaaaaacctatgaggtaaataattttgatccttctgctgaggatagcctgctgagttataccccgggccgggttgtaaggcatctgtttaatgactatagcaaaactgaagggtttgaagtttttggctatatgtctgattggggtatttatgattcccgttatgaacctgatcagtatggttataaagagggtgggcgtggtacggatattatgcgattgatgcagggggaaaattcttactttgatcgcctggtattagggttttcggcaattatcggagataacgggataaaagcagacaccattaagagagcggcagttgattttggtattgctgctaacgagggggatgttgccaatcataaagggaaagcaaccctgactgatttttggggagatgttggtgcttatattaattgtggttttccgggatggaaggaggtgaaatttaatccggaagaggctatgggtgttctgggtgcgcttgttcagcttaataaaaaatttcccgaaatgccaatcggtctgagtctggggggatggtcgatgagcgaggctttccattatatagcaaaagatgcggataaacgggtacgtctggcgcaatcattaaaatatatcttcgatcttttccctatgtttaaggaactggacattgactgggaatatccgaattacaaaggggaagaccacaataaatttggtccggaagatgtgccgaattttgttgagctgattaaagaaatacgtaaggtacttcctggtgtccctgtcagtatcgcaacgatagctaccccgaaaggattaaaggacggggaaattgataaacttgttgcggcgggtgttgataaaataaacctgatgacttacgactttttcggctcgccatgggcagaaaagctaatgcatcatacgaacttaagaaatactgttgctgatggtacacaaaactcagttgaaaaagcagtagattatcttattaatgatcttcacatagaaccgaagaaaattaatatcggctatgcgggatattcgcgtaatgccaaaaatgccacaatcgtcaatgcatctccgttagttggcagctatgacaaggacaataacgctaaaacgggtgttttaggcagctttgaaaaagcaaccagtgaatggccggatctcttatataactatgctgatggtgatcttaacggcatcaatggcttcaaaatgtacactgataaagtgtcttccgccgaattcctttataacaggtctaaaaatatctttatgtcagtagagacgccatggagcgtgtatgaaaaagcgaaatatgtgcgtgaaaaagggctggggggcatgtttatctggatgattgatcatgataatggtctgctgactaatgcggcacgtgaaggcctgggtgccggggtggacggaaccccgcgaattgatatggctccgctgctgcggtctgcggcagacaaggaaaataaataa

SEQ ID NO: 292439 - DNA, 3621 bp, Morganella morganii
ttgtggggaaagaatacagatgaaaataaggttatttcaattaccgaataccgtaacggacaggcggttcccggtgatgcttccctgaatgcgattgaagactggcagatcccggacaacccgtcagcaatggaagagattacctggaagaaggaagacggggaaattgctgttatgcaggcgtataacaccggcgctttcaaaaaaaagatcgaccctcagctgggcgtgtatctgctggaaaaacaaccggaattatcaccgttctaccatctgacactggcagaggtcaacgatggtaccctgaatatgactgcagctgacaatgttgactggaatattaattttatcaaagacagttcactgtttgtggcggcagcagacaacgggaaatccgcaactattgataccaccagcaagctgcatgtcacgttcggtgaagcctatggcatgcatttatcctccggtgagtataaataccgtttccagccacagaatgaactggttgagagagtcactatcccggaagaactgaacgggtttgtctcaaacggcagaacctatgcccttggtgatacttttgcgatcgggaatgcccggggactggcggattacaatgcgttactgatagacgcggtaaaacacaacatattacccggagcggcatataaagcgctgattgaagcgacggttgtcccgcgcccgcaggacaaagattattttgacgttaatatcgatctgaaaggtctggaagataaagatatccggctgaatgaggccattaccgctgacatcggcagacgatctatttttgaggccgatggtgaaggcagtgtgctgaacattaaggacggcgcggatatccgtggtgaaacggcatcagattcaggccgttatcgtgcttatcatatttttgcgcataacggcgcgaaagtattccacgatgccacaacctccgtcccgaattataaagggcagaatgcgtttatcgataatgcggaatttaccaacaccggcacgttactgctgggagacggcaaaacccgtatccacggtgatcaggtcaccggggaaaatgcacgctataccaacgccggcaccattgcggtcgaggctttcaacctcgccaataatgacccggcggataaagatgaaattgccaataccggtgtgacagcatccggcggttcacaggtcaccaacgagaagggcggcaaactgctgctgggtcagaaagggatcggcgaaaatgaaggaaccgtgaccggcgtgcaggtcagaggggcttcgtttgtcaataacggcgatattctgatgggtaaggatggcgtaagtctgtccggcggccgtaaggatgatacctgggatatgcggattatgtcgaacgccgtggccgctctgctggatgaaaccgccaaagcgggtgagaattatcatattgaaaataatggaaaaattgagattaacaacggcgtcagaaatgctgtcggtattaacgtgtcatcgacaccgagccgtcatacagattcacagctgacggtcgttaacaagggtgaaatcgatgtggcgggcaccaatactgtcggtatgcgggtgtcaggtactaatcgtgataaggatattattgaaaataacggcacgatcaatgtctccggttccggttcggtcggattgctggctctgggcgacagcacgatcatccatcacgggaaagtgatcgccaccaacaacggaaccgcagacggcacaaccaaaccatcgcgtaccaccggggtgcgggcggatgatgcgaaagtgattatcgacggcggaactgttgaactgaaaggcaataacaccgtcggggtctttgcccgtgtgggggggatcatcgatcttaagaaaggtcatgttatttttgataaaaactcggtcaaccagaccggttactggatcgccgggcgtaaaggcgcagacgaaaccttcagttcgcggattaatttcggggcaagtgatgtggcgctgactctggataacaccgactcgacgttgttccgtgttgatcagaaagcacagttcctgggggacagcagcaaaggcacaacgtacacctttgatatcaacggtgaaaaaagccggggtttctatattgcggataacggtaccgaagtgaaaaccggcaatatgcaactgaatgtcaacggaaaaaaggcgaccgggctgtatctggccagtggtgccggggcggacggtcaggttgtgctggataaagagacgaccattaatgttaccggcgaaggcggaaccatcgcggtgatcgacggcaactattacgatatcaacggtaatgcgatcgccaaaggatcggacaaaaccacactgacctcaaaagcgcacctgaaatcaggcggaaccgatgacaatatcgcgaaaaacgccatcggttataagctgatcaacggcggtgtgctcaatcacgacggtaatattgacttcagtaaagcagacaacgccaccggtatccgtgtggaaaccggaacggtgaataacaccaccgatattactgtgaatggagtgggtgttgatatttacggcaaaaattccgtggtaaataacaccggtaatattaccgccaataacggcaccgccgcagtccgcctgaataaaggtgcctcaatgactatcggcggcagcggtaagatcctcggtgaatattcggcggatgcggtacgggcacattccggttcaaacgtgaaactggataaagccaatattgacgtcaccggcagcggcagtggtctgcatctgctgaataccgatgatgacagcggcggatttaaactgtccggcagcggcaccatcaatgtcagcggtgagaatgcctccggcctgaaactggaagcggatgacggcaaaggcggggtgacgatggcgaaaagtaatctcgacacctcgggcgccaacggcaccacgatcaatgtgaaagataagggcggcaacggcattgtgaccaatacctccggtgatgttatcagcggaatgaatgtgaatatcgaatcagcggaagggaaatctgcactggtggtgctgggtgagactaaaaacatcacacagagcggcaaactgacctcaaacgccgatcacagtgtggtggatctgaccgcgctgaaaaatgatttcagtttcaccaaccgcggcaccgtgaccgccggtaccaacggcatggcggtggatgcacatcagaacagtaatatccgctttaccaacagcggcacgatcagcggaaaatcgctgctgggcagcggaaataacaccattacgctgagcggtaacacccgtgatatcgcgacaggtcacggcgataacactattgaaatgaccggaaaagccaaaaccggcattctgacagccggtaacggcaacaataccgtgacactgaacggcggcacggaactggtgagcgggactgccggtaatggtcagaacaatgtgattctgaaaaatgtttctgaagcacaaagtgatgctctgttcggccatctgaccgcaggcagcggcggacaggatacgctgacgctgacaggcaaaaaagccactatgtattacaggacagcagcaaaatcagcggttttgaaaaattga

SEQ ID NO: 292440 - DNA, 1008 bp, Morganella morganii
atgccggtacatgttatcaatcagacgccgttcccgcattttgccttcagaaaactcgggtacaggggagaacactggtttacggtggtggtcagagttacctgtgatattgacccggtgaccggacaatgcagtttttcagatgaacaacagccggtcattatggcggacagataccggaacaaccccgaaaacagcagtctgctgactgaaacagatctgattttccgtaaaccccggggggagttttacatcaccggcacagcttacacaacggataacataccgcagcctcagtggatcgccgggttcacgttcgggcaactgcaaaagcaactgacactgagtggtccgcgtttctggtcatatcatcagggctggaaagcggatgcaccggcagcagtgacggcattaccgctgatttatgaaaatgcgtatggcggtcatgatatttccggggcatatccggctaatccggtcggaacaggctggttctctgcggataatgccgataaatcagcgcggtatcctcttccccggatcactctgccggggtctgaatctgtcccgccggttttcggcatgccgtggccggtggccgggttcgggctgtacagccggtggtggtcaccgcgtcttcagtatgccggtacgtatgatcatgactggctggaaaacacacggccttattatcccgcagattttaaaccggatttctttatgggcgctccggctgaccagcaacaggaaggctattttgcaggcaatgaaacactgaccatccgggggatgtttccggaggtggcggaagcctcattccggttacctgaaatcggtttttttgcggtacaggatatcccgggagagccgctggtaccggatgactgtgtcctcgataccgtacatctttctctggacgagcgtaagctctgcctgacctggcgatacagtctgacggatattctccccggtattccccttcagatccatgcgtacaaactgtcataa

SEQ ID NO: 292441 - DNA, 318 bp, Morganella morganii
atgaaattttatattgataaagatggttattctcgcgctgaagcagacgaagagcatcgccttattgcttggttcttaaatgatgatgtgcaaggtagtttacatggggtcgaagagtatatctcttggtgtgatgtaatacgtaatggcgaattgccacaatggaaaggtactggcaatgcacatactgtcactatcaagccaaatggcgtagagatctttaacgagtataccgaagaaagcctgaaaattgccacgatagcagagttcaaaggctatcttgagcaatggagagaattacttctaagcagaaagtaa

SEQ ID NO: 292442 - DNA, 192 bp, Morganella morganii
atgagatgcgttgctgaaacgctgatgaattgctttaatatgttaatttctggtgatgagctgggtgatgagctgggtgatgagctgggtgatgagctgggtgatgagctgggtgatgagctgggtgatgagctgggtgatgagctgggtgatgatatcgaatataaagacccaggaatagtatggatataa

SEQ ID NO: 292443 - DNA, 630 bp, Morganella morganii
atgcgaaatgaagcttttagtctttttattgatgaagttggtgaagccactacatctcggtatgttcctgaaacagagatagaaaagtggaagggaaagttaccgccattgttgttgaattattggcgtgatgaaggctggagtagttatcataatgggctgttaacaatagtaaatccggaagaatatgaagatgttgttgatgaatggttggaagatacatatttagaagaaatcgatgtttttcatgcgattgctgtcaacggatttggtaatttatatttatgtggcgaaaaaacaggtcgttgtgttactatttcatcatcatataatactcttattgttaataaaaagtcattaaaaaataaacagaatgatgtgaatttagattttgggattgaatcattttttattagctttgatattgggtatcaaaataaaaaggggttatttgaaaaggcagtaaagaaattcgggcctctcggtgattatgaaatattcggatttgaaccggctttaattttaggtggtgaattagatattaaatatattcaaaaagtagatgcacgtattcatttatctattcttgctcagcttgcagaccctgaaattgatgagataactgtttga

SEQ ID NO: 292444 - DNA, 618 bp, Morganella morganii
atgagggatcactatttcgattcactgattaaagagctcggagaagcgaccacttcccggtatgtttctcaggctgctatacagaaatgggggcgcactcttcctgagaaactgcttagctactggaatgatgaaggttggagcagttataataatggtctgttttctcttgttgacccatcactgtatcatgatgctgtacttgaatggttagatgaaacctatttaatttcaatggataattttcatgttattgcttctacaggatttggtgatttttacttgtttggtgaacggtatggtttaatatgtaaaatattatcccggagtggtgtcattgaggttttttctaatgcaattaagttaactgaaaaattgttaaatagtcatgtggaaagtctgattcaatcaattacaaaagaaaatattgataaggattctgtatttgataaattaattaagcggtttggtactttgggtgaaaatgaaattttttgttttgaaccgatggttaataaaataaataattcgaagtttctgtcagcaagaaaaattaatgctgtagattatttaattgagttaagacatatcataaaaccggtaattttgcatgtataa

SEQ ID NO: 292445 - DNA, 177 bp, Morganella morganii
gtgtttataatttctgccattaaatattcaatttataacctgaatagtcaggtgaaaattattttacatgattacatcatcaatgttgatattgttttttttattaaattatggtcaacagtgaaaatatatcaggataccttcagtaaaggatctcctgaaggtaagctgaaataa

SEQ ID NO: 292446 - DNA, 372 bp, Morganella morganii
atgaaattagttaatcgtatgtttcctgtgttacttgcagggagttttttacttttcagccttccctcacatgctgctgacttgccgattaaagtcgatgcgaaagcagataaaatccataaaggattaacctttccggtgtggcgttatacaattacaagcatggataacaatatcactttacagtcactggaactcaaccggggtaattgtaaaatttccacaaatgacagaggtaaaaatacaaatgtcagactcggttttggtcagtcttatacatttacaagtccaacaaattcatcctatacagattgcaggccacttgaactgattgtaaatacagacaaaggctcatatacctttacctggtag

SEQ ID NO: 292447 - DNA, 129 bp, Morganella morganii
atgtcagaagattttaaagacagccaggaatatgaagagtggattgaagagactggtggacgggatgaagaatattcagactattataatgaatggttgaaaagacaacagaaagagtggttctcttaa

SEQ ID NO: 292448 - DNA, 1197 bp, Morganella morganii
atggcactcagcgcccggcagatacaggctgccaaacctaaagacaaagagtataagctctctgatgagcgtggactttatcttctcatcaaacctaatggtgctcgttactggcgaatgaaatatcgctttgcgggtaaagagaaaaaattatctattggtgtttatcccgatatctctcttgccgatgcacggataaaacgtgatgacgcgagaaaactgttagctgaaggtaacgacccggcggaacaaaagaagctggaaaaactcgcgaaaaaaataactgttgaaaatacgtttaaagcgattgcgcttgaatggcatacccataaatcgtctgaatggtccgaaagctatgctgaaagtgttcttgatgcgttagataaagatatctttccttatttagccagacgccctgtcgccgagatccttccattagaaatgttagaaatcttacgaatgattgaaaagcgtggtgctttagaaaaaatgcgtaaggtcaggcagttctgtaatcagattttccgttatgccattgctacaggccgtgcaacgataaatcctgccgcagagctcacagggacgcttaaagcgcctaaaacaaaacatttccctcacctaaccgctcaggagcttcccgaactattacagaagctttcagcgtattcaggaagccctgttacccgcttagccaccaaactcctgttattaaccggtgtcagaacaatcgaactcagggctgcccactggagtgagtttgattttaataatgcaatttggttaatccctgaagaaagaatgaaaatgcgccgtccgcattccgttccgctttccaaacaagtgattgaaatgctgaaagagctatatgcttttacaggccagtatcaactggtttttccggggcgctgtaacataaatcaaccgatgagtgaggccagtatcaatatggtactgaaacggcttgggtatgacggtaaagcaacaggacatggcttccgtcacacgatgagtacaattctgcatgaaaaaggatataactcagcatggattgagacgcagcttgctcacgccgataaaaactcaattcggggaacatataatcatgctcagtatatggacggacgcagggaaatgatgcagtggtatgcagactacattgattctctggaaaaccacagtaatgctgtccggctataa

SEQ ID NO: 292449 - DNA, 1200 bp, Morganella morganii
atgaaattaatggatatcgcatcaaaaaaaatcttcacaaaatcatcccataaaacaacaccaccgctcatacttatgactatgttaaaagaaaaaataattcagatagaaaataaaaacctggaatttagcagcaagtatatcaatataaccacagatatcaccagactaagcaatagtgtattaaaataccaggtcgatatagaatcaaatgacctgaaagtacatggccctactgaagaagaaaaaaataaaacaccagatgagatactaaataacagattaaaagggtggtgtgatcaagaacaaaaaacgaccatcccttctgttatctaccgaataatagacaaagaagtagaagaaaaaggcatgaaattatccggtaaagtaaaagaagaaatactggatttaataaatgaagcatatatacccagccgtacattagaaaaaaaatcctctgttatctctatgatgaatgctttgaaatcagatcgcatattgaagagcaaaatagacaccatgaaaataaaaaaagaattaattaatgacataaaaaaagaagcacctgaagaattcaaattcctggtagaccactttcacaaaaatgatgaaataaaacaaaatgaaaagttgctgacacctgatgagattgttgtttactatgacattccaatcgtaagagaaataaccgggaagatgatatcagatgtatattacagtttgatcgaacatatttacaacacattattcagcgatacaaaaacagggggaaacctggatttccgtgctatggaaactgacataaaaaatgaaataaaaagtgaaataggaaggcaagaactatctttatctcagaataaatcatcaaataaaaaaatcgatccggaagatgaaaaacgattaataaccgaaaacttcattcgtcgtaaattttattctgaaataaaagcaacaccttattctccggaaaaagaacgagagaaactctttgagatgctggataaaagcttctttaatgaaggcttttcagatcagcgtgccacattaaatccggatataaaattcacttcgccatcaaaactcatgtcttcttctgttaaaaatatatcggatcaggatactgatgatttaattaaaataatggaagaaattcatggcaagggtgatatatctgatcagcgtgttgttattacaagataa

SEQ ID NO: 292450 - DNA, 519 bp, Morganella morganii
atgccaactccatgttatatctccatcgaaggcaaaactcagggcaatatcactgccggcgcctttaccgctgaatctgtcggcaatatctacgtgcagggtcatgaagatgaaatgctggtgcagcagtttgaccatgttgtgacggtcccgactgatccgcagtccggtcagccgtccggccagcgtgcgcaccgtccgtttaaattcacggtcgcgctgaacaaagcggttccgcttctgtacaacgctctggcagccggtgaaatgctgcctaaggtacaactgaaatggtaccgcacctccgttgaaggtaagcaggagcacttcttcaccacctcgctggaagatgccactatcgtcaatatcgactgcaaaatgccgcactgtcaggatccgcaaaaaacggattacacgcagctgattgaagtctcaatgtcctaccgcaaaatcagctgggatcacacggttgcaggcacctccggtgctgatgactggcgcgcgccaatcgaagcgtaa

SEQ ID NO: 292451 - DNA, 1644 bp, Morganella morganii
gtgaagtctgccggcgatcgtttcaggtattcaatttttgttgagggtaataaaacgtcagataacagtaataatatagattatcttgttaattttctgagtaaaaaacatcgtgacaccttataccacacactctatcagttaggtaatgaccaatctggcttccagaaaacatggagtgtgatcaagcatatcattcctttttatgactgtgttgaaggtactataaataacgacccggtacaggctgttccttcatgccttatggatgccgtagcactcattcctgttttcgggcaggcagccagcctgggcacaaagtttggtatgggactggcgcggggacttcgcagtggcgctgttatcgtaggcaagggaggaattaaatcagcgggtaaaagtctgctccgggaaatcagcctgccaacaaccgctgggctggcttcgcttgggaaaggcacactcagggcaattgatccgggttttgagctgatagcaggtataagcaggaagtttggtaacaaaatggtgaccctgatgtccggtaataaaaaaacggcagagctggctcaggagattgcctcatcgcgtgtattggaccggctcccccgggtaccggcagatgcaaaggttatggggatattaccggaaacacggctgcaagtgccggtgaaagtcataggaaagcaaagaggcagagatatttacgtgcgtgtaaatccggaaacaggcgttgcaggaggtactaaatatttttgttccaaaaatggaaatcttaaacttttttcatccgtacccggaaaacatagtttgcttaaaaaaacgtctaacagagtaaagagaggagcagataatcctaatctgtgctccggaccaggaacgagcctgggaaccagcagtttccataaggaaatcaggaagcaagaaagcaagaaaaaattggaaagaacaccggaccaacaaatgagtgataataagcggagggctggcattagcgcgttatccggggagtttgataatttaaagcttgagcagagcaacgttttgaataatgttgccccgtcgaacgacgtactcaaagtacagcaaaggaatgaaaatactgcaatagaaaaccatgctataaacaacgtagttacttttattgaagtggaaatgtcagagatgaaaactgtcgaggatcctatttctgcattgaccacgagtgggctgacggattgttctgcactggctgtattatcgaattggaacggggaaatctatgagactcgcactttgatgcacttagccggaagtagcttgaagttcgggttgaaaaacggcattgatgcagacgaattaatttcagatcttaaagatgagttagtcaatggtggaaaagtaatctgggttggaggagtaaacagccagactaacctggcgctggaaatggctataagccaagacaataggaacaatgagcagcctatacttgatcttttcaatacaaatggcgtttctgtggaaattgcgggatctaagggtgttactgttcatccggatggaagagtcgagcttatggatggacccggcagaggttttttgacggcgcaagaacagcaagtcttacttagcaggattgctggcgccaatgatataagatag

SEQ ID NO: 292452 - DNA, 942 bp, Morganella morganii
atgttaccagtcttgagtaattattctttaccccaggctttaaatcagccaatacatactgcagatactgcctctccgcatcttaataacatcacccgggagataaaaagtgttcgaaatactaacgctcattgcgtaacagtttctcatatggacacgttatatgatcctatctcttatggccgtggacggaaactggaaagtataaaaacgtcctttaaaaataatgtaaaatctttaaaaaaatacaatataagcatcaatacggaaacgtatactaaattaggtccatccggacagaaagaaatagaaaaaactatagatgaaagatacctttcttttgagaatggtacctgggttggaaaaaaagatgaacacgttttgcgttttaatcttcccaaaaagaaaggtaatttcagagtcgagcttgcgcatagaaataatttgaatatgaacactgattctatgtatgagtttcaaatgagagcaggctatgcagcacatgatgtaattttttttcaggtaaaagagtgtggcggtgatatgaagacccgtggccggggacggcctccggtatctcttcatttaaagaatgaaaaagaaatatatatttcgattaactcggaaaatggaaatgtattaagaaaaaaaatagcaacgcttagctgccctcaggaatggtataaattcaaagtcaggattgtctggaacagaaatcacccgggtattcaggtggccatcaatggaaaaaatacgtttgagacaactgtttcatttggtgcacataattccagaaaccattatagcaagtttggtatttatgttcctcagcagaaaaataaggaaggagtgaaaaatacgtcacttatatttgacaatgttaaagagacgcatcgttttttcaacactaaaattcggcataaaaaggtaaataaaacataa

SEQ ID NO: 292453 - DNA, 219 bp, Morganella morganii
atggtgaatatgatgcctaatattattttaagtgatatcagtgccggtgatggatttccggtcgctatctttaaccgtaatcagcctgctttttattgtgttccggcggagctttacaaaaaaatgcttgatgcgcttgatgaccaggaactgattaaattagttactgaatgcagtaaccaaaaactactggatgctgatctggatagctatttatga

SEQ ID NO: 292454 - DNA, 162 bp, Morganella morganii
atgttgctttcattctttttcctgaccttaatgtcttactcggattttttctctctgaacggcggtcttaatttttatcacatatctcattacttattcaataacctgagttttaagccgattttatctatactccttgttgcagccatcgctgtttcctaa

SEQ ID NO: 292455 - DNA, 417 bp, Morganella morganii
ttgcttgatcgcatggaaaatggtgatctactgatcgtcaccaaacttgaccgtttgggccgtaatgcgatggatatccgaaaaacagtagagcaactggcggcttcagatatttgtgttcactgcctggcgctcggtggtgttgatctgaccagcgctgccgggagaatgaccatgcaggttatttcagcggtggccgagtttgagcgagatttgctgcttgaacgcacccactcaggtattgcacgagccaaagcatcgggaaaatgttttggtcgtccgtcagcactgaacgaagatcaaaaacgggttgcgatggaacgcctcaatgcaggaagcagtgtcagtgctgttgcccgagagtttaatacaacacggcagaccattctcagggtgaaagcggcattcaatacctga

SEQ ID NO: 292456 - DNA, 633 bp, Morganella morganii
atgctggctgaacgggggatttcagtgcaccgctcaacgatttatcgttggtttattgaatatgctcctattctccgtaaaaaactcaaaaaatatcaattcattcgggctgtttcctcctggcagctcgatgaaacctacgtcaaagtgaacggaaaatggttttatctttaccgtgtaattgataaacacggcgatacgctggatatctatttttcccctaaacgtaaccgttatgctgcctatgaatttctcaaacgggtattaaaaccttataccgctgagcgacagcctgaaattctcaatactgacaaacacgccgcttacggttacgccattgcccgtttaattaaagaagggaaactccgggttgacgtgaaacaacggcaaatcaaaaccctcaataatcgtattgaatcggatcacgcaccgattaaaaaattgattgtcgcaacgggcggtttcaaatcggcgaagctggcttggtcaacgatccaaggatttgaaaccttgcgaaaactgagtaaaggtcagtttgatgactggctgcgtcgtgtcgaacctgaatttcgggtgcaggagcgatctgcctttatcaatcgattattcaatgtggaagtcgttttagcctga

SEQ ID NO: 292457 - DNA, 1632 bp, Morganella morganii
atgttaaaaaaaataaaggtagctaatttttttattattgttttctcaatattaattttaactttaattacagccggttacttattccactcggcaatttcagaaaccggaagtaatatttctactcttattagtataaataaaagagccgagcatattgaacgagcctttaatgacttgcagatgtcacgaattaatggttttgctgccattgcagccaaagaaaaaggtgatacaaacgaagcgacgttaagattggaagaagccatggattatgtcaatcaggctgacaaaaaatgggaggaattaaacaaaaatccgagtaacgccagtgatgaatcaattaaaagtcttttcctctcatatctgagctatagtaaatcaataaaaaacgacattaattcaattcaggaaggaaaagaaaaatcaaatacaccgccaaaagaaagaatgaatttttatgacagctatgaaaaatataacacacaggttggagaaataatttcatctataaataaaaacaacgaagatattataaaaaacatatccacatctatcatcataataatttctatattatgtgttttaattgtaattgtgtggctaacccttaataaaacactaaccaaaccaatcgatattttaattgaaaatataaaaagcatatcaaccggtgatttaacaaaacctgttaatgccgcaggatgtcatgaaataacaacattagcggaaacactgagcgatatgcaatacgaactgtccaatactgttggtaatgtccgtgatggtgtgaccgccatttataacggggccggtgaaattgctgccggtaataatgacctgtcttcacgcaccgaacagcaggcggcctctctcgaagaaaccgctgcgagtatggaagagctgactgccaccgttcgccagaatgcggataatgcccgtcaggccagtcatctggcattaactgcctccgaaaccgcagagcgcggtggtaaggttgtggatgatgtggtcagtaccatgcacggtatcggcgacagctcgaaaaaaattgctgatatcatcagtgtgattgacggtattgcattccagaccaatattctggcactgaatgctgccgtggaagctgcacgtgcgggtgaacagggccggggatttgctgttgtggccggggaagtccgcaatcttgcccagcgcagtgcgcaggccgcccgggaaatcaaaaccctgatagaggattcagtcggaaaagttgataaaggcgctgctctggttgagcatgccggtgagacgatggatgaaattgtcagggctgttacccgggtcaccgatattatgagtgagattacttccgcatcggatgaacaaagccggggcatagatcagattggtgtggcggtgacagagatggacaaagtgacacaacagaatgcggcattagtcgagcagtctgcagccgcagcagcttcactcgaggagcaggcgggcagactggctcaggccgtatcggtctttcatatacgtgcaggagaactgaagaccggtatcctaaccggcaccgtggtgccgttaccgcagcaggagagtaaaaaaccggcagataatgacggtgataactgggaaacattttaa

SEQ ID NO: 292458 - DNA, 594 bp, Morganella morganii
atgatagataagaaatatattttttatctttgcatgacgtttatgagctttgattcatctgctaaatctatttttattggagatagcctaactcttagtctggcaaaaggagctcaagagcaagacgttctggaatattattatctggacagatccggactgatgaatgaggcattttatgactggctggcgttcgtgcaacggatgcctgtcagttccgctgatttaatcattgtgtcgctgggcgctaatgatggcatggcgacctctgccgctaacccttacagccaaaagatcagacagtttatttccgttttaaaaacacgttacccagcggccagtattatctgggtcttgcctccgtccatgaaaaacacacagacagaaaacacactggtgaatacccgccggattatttcagaaacagcagtaatcgccggttatgccgtatttgatccgcgtccgcttaccggctgggcatggacatattcagtcaacgggattgttctgcgtactgctgacggtatccactacacgccggaagccggtaaactgatttcagaacagatttaccaggctgtccggcaaaactga

SEQ ID NO: 292459 - DNA, 378 bp, Morganella morganii
atgaaaaatgaatttaatttcaatttattagaaaataagaaactcttgtcaaaggacgtctatgagagtattttttttaaaatgcttgaggtatctaaaaatggaggattatgtcaaattccatctatttctggtatgataaatatcttgaatgatgatatgtattatgttgctcataatttggtgtcttataaaggaaagaaagcgattttaaaaggaaaagtcatactcacatcaaaagatgatttaattgtttttttatataaatccactgaaattggtgatatgagagaattattaatatcaccactatttgacaataaaccaaattatgtaattagtatctctgaagataatatttttctttatactgaataa

SEQ ID NO: 292460 - DNA, 279 bp, Morganella morganii
atgcagttggttaaggcctctgcacatgaagcaacattcccgcacggtggttctgtatcccaatttgaaaagcactttgatgtaaaatatggtactgctgatgcagtagaaaaattacacaccaaaggatggttaaaaggtcgggtaccaaaagcattgaaaggcaagtgccagaatataaggatgctgtatatgaataatttttttatcaattgcgagaaaagcgttacaaaatctgatattgataaaatagaaagaaagttaaattacaatttttga

SEQ ID NO: 292461 - DNA, 336 bp, Morganella morganii
atgttaaataaagatagtcaatatagcttggtagatattatttccgatatgaaaaaaacagattttcgggatgataatttttgtttgtatggtgaaaatagcgatgatttggaattaaatggaaattactatgtatcagattatcctgatgtagatgatgataaggaaatatatcctcagatagttatagctaaaaaattaaattatttatattcagggcaacaatttgctgatgtcattgattctgttatagaacaaaaaccatcagcttcacctgacgattttgtgaaagctctaaattattattctaataatgatgattttcttgatttttga

SEQ ID NO: 292462 - DNA, 888 bp, Morganella morganii
atgggatataaatacgatcctgtacgcaaaactgtcatttcatctgaaacgccgtatggttttgagcaaagaccggattatgatgaattaaattatcaggcgactctggttaaaataaaatcaatactgggtgatgctacagatgatgataatgttgcggcactgattaccgttgaagaggccgagtatgttttaaaaaacaccaatacgtctaatcctttttcctcagcaaacgaggctttatttggtgcaggtgattttgtttccaattttgccggtaacatttatgaatcaggccgcctttcccgtattattcgtgaattcggtggtcttggcgttaaagccacggaatacgtcgggaaaaatggtaatgtttatattcgtttgtccggtcatccgggtgtgagggcttttcttaacggaaccaagtatttggctgataatgccaaaatactgtatatgggtgttggaaccttggggcaaaattcagtttcagtcggtgccacccgtttttcaattgtgtattctctggcttatcgtgtggttgagctgatatttaaagatgaatatacactcacgaatttttttgtgaatgtgacgatggatatggcaaagcttgcggtaagtatgaaactgggtgcgatagttgttggtggattaatgacgagcaccagtttggctggtgctagtattataaccatatcggctggtattttttttgtcggtcttggtgttggtattattttatatgcgcttgacgattatttcggaataagtgaatctattatcagagaacttaaaaagcagcgtaaaaaaaggtctgatggtgaaggtcgataccatgctgataattttttcacgaactttggcaggtacagccgtggatga

SEQ ID NO: 292463 - DNA, 906 bp, Morganella morganii
atgaattttaaaaatcaagcatatgaagacctagtccgagatttgatcagtgatgctttttatcttgaatcaagatcaaatagggggaaaatttctactattcggcaatatgcagaagttgttattcgaaaattaatagacttgcctcaaaatgaaaaaatgactctgggtgagtatgacatagtaaaaaagttaaaagataagactgcaaatgataggcaaataatgggcgcacttcgcaagctacaaaagcttgggaataaatgtactcatacaaatactcttggccctatttcagatgatgatgtgaagtcagcaattgatgcgttatttaatctctatgctggcttatttatattgtattttaagaaacatacttttggttcaaacaatgaagttgtgagtgtattttctattttaccgccaatcattagatacattgttcttgacaatctatatgtcattgataaaagtaatcttctagttattgataagctttgtttagtgttactaaaagcattcgataaagataatgcgatgaggtggattgatgaaagaaaagaagacttgtcaaacactctaccgtatacagaaaaagcaatagcagaaattgaagcaacttgtggaaaaaattacgctgagcaggttgtagctaatgcccctaaaaatatgtacgtttgttgcctagaacgattggaggaagtatcaaaaattatagagcaaaaaggacttctctataataattttgaacaagccaaacctctctacttaaaaaagggcattcttgatgctaatacaccagaaaatatagagtttaatgacataatggaatttgtctaccttggccggaaagttgacgataacgaaaacctaaagaatctacaccaatataacactttgatataa

SEQ ID NO: 292464 - DNA, 933 bp, Morganella morganii
atgactactaaatatcttatcgagagtaacttatcagagaaacagattgaagctgatgttgcaacattctttggcatgtgtaccatcgctacaaaatccgtcaaagcattcaggctcttagatattgatgaacagaaaacaggagctgataaattatttgactgtgcaactccaatttatatgcaatttaaaaaatcgcgcggcttaaggtctgtgcatgaagtatcaatatcctcacgaaaaaacagaagtaaattagaagatatccgcaacttcagagatataaataatttggaacaaaacccatctctttattttaaacttcataaaaaagcaaaaactgccaatgaattgcagcataacatactgctgagttatgaaaatccaccttggtcacgtgctatttatgttgcaccattattgctagacaaagatgcctattacaacgcgttatgcaaatcagcacccagaattatacacactcctttttttgatctaaattattctatacatcagcgcaattggattagctattttggtttggctccatttctgaaagaacacatttctatcccgccacatgaacgggtttcaaatgataatcattactatgcatattctgagagtggagttgatataagctggcattctcctcaagttattaaacaagaacctagtaggctttctgatttttataacaatttattcaatacagtaattaataatgaagaagcaatgcttccacaaaaagagttagctgaaagaataaacagaattagtactgagtttggatatcaacctgataaaaatgatgattctccaatttctaatttaaaaaaacatggagattggttgagagaaacatacaatattaggcagtttattttgtttggtaattccaaattaattagtgagttacgagataatcgataa

SEQ ID NO: 292465 - DNA, 288 bp, Morganella morganii
atgatgaaaagtatcagcgaagtattaagtgcagacctgccatcacgccatttttgggcactggagacgttaccggaactcggagttgtcgctaacgtggatatttcagtaggagattatttcagagtgagagagcgtgacgaccgcgggtcgttgtgctgtgaatttctttgtgaggtaaccggtataagggatcgggagtctgctgcggttgcaaataaggttctgacggttgcattcgcaattaaggaaattacgttaaggctgcaatccgatgatgaaaaataa

SEQ ID NO: 292466 - DNA, 150 bp, Morganella morganii
atgaatatccgttgtcgcctcggtattcacaaatggacggtgttttgtaagtcaccgcgctatcacgctgtaaaaagacagcgctttcttgtgttgaatctcggttgtctgcgttgcagtaaaaccaaaattattacgagggttcaatga

SEQ ID NO: 292467 - DNA, 222 bp, Morganella morganii
atgtctgatgaaatcgaccgcgcgaacgaccacgccgcacttgtactggagagccagataaacgccgcccgggctgttgttagtcagccgtccgcgttcgagtgtggcagctgtggtaagccgattccggcggcgcgccgtctggctgtgatgggctgcacgatgtgcgttgactgcaaggcagtttttgagctgaaaaataaacattaccggagcgtgtga

SEQ ID NO: 292468 - DNA, 222 bp, Morganella morganii
atgaaaattattccggaaccgatatttacccctgttgcagaaactatcaaggcaaatcgcgaagatgagcgcaaaacgctgatcgacgggttcgcatcacgtcagcgtttaatcgcatcaaaaatcctcagtgaaaaactggactatgccgccgcgcatcagctgctgatgtgtgatgccgagcgttttgagaacgaagcgggagagctgaatcatgtctga

SEQ ID NO: 292469 - DNA, 558 bp, Morganella morganii
atgacggtcattattttcttaattacgaattacttaattgctaagtctgtcggaaatattgatgtgactgctttaatttggttcatggcctcaattaaacgaatctgctcatcctcgtttaatgatttaaattcagaatcgtgctttgttttgtcaataccagctaaaaagaaaatagcgcttaacactcggctgttctctctttctctgttatttgttctgcaccgcatttctttaagaaatacggccatacctgcatttatttctttaccgttaatactaccgtttttaataaacagcgctccgcgcactttggccgcccgattcaagccgtctatcttttcatccagtgaatacgaaacagcccggttccatgcagcaggccgatgttccggcagtgtcaccctgagattttcattacctgatgtgttctctgctgtttccacccggaccgccttatttatttctgccgctgaacaggctatcaataaaccacgttgcctctgccagtgcatcgaacaacccgaaagaatcctgcccgtcatacccgttacttaa

SEQ ID NO: 292470 - DNA, 222 bp, Morganella morganii
atgagtgacggccggtatcagatagttcggtacaaatcgcactgctcgttataccgcggattcaatatttataagttgccgcgcaataagacaagaaaagtgacgcagtaccgggtggcattaagtaacgggtatgacgggcaggattctttcgggttgttcgatgcactggcagaggcaacgtggtttattgatagcctgttcagcggcagaaataaataa

SEQ ID NO: 292471 - DNA, 1641 bp, Morganella morganii
atgtctcaatccattatcacggtagcttttgagcaatggaaagcacaggaagtgcttaccgggaaaataatcacactggatgaatttgtatttgcgtatgtcccggggttggatccgtcaaaacctattgatcggaacgaggggttaccaccgtcagcacaaattaaacaccgtcaggcagtaaataaaaccggggtcgtaaataataatgcagttgcttattctgtcacaatcggggcaaatgttggtgattttgaatttaactggattggcctgctgaataagcaatccggcacggtggcgatgattgttcatgcaccagtacaaagtaaaataaagaccgtggcagggcagcaagggaacgtgttaacccgttctttcctgctggaatatgtcggtgccgcaaaagaaaccgccattaatacccctgcagaaatgtggcagattgatttcactgcgcgattatccggtattgatgaaatgcaacgccttgtcagtgctgatatttatggcgaagcggcattttttggcgacagttttttagtctcaaaaaaagataatcagttttttgttaccgccggaacgggatatatcggcgggttacgtgcggtactggaaagtaataaaaatattacggtcccggcaaaagcggtgaaagtgtgggctgatgtcagttatcagggaaatatcaccagccagtggcgcaccatggtgaaactgaccatagcggaaaacgctgtaaattatattgatgatacaggctttgcacattatgtgtttgcggtggcatcggtaactgctgacggcaaaattacagatctgcgacctaaagactcactgaatcaacagcattttgatgatgcgctgaaaaagcatgaaaaatcgcgtaaccatccggatgcaacactgaaagaaaaaggctttacccggttagccagtgaattaagcgacagtgaatcactggcagcaacaccaaagatggtcaatgacgtgtcattatctgcacatagcgcggcaaagagcgccaatgacaatgcagatggcagactgccgtcagggggaaccgctgttgctgcaaaaaaactggagacggcacgaaaaatatcgggtgtattgtttgacggaacgaaggatataacactttccgccagtgatgtcggagcagcgacacccactcaggttaacgaagccaaagaagccgcagcaacagcacaaaaagcggcgggagctgccaacgataatgctaatggcagagtacctaatgcacgtaaagtgaataacaagtcactgaacacagatatttcactgagtgccggtgatgtaggcacgtatacaaaattagaaattgacagtcgtgttaacgggaaaggtgttaaaaatacagcaagcaaagcagccgccggatggtggaaatgtggtgatacgggaattatgcatcagtgggcaagccccgcatggagagcaggccagacacttaatttttcattcccggttgcgtttccgaataccgttcttgcagttcttattacagacagagccggatatcagtcaatgggggcaataaacaggagccggacaggattcacattatcaggaaatcaaaatttattagattttagttattttgctataggttattaa

SEQ ID NO: 292472 - DNA, 432 bp, Morganella morganii
atgagtaatgaatattattttagtgcctcagcaaatgcattttttccgtctgtgatgaaggatgattacattgctgccggttcttttccggaagatgctattttggtgaatgagcatgtatataatgaatttgccgccgatgatccgccggaaggaaaaatgcgtggtgcaaataaaaaaggaaaaccagtctggcttgatattccgttgccaacgccggaacaattaatcgaacagtctgaattatacaaacggatgttaattgctgaagccaaccaacaaacccagctctggcagacacagttagcattaggcattattactgacgaagatagaatcatcctcacaaaatggatgctgtacgtgcaaaaagtccaggcggtagatacctcagccgcccctgatatcatctggccggagaaaccggaatga

SEQ ID NO: 292473 - DNA, 762 bp, Morganella morganii
atgaataaaatttctttaaaagttataattctttgtatttcgtttgttagttttatacttatttcatgttttgtctatgtttttgggggggctggtttatctacaagtatggaaaattggggatattttggctcgtttatttctggaatatttagtttacttagcatatcactgctatcttatactttattaaaaagtcaagaaagttcggaaaggcaaatcaccatgacaaatgatgatatgcgttttaataaatttttaattttagtaaatatattacgagatagtatcgatgatgtatctagctggtcttatttaaccctaggtactaataatgttttatcaacccatacgccagaagagttttatcaaaagatagacgatgataactttttagcagcgagagaaataataaaaaaaagtatcgattcgggggaggtagaccattttgctatacggaaaaaattatatgttttttatggtgaacatatagttagaaggtatcatagcatttcgaaggataggttttattctgtgtttcctgttcttcttgatattttaaataactgcaacaaagatgataaaagtatattttcagctatattacatagtagaatagagttacgtgaaatttttgttttaatatgtatatattgctatgaatccaaagatgaggggttattattaataaataatattagagatcaagaacatttaccttttcttgtcgattggaaaaattatatcaaagattattgttaa

SEQ ID NO: 292474 - DNA, 324 bp, Morganella morganii
atggtgttgtggctgtttaaatgcgaaacacctgagatattacaaattattaccacaatgtgcctgttcacaagtttaaagcgtaaatgtaaaataacacgtatcgtgagtaaattaaggttcaataatagtttatctgataaaaaagacagaatatgttgcgttatgcagaaatatcatgcgaatcatgatgttgaattgtacattatagcagggttacagcgtattatcggcatttatccggaagactttagattttccggggggtgcgataaaaacagaaggacggaaatgtcaccatttttcattctgaacggggaataa

SEQ ID NO: 292475 - DNA, 912 bp, Morganella morganii
atgtttgaattttttatgggaacaatgttcccggctaagctaaaaacgcaaaaaatcacgtcttgccgggaagactctcgtcttacgggttccccggaagacagcccgtatttgctgaagataaatcaggaacaatgtcaaataaagtccactaactttaagcatcgaaaggttgtctcaattcctttatttttagttgtctttgctacttttatttttttgatgaattcttttttcgagagtcattattcaaattatgagtcatttatttcagatgttgaaatatataaagagtatgatgaaaactcaagagatccacttgagggtacagaacggtatcgtcctttttttgataaagaacccggcgtatttgattatttaatatcttactactccgggaatttttatgcaggaacgaagtatttaatatatttaacgatactactggcattcggatttggttattgcctgtatattacaggtaaatcagctttttttggaccttaccccattttggtcttagacagaaaacgtcaaattttgtatacatgggaaaataacaaagtttatatggcccgctataaagatgccggatatgcaacaccaaataataatttatttataaaattgttttcgtttaatgccgaaaaaaacagactggacacgattttgtttcaaccgaatgtatccgaccacagtagcttatttctcagtgaaaaatatgaaaataatgcatttattagttttattaacacgtatatgcaaaaagggcgtgatgccattacagatcataatttcgaatgtgagccattgacgctttattttggcagctataatcccccggcggatgctgacagccaaatagcgaatacagtaggtatgctggataaagagacggtttctgatgcgtag

SEQ ID NO: 292476 - DNA, 1344 bp, Morganella morganii
atgccaaaaggtaaggtaattacactttttgaacatggatatcttgtcagcgaacgggataaagataaggcaaactatgccaggccgctgcctgaaccggcttttcgatggctcgaacaacgttgcctgaaagataaggatacggttgaccagcggctgctgacactttgtgtacgggcaggtgttaaggttttacaggtaaaaaactatgtaggtgttctcgctttgccgaaaggtatccgcattgaaattttaccaaaaacagggaagaaggatcctgatgccggcctgtcccgcactcagttgctgatgatgctgcgtacattgaaaacatttcgctgtattgccagcacagatacattcatatccacatcaaaaatgacattaccggatatttttgttggccagtttattcgtagtcttcagatattactcaaaaagggaattaaaagtgattacctccggcaaagtaaaaatagtgcctggcttaaaggtaaattactggtcagtaagcagataaaagcaaacagtattcggcgtgatcgtttttttgttgaatatgatgaataccgtgttgaacgaatggaaaatcgtatattgaaaactgcggttgaaaaagtatacgacgaagtttacagccctcagctgcgtctggggttgcgtaaatttcgtgacttatttgaagcagttccgatgataagtgatccggcaattgcgttcagaagtttggtacctgacaggcatatgcagcattatgcacttccactcgagtgggcaaaactgatcttaaacggaaactcacctcactgcatgagtgggaatgctgaggctgtatcattgctatttccggcagaagctgtttttgaggcatttatttcacagtggatgagacatcatatgagtgatgattggggaataaaatgtcaggccagacaacattcacttacttattataatgataagaatttttttcagctcagaccggatatattattggtaccaaaaccacatacacagggtttaccacagatatgtgatgcaaaatggaaaatcatcagctctgaagatggcgggataaaaaaggccgggttatcacaaggtgatttttatcagatgtatgcctatggtatgaaatatctgaacggaaaaggaaatatttttttgatttaccctgctcatgaaggttttaaaaaaccataccaatcttcattcatgtttaattctgaactgagattatgggttgtaccttttgatctgaaaaagagtattcaggattccggtaagatactgcgacagtattttgcagagatttcagaatcagcgggtgctgaaagaatcgtttaa

SEQ ID NO: 292477 - DNA, 1689 bp, Morganella morganii
atgaaaagcacgctgaatagctttaaagagattaaattactagaacgactaaagtcgttcttggaaaagggaaaggaaatcggcattgagattgatcccgcatttttcagtaaattgcaaagtaatttaaagaaggttgagggtgataaactaaaagttgctcttattggtggcttctcggaaggtaaaacatccattgcagcagcttggatggaaaagcttgataagtcgacgatgaagataagccatcaagaatcgtctaatgaagtgaaagtatacgaagtgggtagtgactttgtattgatagacaccccaggtttgtttgggtttaaagaacaagtcaatgctgataccaataccctagaaaaatacaaagacattactaaaaaacatgtaagtgaagcgcatttggtgctttatgtcatgaattcaaccaatcccattaaagaaagccacaaagaagatttacaatggttgttccgaacgctaaatctattgcctcgaactatcttcgtgctgagccggtttgatgaagttgctgacgttgaggacgaggttgactatcagtccaatttaaaaataaagcgtcaaaatatcactggtcgtcttcaggatatgattgacttaagtcatgaagagctagaagcattatccatagttgctgttgctgccaacccctttgaccaaggaatagagtattggttaagtaatattgaagaattcaaagcgctttcacatatttcaaatttacaagaagccaccaataaaaaaattcaagcatgcggaggagtcgatgaactagactatgatatgcgttctagcatcataagtgatgtactttacaaggaattgccggttgcaataaaaacggatgaaaaagtgtcagaagaagttgaaaaattaaatggattacaaaaacgattagaggaccagttacaaaccactgaacatcaaattagagtgtcaaggacgaatttgagagactttattacaagttacttcacagacctgattatgcaagttaaagggtgtagcttagcgacatttgcagacttttgtgaacgtgaaattggttccgaaggaattgttctcaaccaaaaattgcaaagtgaatttgatagacaaataggggctattacacttaatgttgaaaaaatgaacgcaagttttgatggagaagtaaagcattttaatacgacggtgagagagctaggtaaaagtggtataaattacgtccttaaaggtaactttattaacaatcagacggtaattgcaacacgagatggtatcgtttcggttgctaaaacaattggctttgacattggtaaagctctgaaattcaaaccttatggcgccataaatttagcaaagggtgtaaacggagtgttagcctttgcaaatattgctctagaagtttgggattcctatgaccaatataaaaaagaacaggagttcattaaagctgttggaaaaatggaagaggatttcaataagcaaaggaaagagttgctagagttagttggttctgatgagtttaaacaaaagtttttcccaacctacatagagctaacaaacaagttgcacgaactaaatgagaatattgcagcaagcaacgaacgtaagaatctctttgcaaattggcgtgaagaagcgcttttgattgaaggcgaattcaaagctttagcgtaa

SEQ ID NO: 292478 - DNA, 2406 bp, Morganella morganii
atgaacataaaactagaaaatcctaaagacatttacgacaaaatcaatattgaattgttaaagctagtcactagcttatccttagagtcatcagatgaatcactcaacaaagcacaagaggatgcacgcgataaaattgttgatcttcaagttgagttaaaaaacaaactagaagagcttgagcgaaactcggagtggaatacgtttacaattgcattttatggtgaaacaggtgcaggtaaatctacactggttgaaacgctgcgcatacttttaaatgagcctacaaagcttgaaaaacgcgacgcattccgaaaactcaaacattcttatgatcaggctatttgtcaattaccagaaatagaagaaaaactttctacattagataaagatttagagcagctaaatgagcaactaaattcgctgtccgagcaatatcaaagagaagaaagtcagttggagcaggagtttgaagtatcagaaaaaacactttgcattgaacatcaaaaggctgcagaagcagtacaagctcgaaaaagcgaactttcaacccttaagggcaaagttgccgagttacagcggtcaatagttcaaaagaaagcacaagcatcattgtggcaaaaaatagtaaatattttcaaaaaacttccggaagagcatgagtttttaacagctatctcaaatcttccaaaacttgaagatatgcatgttgcagaggaggcgaagttagccgatgcacaacaaaagctgagtgagacacgctcgttacgcgaagaaaggcacgctgattttataaaaaagtttgatctttctataaaggctttggagcgtgagaaaggtctagttgaacaaaccaagagccttgtaagtcagcaacttgagtctgcctcgaaacaagttgctgctttggagcttgagctgaatagttgtgcagacggtgaaattattggtgatggtcgagcggactttactcgtaaaacgttaagttaccgctttgatattgaacagtgtgattttaatctacttgacgtgcctggcatagaaggtaaggaaggtcttgtagtcgatgaaattgaaaaagcggtacaaagtgcccacgcttttttttacgtaactaataaagcagctccgccgcaaactggtgattcagaacgccaaggcacattagaaaaaattaaaaatcatttaggcacacaaactgtatggtcaatttttaacaaaaaaattacgaatcctaaatttgcgtttaagaatactgagctccttaccgacgatgagcaagcaagtttagttgatatggataacaaaatggctgaacagcttggtcgtaattaccaaggctcatttccattgaccgcattgactgcgtttatcgcctcgaccgattattttgctccaaattcggatatgttgagaaagcgaaataaatttcttgaggatttttcagctgaaagtcttttagaacgttcacagttaagtgcgtttattcagttattaaaaaatgagttgttacttaatggtcagagtaaaataaagaaagctaatttcaataaggttaaaggtgagttagaacgtactagtcatcatttagataatattgaaaaagtttataaagtggtggcggaggatgttagtggtaatagtgaaagtgcgtgccatcaattgcaagctagttatgcaattttaaactctcagctgtatggcaaaggaaatggtcttattagatctgctgtacaaaataccagaaagaatatatacagtgaaatcgataaagatgtcagcaatgagcagtttaaaacaagccttgaaagtcaagttaataaatgtgttaacgacattcaggctcaattacctaatgtaattgaaacgtctgttaaagaatttgaatcttctgcagtgtcaatttttgaacgctttagtgagttaagtgaggactttttgtctgttgcaggtcagcttggaaaaagcaaacttgacgctaagttcaatataaaactcaagatggatagcgggctcaaaaaaggtgcactttttggtgctttaataggagctgcgttggccccattcacagcaggtacaagcttatggttagctggagcagctgcgttttctgccgtacttgcttttggaaaagctatatggggttatttcgataacgatttcaaaatgtctgaacagaaaaaggctgctgatacgaatctacgtaatttagaagatgaactaaaaaaagcactgcaagatagtttggatgaaggtaaaagcgatatgcaagcttcaatttacaagcttgatactgaacttagggcaccagcaaaacaggtggtaaaaactaaagagttacttgagcgctcgaaccaatcattgaaattactttcgaagcaaattgatcacattggagaatattaa

SEQ ID NO: 292479 - DNA, 423 bp, Morganella morganii
atggctggttgttttggttcaagtcctttatccgcgggtatcagtagtcaaacaatcactgagaaccatttttctgatacttccctgccaccgattccatgggaaaagattaaagattttttctttgaaaatcagcatgatactgtatcccctttcttctcggagttttgccgccctgacccgaaaatatccagaaatacccttgaaagcctgttttttcagctcatagaactggcggcaccaggatataaaaaccactttaccgtggaaggaaacagttcgtcagaaaagtgtttttaccgtattaccgataaaaagggagacgatattgtgtcagtttatcatggacctataagagtcggtgatgctaaattttcatgggatcaggtaatatgcttacccggtgtgtcatataatccctga

SEQ ID NO: 292480 - DNA, 1251 bp, Morganella morganii
atgttggaagtcgacaaaaaacgcgaagcaacagcttcaattaggggctatttctaccagctcgatgcatcgttactcgaaatcctgaacgcgggcctgaacgagagcgttgtcattgagggcattgaagacttcgaccgctacaccgatgaaggtgtcatttacggccaggtaaaatactacgcggagcagaacttgacagactcggtactgcgtgatcctctgtataagctctttgttcattttcatgggctcgaaaaagcacagcgggcaggccgaaaatacctgctgtacgggcacttttcggaagttaagatcgatattggtgagctttccgtcgagcgctttaaatcggtgatggaataccgaaaggaagtgaaggccgctgacggtacaaaatcctacgaaaagaagtcgttgctcgacggcatgaccgtgccagatgggctaattgaggcgttctgcaagagcttcagcatacaaatttcgacggaattttctgaacatcgcaatctcgtcattgaggcaatacgggaaaaccaaaacgtctccaagtttgaggccgaaggttttcattatccaatggccttcgactacattgccacactcgccacgaaaaaagatcacaacgaccgtaaggtcacccgtcttgatctgcaggaactgctcaaaggtactcaagccatacataatcgttggcttcttcgggagaaggatgcaagcgagtacgcgaagcatatgaaacgcctgtacttctcgctcacgaacggcgcaggaatcgtccgtgctttcatcattgaatgcaatgcggcaaccgacggttcggttgtctacgaccaactcagagcaatcggcaacaactggagttcggctaagcagcgccgcatccagaattccgagcgctacgcgccattcatcctgttacgtggcgcggatgaaaaacttaccatggaagtgaagaacatgcttttcgatactggaacagttttcgtagatggtttcccatatcgcggatcgccattccgtatcgatcacgttcatagccagcagacccaagagcaccaaatcgaaattcgttttgttgacgacgttgaccagttgctggaggtcctcaatggggtggagcggaagttatgccatatatacgacttcttccttgaacgccctataaccatggaactgccgggttcaaagagtcggatgtattcgattcccatcagtagtatctccacaatcacgaaaattatctga

SEQ ID NO: 292481 - DNA, 1740 bp, Morganella morganii
atgactgaaaaaatcgccaatgctgaggttgtcgccgtttaccccaacaaagtcagagtggctgtcgatgatcttttgaacttccagtcggctggagagtctcttcgtgttgggtcctttctcaaggtgtcggacaacgacaacgtttctctcatctgcatcatcgaaagcttttcaatagagatgaaagaggtgaaaggcgacggcagcagtgactacaagcgcgtttatatgattgatgcgtatcctcttgggacccttaaagacggaaagttcaatcgcggcggtgacgaactcgccattccaccaaagaaggtcgtcccagcgacgaaagcggaaatcgcagccatctatgcagatagctatgctgctgaagaccgcttttgcttttcgtcattgactaggcaacgtgatatcgctgtacctgttcatggcgaccggtttttcaacaaacatattgctgttgtcggtgcttcgggatcaggaaaatcgtcgagtgtgtcgtcggttctgcaaagggctatatcagccaaaacaggcgaataccagggcctcaacaactcccatatcctgatatttgatcttcattccgaatatgccgcagcgtttccgaaagcaaatgtcattaccgtcgatgatctcgtcctgccatattggttgctaaatgaagacgagatggaggacatgtttctggagtcaggtgacaataacaattacaatcaggaggcattgctgcggcagattgttactatcgcaaaaaagatcagtaatcctgatgtagagaaggtcaattttgacagtccacttccatacgagatcaatcatgtagcgaatgcgttcagaaatctgaccagagagacaaagaacgctgacaattctttgctgatcaagttcaaggacaacacggaaatcgaattccctgacgtcgatgtccagatcgaacactattgcatggaattgcgcgatttcgcgccgacaaaacgtagtgagattaataaagggccgtatgccgacgggacaatcgacaagttcgaacgacgggtcagatcaaaaatcgcgaacacacgcctagggtttattttcggcgaaaaggctaaaaacgcttctttggaggatgttcttagacagttcactggctacaacgcgggaggtgagtcgaatgtcaccatcatcgaccttagcggcatcccttttgaactgctcagcatcaccgtttcgcttatctcacgtctaatgttcgatttttgctactatgcccggcgcgttgaaagcaaaaccgaacagccattcctgatggtctatgaggaagcgcacaaatatgcaccgaagagcggtctttcccgctataaggcttcactggctgctatcgaacgcatagccaaagaaggccgaaaatacggcatcagcctactgatttcgagccagcgaccgtctgaaatttcagaaactattttttcgcaatgctccaacttcctggcgatgcgtcttactaaccctgatgaccaaagctatgtccgccgactactgccggatacgcttggcaatttgaccgagggaatgcccgcgctagagcaaggggaggcgcttctgatcggggacgccgtcatcatgccgtgtgtcgtgtatgttgagaaatgcgaccccgaaccttcgtccagtgacgtgaaatatctcacgctctggaaagtggagtggaagaagatcgacttcaaaaaacgcgctgatagctggcgagggtga

SEQ ID NO: 292482 - DNA, 828 bp, Morganella morganii
atgaaaacaaattatacggtgtcatttaacactaatgatgcgctctgtttcgtcaaaatcaatgacatgttggttatgaagaatatcggagcagtcacgggagggtttgcaatgggacaaactattagttcgtacctgcaaaacggtaaaaataccttaagtattgctatgttacatgattccattaaaggcgataaaattgttactgataacatgtggtgctctgccaaaatacaggatgtgaggcagaacggaacggatgaatacgtggcggcggtgaagctaattgtccgtgacggtaagattatccctgacactggttattataatggagaaggtactactttcggaaatagcccgagactggatggagcggaggagggttttcgtgaagtatcacaaacctttctggtcggggatttacctatatggccatgggtcaatgcaagaccggtgaccgaagcagatatcccagccgtcaaagcgttttatgaggcgttacacaatgacatgaaacgtcaggatttaccggcaatttaccagaaaaccagagggatgtgggaatcactggccgctgaacagggcagtacaccggaaaaaatgtgggaatcaatgaattacaaagggtattttgagcagggctacaaagccgttcctatcgactggacgggatttgaattcagctcatacatggacggacggattttccgctttgagaaagggtatggcagagtgccgccgttaaagataaaaaaccgtgagggtaaagtattcatactcactccgtacctgtcaattatcgacggtaaagtcacggtggtaaactaa

SEQ ID NO: 292483 - DNA, 324 bp, Morganella morganii
atgtttgtcctgattgatactgcaattatcgtttctctttatcttgctatactttatttttcagatctttactcgcgggattttaatgccattggttttgtattaactgtgttctttgtgatttatatcattgtgacatttattccctctctttcggtaacagtccgtcgtttacatgataccggcagatcaggctggtggttattggccttattaataccctttggtggtattattatttttgtattttcttgtctggacagtcatcccggggacaacagatttggcccgaaccctaaaactaatcatcctgttgcaccgtaa

SEQ ID NO: 292484 - DNA, 264 bp, Morganella morganii
atgctgccggattacaaggctgtggaaaaacgcattgaagcggttatccgtgagaagttcggcctaccgccgataattacagttggtgttcactatgccgatctggtcatgctggcgaccgaaaagcgtgactttgaaatagacccacgaatccaatggccgatgctggattcagtaccgccacatgatgacatcattatccagccactaacaccaccgcaggcatatcaccagtttatggcgcgattcgagataattacttaa

SEQ ID NO: 292485 - DNA, 1200 bp, Morganella morganii
atgttgcctaaggattggaatcaagccacgttagaatctctttgtcatgcacctataacttatggcgtgttgaaacctggagagtactgtacaaatggaactcctcttttacagattaaagatttactcggaaatttggataatcaagaaaatatccacagaatttctgatgagttagattttgagtacagaagatcaaaaatccaagttaacgatattctcatttctttagttggaactgttgggcgcatagcgatcgttccagcaagtttggatggtgctaatatccatagaaatatagccagaattcgtacgaaaaactatgagttcttagttcactatttaaattctgatgtagcaaagaacagaataggattatcttcttctggaagttctcagtctgcattaaatctttcagtactaagagcattgaaagttccagttccccccctcccagaacaacaaaaaatcgccaaaattctctccacttgggacaacgctatttcagccaccaagcgactgcttgagaacagtcaacagcgcaaaaaagccttgatgcagcaactcttgaccggcaaaaaacggttgcctgggtttgagggtgagtgggttaaaaaacgcttaattgatgtagtaaaaatcgaaacaggttcatcaaagtctgcttctgttaatgataacggcactaatttcataattgatatgggttcggtaactcggtctgggaggctagtccctaccaaaagaacttcactagatggaccttatctagtaactggacaattagtaatgccgaaagatgatattggtggtggcaatatcataggtcgagtcggagtaatccctgaagacaacaaatacattttagctgatcatgtgtatgcattgactccattaggaggcatagatagtcattttcttggttatttaattaactcagatgttgtgaataaaagtcttcgtcgtaaagcaaatggtacagcccaacttggtctgggtagaaaggatgttgaaagacaagatattttaataccttcagatattcgtgaacaaaaaagtattggtcaaattatacttttgaatgaccaagaaaatgagcttttacaaaagcgcctcgatcacctcaggctggaaaagaaagccctgatgcaacagctgctgactggtaaacgtcgggttctggttgataccgcggcataa

SEQ ID NO: 292486 - DNA, 675 bp, Morganella morganii
gtgaatcaagataaattaaaaataaatgataaatacgaattcaatgaaaagtataagatgattgtaacagataaatttgattcatctttagaagagtataagcggatttatgttgtcaggtttgatttacgctttcctgttattattaacgatgattgtgatgatggtatctatgattattctgttgtgaggaataacaaagtcattactcgcttcttttcatcagtaaaaagtaaaataaaagccgagttaaacagacgatattctgaatctatgaagaaatacaaggctaaattaataaaacataaaccaagaagatatgaagatggtatgagatatgtatgggtaaaagagataggtgaggaatcagaaagaaaacactatcatgtgctgatgttttttaataaggattgtttttttaattgtaatataagcagtcgcttgcagcgcatcattgatagtgcatggaatagtgcgttaggtttatcagatgaaaaaaaacttgttcactactgtttctttcaatatgaaaacttaagcatatatgacgatgatattgaagagaaaaagaaaataatgctggattactatttttatttaactaaggaatacaccaagacttatgatgtaaaagaacgatcaattggatacagtaaacaaatctgtaataaataa

SEQ ID NO: 292487 - DNA, 3588 bp, Morganella morganii
atgatagagggagcgggcacctcgaagagcgagactgcgcagtttattgcggatatcagtaccgcgaagattcagagtgcggtcgtgactcatgatggtgtgaaagctgaccgcaaagcggaaaatgaggttctggtgactatcactgacagccgtaataatctgttagccggtgcgccggtgactatcaaagtgccgggaaccgcaggttatctgactctgcctgccagtggtctgactgacagcaatggtcagctgcgggtgaagatcaccaataccaaagcgggttctgaggagtataccttcagcatcaatgacagccgtgaaactgaagttctgacctttgttccggatctgtccacggcaaaaatcacgtctcttatcagtgataagcagaccattagtgccgacgatactgaacaggcaatgctgactgtgacggtgaaagatgcctttaataatgtgatcgggggcaataccgttaacctggcaaccacactcggccaactgagtgatcagagtgtcattaccggcagcaacggtgaagccgtctttacattgaccagtacccgtatgggggacgcgtctgtcagtgcggtgaacagtactgacgcagccggtaaaaccacggttgtccgtattaccccggacaccagctcaatggcagtccgcagtgtgctgttaaacggtgatcagaaaaccaaagttgccaacggtaccgataactttacctataccgccctggtgcaggataacaacggtaacccgatccgggatgttccggtgacggcatccgcagataacccggaagccgtcgttttggtaacagggactacaaacgccgaaggtaaaatcaccattactttagccggtaccaaccacgcgatggacaatattcttgtcagcgcggcgctggaggtcggggtgagtgtggatgcagataagagcgttaactttatctataacatcgataccgcaaaggtcagtaacgtcatgctgacaggtgatgttattgagaaagtggctgatggtgccgccagctttacctataccgcacaactggtggatgataacggtaacccgatccgtcaggcgggtctggatgtgaaatggacgcagaataagggcagcgatgtggtgctgtctgcggatatcagcaaaaccaacgaagacggtgtggcgactatcacactgatctccaccaccaaagcggcggatagcatccgcgtcagtgcacaatatggcggtacaccggttattcaggcggacagaacggtcagttttatttataacctggactccgccagagtcagcaaagtggatctggacggcacagtgactgaaaaaatcgctgatggccggagcaattttaccttcactgcacaattgacggacaataatggtaaccctatccgtcgggccggtctggatgtgaaatggacgcaggacaaagacagtgatgtggtactgtcagccacaaccagtaaaacggatgcggacggtaaagcgaccatcacactgacatcgaccaaaagatcggcagaggatgtccgcgtcagtgcacagtatgcagaaaccgcggtggtacaggcaaaccagacagtcagctttatcttcaacattagtatggccaccgtaggtacagtagtgctgaatgatgcggtgatggaaaaagttgcggacggcagcagtaactttacctataccgcacagctggtggacagcaacggtaacaatatccgcagggcaaatctggatgtgagatggagccagaataaaggtgcggcggtgaaactgtcttctgttgtcagtaaaacggatgcggacggtaaagcgactgtcacactgacctcaaccaccaccgcggtggacaatgttcttgtcagtgcacaatatcaggaaaccgccgctgtaccggcagataatacggtcagctttatctacaacctgggatcagcacatgtcagcacggtgacgctggacggtaaggacacgcaaaaaattgctgatggcagcagcttctttacctataccgcacaggtcacggacggcaacggtaacccggtccgtaaagccgatctggtggtgaactggacgcagaataagaagagtgatgttgttctgtctgcggaaaccagtaaaaccgatgcggacggtatcgcaacgatcaaactgacctcgaccaaaaaagcggtggacgatgtgcttgtcagtgcacagtatgccggcacggacaaagttgatgccggcagcctgatcagctttatctccaacctgggttcagccagagtcggcacggtgacactggatggtaaggacacgcaaaaaattgccgatggcagcagtttctttacctataccgcacaggtcgtggacgacaacggtaacctggtccgtaaagccgatctggatgtgacatggatgcagaataagggcgctgatgttgtattgtctgccacaagcagtaaaaccaatgcggacggtatcgccaccatcacgctgacgtccaccaaaaaagcggtggataatgtcacggtggaagcacagtacaaagataccgcgaaagtggcggcagacaagccggtcagctttatctacaacctgggatcagcacgtgtcagcacggtgacgctggacggtaaggacacgcaaaaaattgctgatggcagcagcttctttacctataccgcacaggtcgtggatgataacggtaacccggtccgtaaagccgatctggtggtgaactggacacagaataagaagagtgatgttgttctgtctgcggaaaccagtaaaaccgatgcggacggtatcgcaacgatcaaactgacctcgaccaaaaaagcggtggacgatgtacttgtcagtgcacagtatgccggcacggacaaagttgatgccggcagcctgatcagctttatctacaacctgggatcagccagagtcggcacggtgacactgaaagatgatgtgaccgaaaaagtggcagatggtaaaaatacctttacctttactgcacagctggtggatgagaacggtaatccggtcagtaaagacggtttggtggtgagctggacacagaacaaaggcagtgatgttgaactgtcagccacaaccagcaaaacggatgacaccggtaaagcaacgatcaccctgacctcgaccaaaaaagcggtggacgatattctcgttagtgcgcagtatgccggtaccgacaaagttgatgccggcagcctggtcagctttatcgctgatgaagccagcgctgctatcactgcgtctgtattagataacgggaaaatattgacgccggccgatggtaaaacacattatcaggtttctgttttggtgaaagatcaatttggcaatgtgctgaaaaattatcagttaacggtgacttcacctgtacttaccgaacctcaaacgttgagtactggtgtgaatggtaacgttataactgacatctcaagtcttattgcaggctcaagtgatgttcttataacatcaacaactaacccggcagttaaaactaatgtcacgttaaaatattctatagctgaattgaatttgattagccctgctctgtaa

SEQ ID NO: 292488 - DNA, 981 bp, Morganella morganii
atgagatatttaagttttactgtacttttttgctctttatttatttcaaagttttcattcgctttagcttgttatgctgttgttaataattctgatattgcaactgaaacggttcgtgttgacgatattataatacctgaatcagccgagaatggctcaattatatggaggtcggagatatacaacaggaaagtaaagtgtaatcaggcaggtgtagatgagtatgcatacttctatcctttccctaatataacaccggaagaacttcccaaggggatgaagtttggtcttgtttataatggaacatcttatgatttagaatcatcaggttcgaaaattaaaacagatatctacgtcaagaaaggtggagaggggaatgggaatataaacgttcaggtctatataaagaaaaacggaactatttcaggtggatataatggagatttaccagtttatcaattggatggagttggggggctgaatggcacaccagggtcaaactacagattccatttatcaaatttaagcaatatagtaacaggggattgtacatatacattgaatggtattcaaagtactaccccggttaatgtgaatgatgatctaatatcgaacggacaaacaatcagttcagttggttcaatgtctgttacctgtacaccggtggaaaagctgaaaaacagaacggctaatatggatttatatacaaaaagttcatccggcgataaattttttggtacggataaagatggattaggttaccaattaataatatcgggaagtacaattgcaccctccgtaacatcaggttcacccctgttagtaccttttaaattagatggcagtgctaaagcgtctattaacgttgaccaaaaagtatctctgctctctgctggtaaggattggctctatcagaatagtgaagtaacagcgaagagcaaaaatcctgacttacacatgaaattgaattcatttcaataa

SEQ ID NO: 292489 - DNA, 318 bp, Morganella morganii
atgcggatggataatggtccggagcttatatcactgacactggcacatcgggcggaagagcatggagtaatactggaatttattaaaccgggtaaaccgactcagaatgcctttatcgaacgttttaaccgaacataccggaccgaaatactggatttttatctgttccggacactgaatgaagtacgggagatcacggaacactggctgagggaatataaccgggagcgtccgcatgaatccctgaataatctgacaccggaagaataccggttattagctgaaaataacgaaatctcaaaaagtgtgtggaactga

SEQ ID NO: 292490 - DNA, 447 bp, Morganella morganii
atgtttaaaagaacgattgctgtaatgatgttcacattgcctcttattgcttgcagcgaacaaaaagagcctgatcaaattgctcctgccgggcagagcgaagcgttcaaacaggcacatcaatcgaatatggctttagattgggatggtacttacacagggaaactaccgtgtgctgattgtgagggaattatctatacattaacactggacaataacgattcgtatacattagtcaggcattatgaaggtgccaaaaatagtcaggatgatattttgaaaggcaagatcctctggaatgataacgggagtatcattacgctacaaggtatggataatgagccgaatcagttctttgtcggtgaaaatacattgttcaaactgaacggggatggtgagagaataaagggaccaatggctgatctctatatgctgaagaaagactaa

SEQ ID NO: 292491 - DNA, 483 bp, Morganella morganii
atgaattatctcagtgagtcttcacgggcttttatatccgcccccaataagcaatgtacaatgaaacatgtactgaccacaacagataagcacctgcgtgaccccggtactgcttttacctctgcccggagaatcagagacttattacgcctgaaaatgaccggatcggcgcaggaggaatttatggtcttttatcttaatcagcaaaaccgtttgattggctatgaaactttatccatcggcatcatgagcagtacaaaagtgcatcagagagaagtggtaaaacgcgcattatactttaataccgcatcaatcatcgttgcccgcacttattcatcaggagaaatcacacccggtcatgctgataaaacgctcattcaacatttggtgaacatattacagctggtagatatccgtgtgcaggactacctgattatagatggcaaccaaatattttctttcgccgaacactgtctgttatga

SEQ ID NO: 292492 - DNA, 822 bp, Morganella morganii
atgacccgtttagcctcgcgcttcggcagggcgaatattattcgtcgtgaccgcccgttaaccaccgaagaattatactgcacagtacccagtgtcttttcagcagaaaaacatgaatcccgcagtcgccgttacacttatattcccaccattaccctgcttgagagcctgcaaaaggaaggcttttatccgttctttgcctgccagacccgtgtccgggatgacagtcgccgggagcacaccaaacatatgttgcgtcttcgtcgtcataaccagatcaccggtattcaggtaccggaaattattttgttaaacagtcatgacggtaccagcagctaccagatgttacccggcctttttcggttcgtttgccagaatgggctgatttgcgggcaaacctttggggaagttcgtgtgcctcataaaggcaatgtggtggaaaaagtcattgaaggggcttatgacgtactgagactctttgaccgtatggatgaacaacgggatgccatgcaatcactcctgttaccggtatccgctcagcaggcgttagccactgctgcccttacgtatcgttttggggaggaacatcagccggtcactcccgtgcaaattctggcaccccgccgctgtgaagataaccgttccgacttgtggactacctatcagcagatacaggaaaatctgattaaaggcggattgtccggtcgtaacaccaaaggaaagcgttgtcatacccgcgctgtcagcagtattgacggagatgtgaagctcaaccgggcattgtgggtcatggccgaaaatatgctgcaattagcatcttaa

SEQ ID NO: 292493 - DNA, 318 bp, Morganella morganii
atgaagaaccgtatattacccgactcaccggctgccgtctggcagacgctgctgacttacctactcaggcagcactatgacctcactctgaacgatacggagttttgtgatgagcgcgtcattgaagcctgcctccgccgtggggtgtcgttatatgaggcactgaacgcttttgcggagaaatacgccctggtccgcactgaccggcgcaacaacggtatcactgaaccgtcacatagtatcactccgaccgatattcttcgggcacggaaagccactggtttactcgcatatcgaagaactcaccccaccagctga

SEQ ID NO: 292494 - DNA, 786 bp, Morganella morganii
atggccagtaaatacagaaaaaccataaactttaaaagtaaagaactctttgataaaatagagtcaatatcaaaagcaatgggatattcagaatcaaactttcttgaaggaataattcaggactggtatattaaaaacagaaaaaaagaacctcagacattaatataccccgtatacctcgaccgtaaaacaaaagaaataaacattagtagaaagcacatgataataggtatagcaagagaaattaattttcataaggatgaattatctctctacagaaatagaaataatgaaaatacaagaaatgcttttatatatgataaattgaaatatatcataccaatgatattaacagatttatatgatgctgacggtgttgatttctacactgttattatcacatcagcgaaaattcatattaaacataatattgcagataatgacccttataaactctccatggaaatagatattaatacattaccaatccccatattatataaaaacaaaatcattccaaatgaaataaaaaaccttgatataagaaaaataaaatatagtaaatacaaagacgaattaatacgcatgtataaaaataaaaaaagaagatacttaatcgcacatacagaaataaaagagggagcatacttcatagaagaaggaatattaagtgatagtgatatagaatcaattactgcccagcaagaacgttttaatctagttataaatagccaagtaatgaaagtaacatttgaaaacaaatacatcaagcgtctatttttgtaa

SEQ ID NO: 292495 - DNA, 660 bp, Morganella morganii
atggcagtacaacgtactctttggaatttctttcaagaaatcacatggaatcatcgggcaacaccagaagacttattagatcaagcaaaaaaaatctctgaaaaatcacatttattaaatgcagagtctgtcactcagttttattatgcaattctagagttagatgctaatagccctttagttaataaagtgattgaatcttggatttcttatttttggactgaaattaaaaagaataataaattggataacttttactttggaaaatatgagcctcgaatagaaattgaattgaataaagcaaaattagaattgcagtctcagattacagcatatgatgcttgcaagtacgttgtagaaaataatgcatggggtgctagacaaaaaattgcattaaatcaaacctccgtacatgatatggaaaaatttataagagagtgtgatattagtcagtttcgttttttcatggcaaaaatgatggatttttgcctgagaaaagatttatatgaatctagttttggagatggtatgaaaaactttattcaagctagtataaatatagttaatagctccgactctggacggttaagtgaaataataagaaagctatttaatgagtcaggtgctggaagtttattagataatcatgagcaagaataa

SEQ ID NO: 292496 - DNA, 768 bp, Morganella morganii
atgtcaatagaattgacaaaaaaacagttacaaaaattattactagatcaagataatagagtgattgcgttgtcaggaaaatggggaactggtaagagttttatgtgggagacagtaaagtcggattcttcagacaaagtggttaaggatgcgatttatgtatctttatttggagtttcaagtatagaacaacttaaggcgaagttaattcaaagtgctattcctgcgattgaagaaaaaaaaagattttggggaaaaacaaaaggaagtatagcttcaggtataaaaatactagaaagttttcacaaaggttttggagcattaaatgatttttcaattattttttctccaattttattacaaaaaaaattaattgttattgatgatattgaacgtaaacatgaaaagcttcacattgatgaagtattagggtttatagatgaatttacgcagcaacataattctcgtttcttacttattcttaatagtgatcaattagataagaaagaagtatgggatttgcttcgtgaaaaagtaattgaccaagaaataaaacttattacaacttcatcagaggcgtttgatatagcaaacagacttacttcatcaaattatagtattgaaatcaaaagtgctattactacttgtggagtaactaatattagagtcattcgaaaggttattaaagttgtcaactctatcttgcgtggaatcgaaggagtaacagatgatgttctttggcgcgttattccatctacagtatactag

SEQ ID NO: 292497 - DNA, 873 bp, Morganella morganii
atgcctcagaactatcactttaaaaacctcctgtcgactctaccggcttcattccaaacctcttttttcaaccaactcaatcacctaattaactactcccccaccatcggcctgatgggtaaaacaggggttggaaaatccagtcttatcaatgcgctgttccaatcctcactatcacctgtgagtgatatttcaggctgtacacggcaggctcaacgcttcaatatgaccataaacaaccacactctcacctttattgatttacccggcgtgggggaaagtatcgaacgagataaagagtaccaccagctctatcgtcacttattacctgagctagatttaatcatctgggtactcaaggccgatgatagagcatggtcttctgatgaacagtgttatcgctttctcactgagcaatgtggttatcaacctgaacgatttctgtttgtattgaaccaagccgacaaaatagagccctgtcgccagtgggatgaacaacagcatcagccctccccggagcaagcgactaacttagtattcaaacgagaagctgtaataaccgcttttaagccgcatcaccctgtgatgatcgtatctgcagttgaaaactatcaattcactgaattagcggagcaattaatacaggtgttaccggcacaagccagcagcggggtagctaggcaactgcaccgcccttaccggacgcaatctgtagaaacttcggcacgtaacgattttggacaatgtgtcagtgatatcgtcgatacgctgatagacatccttcccctgcctgtcttgataaaaagcacgattggtacagtcaaaaacagtatcgtatccgtcgctaaatccttgtggagttttttcttttaa

SEQ ID NO: 292498 - DNA, 966 bp, Morganella morganii
atggcacaggcaaaagaacgcaatattgaaatacgaacctcgattgattccaaatacctcttttgtgaggtcaaaaccaacggggtgccggggtatgataaccgggccagtgcgatggacggggaaggggccggtaccaccagtacaaactcctatatcgccatgagcaacggcgcaaatgacttaacggtggaagtgggggcgctggactggtttgctgaaaatgccgccgggattgagaataaaaacacatttaatccggcagcctattgcaaagcggagatgacactggttgattacgacaatgaccgggtggtgaaccttgccacgctggatatccgtatcaatgaacagggtcagccggaggcgtaccgtaataatgtgccggataagacggctgtttttaaagaaaccacctctcacccgaccgagttggtgacaaaaaacagagccgtctctgttgagcctgatatgcgtgcatacccggataatatgaccctttatcagtttacacagtctttttcggtttccggtctgccggactggcagtgggtgcattctgagccgtataccggcagtccggaacagattgctctgctgaaagaggcctacagcgaactgtggctggcgttaaaaaataaagacattaaaaaagtgagtaaactttacaccccggcggctgaagcctgggctatcaccacgcaaagtacagcagacagaattctggactctcaggattacaataccatttttgatgaaaaacatgcagaaatgaaaacaatagactgggacaacttttatattattccgatgaataacggtaaaatggtacagatggtttataaagaaacattatggttttcaccagtgggagtaagttacattgacgaagatggagatgagagctcattctttttttccccgatattctcactggtaaacggaaagtatattccggttatctga

SEQ ID NO: 292499 - DNA, 969 bp, Morganella morganii
atgagtcagccaagtccactctgtgtaggtatagatgtttccaaagcaacgctggacattgccgccagcagcactattgagcaattttctgttgccaatgatagtgacggctttgatttcatcatcgctgaattgaggcagtacgacgttgcccttgtgctgatggaagcgactggagggcttgaagctgccgtagcctgtgcgcttcaggccgaaggttttgagatcgcagtggttaaccccagacaggctcgtgactttgcccgcgcgatgggatatctggcgaagactgaccgcattgatgcacgagtacttacccagatggctgaagttattaaccgccatccggaacgagagcgctttattcgggctttgccagatgttgagcgtcaggttctcgccgcaatggtagtgcgcagacggcagttgatctctatgctggtcgctgaacgtaaccggctgtatcctgctcatcctcaaagcagaaaaagcattaatatcatcatgaaagcgttggaagatgaacttgcgcggatcgatgaagatatgaataaccacatccagaaccacttcaaagaactctctgaacggttgagtagagttaaaggtgttggcgctatgacagttgcggcgctgctggcagaggttcccgaattggggaacctctctaggcgtgaagtcagtgcgcttgttggtgtggccccggtaaaccgggattcgggcaccatgcgaggacgacgaaccatatttggcggcaggactggcgtacgaactgcactgtacatggctacgcttgtggcaacccgttttaacccggtgataaaggcgttttatacgcgtttggttgccgcaggtaagcccaaaaaagtggctctggttgcctgcatgcgcaaactgctgaccatcctgaatgcgatgctcagaaagaacgaagaatggaatgagttgtaccatcacgttgctccataa

SEQ ID NO: 292500 - DNA, 309 bp, Morganella morganii
atgtattggtcaataatattaggccgtagaactgttatgtttgaatggtttccagaatggactatttctattacgtttgctgctattgtaagtataatcgatggagtttggagcattttacgtcgcccactaaagcacgcatttaaaaactttcttcagtctgggtttatgaccctagtattaatcgttcctatgtttgatgtgctgacgtatttactaacaaacaaaaccattcgctaccaaactgaatataaaattacatcaccgggccgagcactagccgatttagtcgatgtgaccgcggtataa

SEQ ID NO: 292501 - DNA, 777 bp, Morganella morganii
gtggaagtgggggcgctggactggtttgctgaaaatgccgccgggattgagaataaaaacacatttaatccggcagcctattgcaaagcggagatgacactggttgattacgacaatgaccgggtggtgaaccttgccacgctggatatccgtatcaatgaacagggtcagccggaggcgtaccgtaataatgtgccggataagacggctgtttttaaagaaaccacctctcacccgaccgagttggtgacaaaaaacagagccgtctctgttgagcctgatatgcgtgcatacccggataatatgaccctttatcagtttacacagtctttttcggtttccggtctgccggactggcagtgggtgcattcggagccgtataccggcagtccggagcagattgctctgctgaaagaggcctacagcgaactgtggctggcgttaaaaaataaagacattaaaaaagtgagtaaactttacaccccagcagctgaagcctgggccgtcaccacgcaaagcacaacagacagaattctggactctcaggattacaataccatttttgatgaaaaacatgcagaaatgaaaacaatagactgggacaacttttatattattccgatgaataacggtaaaatggtacagatggtttataaagaaacattatggttttcaccagtgggagtaagttacattgacgaagatggagatgacagctcattctttttttccccgatattctcactggtaaacggaaagtatattccggttatctga

SEQ ID NO: 292502 - DNA, 825 bp, Morganella morganii
atggcggctgatattcagggtaccgctgccggtcagggcatggtcaaacccggccagatcgctgagggtcagggcactgttgtccgcgatccccacagccagatccgcaccgagtttctgtgtgctgtcgagggtgacggcggcactgtcggtcaggctgagcagtccgctgccgctgacattgttggcaaaaatgccctgataacccgccagttgcagggtatcgccggcggcggccagattcacactgctgtctttgccgaggttgtttccggcagccacacgcagcaggctgtcaccgctgaccagccagttaccgaggaaggcgctgttatcggcggtcatctccgccttgctgccgccggtgacagacaccgtggtgccgctgacgccgtacagcgcattgtgaatactgccgctcaggttgctgagaaccagtccggcaccggcggcatccagatgaaccgtggtgctgtctgcaccgaggttttgcgcctgcgatacggtcagtttgccgttgctggtcaggtgatgttcgccggtgaagctgcggttatcaccgctgagggtgacggcggcctgtgtgctgacctgaccgtcgccgctcagggcattcaccagggtgagattatccgccagcaggttcagggtgccggtgacagccaccgccgccgtgccgagggtgccgttgtcacgcagggtgacggaggcgtttttgccgatctgcgtggtgcctgccagactgctgttggcggcggagacagacagatcgccgccggtgacactgagggtgccgttaccggtcaggccgccggtcgccgatga

SEQ ID NO: 292503 - DNA, 414 bp, Morganella morganii
atggtgatctgtatgataaaaattgattacaacgcttatcgttctgttgaggccttcaatcgtcgcgttcggttcttggttatgcattacacagcgttaaatttcaaagattcagttaacgcgctatcgggttacagtcaggcaagtgcgcattatttggttcctgacccaacggataaaacatacaaagatgccggttttaatgacatgagggtatttaatcttgttgatgaaaatgacagagcgtggcatgcaggaataagcacctgggccgacagaacaaatataaatgatacctcgatcggtattgagattgtaaatgaagcgagtgataacaatggtcaattcagctttccgccttataatgatgagcaaattgaagccgttaaacaactggccttgaatattagatga

SEQ ID NO: 292504 - DNA, 510 bp, Morganella morganii
atgagaaaaacaacagtataccgcttgttaacggaagattttgtgcaaatagataaaaaattagaggaagagtttgatgctgaaaaagacacctatgaacgtgggaatatgatctgggaaagtgcttttagtgcatacaataaaaaataccaagcagctttgaagttaggggatgatgctaatacggctgaaaatgaattgaatgaacacatcttaaaaagaccagtaaaacctgttagaaaacgattaataattaacgatacaacgagcgaagggctcgcaaaggaattaggtttgggatatccagtagtgatgcttatgtcagatgaggcaggggaactgtttgatggaagtttatttcgaaaaacccctctgttaaatgccctttggtgtggagagacaaaaaccgtcactagggcatctagcgacggtttcacaattaaagatgctcgctttggaatagtgctattgctacaaccaatgttatttgacaagtatttagatgcttaa

SEQ ID NO: 292505 - DNA, 519 bp, Morganella morganii
atgccaactccgtgctatatctccatcgaaggcaaaacccagggcaacatcactgccggtgcctttaccgctgagtctgtcggtaacatctatgtgcagggtcacgaagatgagatgctggtacaacagtttgaccatatcgtcaccgttccgacagatccgcagtccggtcagccgtccggtcagcgtgcacaccgtccgttcaaattcaccgtggcaatgaacaaagccgttccgctgctgtacaacgccctggcatccggtgaaatgctgccgactgttgaactgaaatggtaccgtacctcggttgaaggtaagcaggagcacttcttcaccactgcgctggaagatgccaccatcgtcaatatcgactgtaaaatgcctcactgccaggatccgtccaaatcggattacacgcagctgattgaagtctcgctgtcctaccgtaaagtcagctgggatcacaccgttgcaggcacctccggtgctgatgactggcgtgcgccaatcgaagcgtaa

SEQ ID NO: 292506 - DNA, 438 bp, Morganella morganii
atgaccagaataacaaataaaagcattgcattatacgcacttttgtttttgtctcttgttttctacatagagtatatcacgccattgcaatcagatgactatgcctatatagaaaaagggatcggactggactctcatattcaccactatatgacatggagtggtagatttataactgactaccttagttctttcactcttatatatctcaacagcttttataaagccgcactaatatcgatatcattaacattaatgatatattgcatttacaaaataccaaatatattgacaggtaaagacagaaacccgctatcatttgttattatatatataattttttggctatccacgccaacgttaggcgagactgttttctgtatttattgttcttatctttttatattaaaaacggcaaagcactcccaatacttatag

SEQ ID NO: 292507 - DNA, 192 bp, Morganella morganii
atgaacgcatacgcagcacaggatgaagacttggaagtcagcgaacgggcaacggatgcctttaataagctccctcagcgccttctggatgaagtcagcgaggaactccaaaacgagatatggaattctctttatggggtaacggcggaaatcagggatcactatgctgccatttatcaacagcatatttaa

SEQ ID NO: 292508 - DNA, 540 bp, Morganella morganii
atgtccgaagaaaaaggaattattggcaagataaccggtgcagtatctggtgctggcgattacctgaaatcagcctttggcttggtaaaagaaattcaggaaatgcacgttgactattcagttaaagaaaaaactgatgaattattgagtaagttgcttgatgcaagaggccagcagatgaacctgcaggacttactaatatcggctaagaaccgaattattgaacttgacgatcttattaagcaaaaagaagattgggcggtcgaggcagctaaatataagcttgtcaaaacggaagccggtagctttgtttatacggcgattgaattttccgactctgacaagaattccccctatttttgtccccattgttacagcaaaaaagaaatatctctgcttcaccctagcccatctgaaattcataagggcgggtattacctttatcgatgccataattgcaactccgaatttaaaatgaataaaacagccttccatggcggttccatgcctgagccgttagcgtcactaaaaaggtattga

SEQ ID NO: 292509 - DNA, 348 bp, Morganella morganii
atgaacaaatatcgtgacaaatcagactttgagattaataaggctgtggctgaagttattaaccccggaaagatattcactcaggcttactcattcggtgatacctgcggaaactcagtgcagtggataggtggctatgctgaatatattcatgtcgattattgcaacaatccatccgatgcaatgccgattgttattgagaatggtatcagtcttatttcagactggaacgagattggcgtgtggggtgcgacctatcagccatggtggacatcagaaaataaaaacccactacgcgccgctatggaagtattcctgatgatgaaggatgcggagaatgaaagctga

SEQ ID NO: 292510 - DNA, 300 bp, Morganella morganii
atggaatttaaaggcacaccggggccgtggtacacaagcaatgaaggccggttactggtaagggatgaggaatggcaatgcgttattgctgacagtatcggatgtaacggtgaagaggaagaagtggcgaacgcccgcctaatttcggcagcgccggaaatgctggatgcgttaattaaaattgtcgaaatgaaccagcagtatgcaatcgacaaatacggcgacgtgagaaaggcagaagaaatgtcctgcgtacgaacggccagagcggcaatcaacaaagcacttggctgcgaatag

SEQ ID NO: 292511 - DNA, 561 bp, Morganella morganii
atgatttacggctatgcccgagtatcgacaaaccatcaggataccgaacttcagcgttcagcccttgagttagcaggatgtgctcacatttttgaagagcatgccagcgggagaaaatctaaccgcccggtactgaaacggctgatcgccactatgcaggctggtgatgagctggtggtctggaagcttgacaggatcgggcgcaatgtcctgcatgcgctgttgatgttccagcaactacaggaaaagggtatcaatttccgcagtattaccgatggcgtggatctcaaaacagctagtggacgctataactttcgtaacatcctctccgcagcacaatatgaatcagacctgaatagcgagagaacgctcgccggattggcggtagcaagggctaaagggcgagtgggcgggagaaaacctaagttcactgatgagcactgggagctatttaaacgtgagattatggctggtcattcacatcgtgacgtatctgttaaatacggcgtgagcctttctacgttatacaaacattaccccgttcaagctatgggcgattga

SEQ ID NO: 292512 - DNA, 426 bp, Morganella morganii
atgtcacgaggtatcagaaataataatccgggcaatatccggcacagtaaatcgaaatggcagggtttggccggtgtacagactgacagtcagttttgtacgtttattgcgccggagtacggcattcgtgccctgatgaaactattacgcacctactcaaaatatcagggtaagccgggcgcgggatgcgggaaaattgataccgtggaagaaattattgagcgctgggcaccaccgaaagaccgtaataataccgaagggtatattatccgggtctgtaaggaaaccggtctgggtcgccgtgactgcctggatgtttacgataaacaaaccgcgttcagactggcaaaggctattattcaggtcgaaaatgcctcacaaccatacgccgatgctgtatttgaacaggcatggtctctgttatga

SEQ ID NO: 292513 - DNA, 819 bp, Morganella morganii
atgggcgtatgtgcatattgtgaaatggacactattttaactcgggaacacgtaatcccatcttttatttgtgattttcaaaaaaataatggtaatggtgttatcagtagctggagagagaaggcacaaaaaatagttggcggcgatgccgttgttaaggatgtttgtgggagttgcaataatattatattaagtaagttagattcttacgctaaacaatttttagcagaaaatggtgttttttcaattaactttatagaaagcaataagactctaacatataattatacattattatctaagtggttacttaaagtagcctataattcagccagatccagcggaattaaaccggcagaatttggagcatataaaaaattaataattagtgatgattttgacttttcaatgttttttatatcagcgggattatttaaacctttaaagcttagcaagtctgaattagataagtatggtgatattttcaatgcggatattaatggatatgcaaatccattttttgttagaatttcatggtgtaatatcgagccgactatctattgcataaaacaaatatctattggggcatttgtgtttcacatagttatctttaataaattattacctccagaggttaaacgtagggtaataaaaaattatctaaaaaaatgtaccggaatgtctattttagaaaaaaataagtcacatcgtgagataaaacaattaccaataacatttatagattcaatgtctcatcacatgaaaaggcctgaagtaagagtacatctagatgaattattgaaaaaatatgaattataa

SEQ ID NO: 292514 - DNA, 2748 bp, Morganella morganii
atgagcagaaacctccgtttacaggtcgtgttaaatgccgtcgataaattaacccggccgttccgcagtgcgcaggaatccaacaaacgactggcgggcgctgtccgccagtcccgcgatgcactgaaagacctgaaccgtcaggccggacaaattgacggcttccgtaaaacaaaacagcaactcaccgaaacacagcaggcctatcaggcggcaacacaacgcgccgccgccctcgcccgcgaaatgaacgcctccggcaatccgacacggcagcaggccgaagcgcttaaacgcgcgcagcgtgaagccggtcaactgaaaaaccggtttgaacaactacagcgatccacccagcaacagcgcaccgccttacaggctaacggcatctcgacaacccaactcggacaggcacagcgccgcctgaacagcgacattgcccgcaccactcagcaactgcaacggcaggagcagcagctgcgccgcagcgccgaacaggaacgccggatggcagcggccaaaggcagctatcagaaaacgatggatgtccggaataaaatggccggaaccggtgcggcagcgatggcgaccggcggtgcggcgttatatgccggaaagaaatttatggcgccgggatatgattttgaggtcgggatgtcaaaggtgcaggcgctgacccggcttgataagaactcagaagagtataaagcactgcgcgaacaggcgcggcagctgggggcgaccacggcatttacagcaaacgaagttgcacaggggcaatcgttctatgctatggccggatttaaaccggagcagatacagaacgccatgaaaggcaccatgtcgatgtcccttgccggtgatatcgacctcgccactacagccgatatcggatccaatatcctgaccgggttcaaactgaactctgacgaaatgaaccgcgtcagtgatacgctcgttgccacctttacccggtcaaacaccaacctgaatatgctgggcgacacgatgaaatatgtcgcgccggtcgcgtccggtctgggtgttgatctggaaaccgccgctgttgccgccggtaaactgggcgatgccggtatacagggcagtatggccggtaccagtctgcgatctattcttggtcgcctcgctgaaccgccaaaacaggctgctgacgcactggaagaactgaacatcaagacccgtgatgccaagggcaacttacgcggcctgccggaaatccttgctgatctggataaaaagacaaagaaaatgggtaccgcgcagcgcgccgggtacttcaaacacattgcgggtgaggaagcattttctgccctgtcggtactgacagaccaggcaggcagcggcgaactgcaaaaaatgatcgccgaagtcaaagcggccaaaggtgaggcgcagaaagtcgctgacaccatgaccaacaaccttgacggcgatttaaaaaacctgacctctgcatgggaagatgtcggtattcagatattcggtggtgttgacagcccgctgcgcgatatcgcgaagtccattaccgatattatcagtaaggttggggagtgggcgaaacgcaatccggagctggcgaacacgctgacgaaaattgccctggcgctgggcgtgatcctcgccgtgggcggcgcaattgttctgatgctggccgcgatgctcggcccggtcgcaatgctgaaactgagcctgtcagttctcggcatcaagggtgccggtgcttttggtctgctggctaaaggattaaaagctgtcggactggccttattctgtatcggaaaagccctgctgacgaacccgctgtttcttgccgccgcagtgattgccggtatcgcctacgcaatatataaaaactgggactctgtcgccgcgttctttaaaaagctgtgggcggatattgtcagtgcctgtgataccgcatggaaatggataggcagcatcatcagcagggcatgggagggaataaaaaattatttcctgaactacacccttgtcggactgatttataaaaactgggacggcatcaagaaatacatgtctgatctgtgggaaaccgtgaaaaccaccattaaaaccaagtgggatcaaatcatcacggatattcagaacctcccggcaaccatgaagcaggccgcatctgacatgatagacagcgtcattaacggcattaacgaaaaatgggaagacctgaagaataaatttgccgaaataaagcaaatggcaaaagacgctcttacgccggactggctgaaggaagcgaaacaggatccgaagttcgtggcggcagtagaggccacaaaacagagcacaacaaccggcggcatccgtaatgccaactggacgataccggataagaaatttgccggggcctatgattccggcggacatattccgcgcggtcagtggggtattgtcggtgagaacgggccggaagtggtggacggcccggcaaatgtgaccggcaggaaaaatactgcagcactggcaatgctggcactgagtaccctgtctcagccgatagctgcggcaccggcacaaaccggcggcggagcggtcagcagcgcgtattcatcacagcagaacaccgcgccggtcatcaacatctacccgacaccggcgcattccgcacaggatatcgccagcgaagttgcccgccagttggacgcgcatacccgccgacagcaggccagccgccgcagcgggtacagtgacacagaggagttttaa

SEQ ID NO: 292515 - DNA, 219 bp, Morganella morganii
atgatgaaatgtcctctttgcggcgaacttgcccgcacccgtagttcccgtgatgtcaccactgagacaaaagaacgctataatcagtgcacaaatattaattgcggtgcaacgttcgtcagtcatgaatctctttcgcggttcattacaaagcctaatctaattgaggctgtgctcccccatcagacaaatgataaacaggtagcattgggtttctga

SEQ ID NO: 292516 - DNA, 264 bp, Morganella morganii
atgaagttagaattcaaagaaattaaccctcggattgggtctatttattacattgtaaagtggggtgatattcgaattggaactattactcgcgatgtgtgttgtggtgacatggtcattaataatgacttaccaggatttaagccaattaaaaagaaattcagcgacatagaatctgcatctgattattacatagggctggtcactctgtttgctaaaaaggtcggggtgcaggaagccatcaatgagccaaaggaatcctga

SEQ ID NO: 292517 - DNA, 330 bp, Morganella morganii
atgaaaagaacctatatcaaaactgccggacagaaacaggatgtgtgcctgcggctagtccggaatcttcgccagctggacagcttcactatgaagatggcttcattgtctgctgagttaaatatcgtgatggcgaccacgtttgtcaaaatgatggaagacatcggcagtgtccacgtcagccacaaacacggaaagcaggtctattacgtttttgatgattatgccgtatcaaaaattaaggctcacttcagcagctttcccgataaaaagcgtaccggcacgaaggtggaaacgccggtatctgagcaggaggcccgctgtggctaa

SEQ ID NO: 292518 - DNA, 243 bp, Morganella morganii
atggccggggtttttatcgtgataccgccggagagcagtttcagggaatcgtccagactgcgctgtgcgttcatgtccacctgcgaggtgaacttatccgccatctctgcggccttactgttaaaaattttatcccacttgcgtttcagccggttcagccagattttggtctggctggcaaagctggcatccatggtcacgccgtcaaaatcctcatgcagactgctgaacgttttttcgtaa

SEQ ID NO: 292519 - DNA, 540 bp, Morganella morganii
atgattacggaagtgaagatatttgatacggaatccttcaccacgctgtttgagtcagtaaatcccgttcagctgaacgtccgggatgagcataaggcgacacagtttcaggtggaatccggtgaaacccgcagtgaccatgttgtgattaacccggtggaaatcggtatggatctgatactcaccggcgaactgaaagatgcttttgaagccatgcagcaggcttacgatcagcatcagcttgtcggtattcagaccagggtaaaaacctatcagccgatgctgatagtcaatttttaccacgatgaaatcccggatatggcggacgcggtgaaactctccctgcgctttaccgaatggcggacggttgagccggaatacggtgaactgccgccgcgtaaagtcgcgaagaaagagcagagcagcacggtaaaccgggggaaagtccagacaaaagaggcggacactgccacgaagaaaaaagggtcagcactgactaaaggtgttgactgggtggctgaaaaagtggggggagaatga

SEQ ID NO: 292520 - DNA, 237 bp, Morganella morganii
gtgaaagcgctgcgcggggaaatgctgcacaagctggataaggggatcccgtactggaaaaccaccttcgggcgacaggctgatctgccgctgtttgaatccgcgttccgcgagcgtatgcgggaaattccgcaggtgaccgccgtggtgtcattcagagccacgctgaatgataacgaactgaactatgtggctgtcctgcagacagaatacgggagcattacgttaaatggctga

SEQ ID NO: 292521 - DNA, 1023 bp, Morganella morganii
atggggacatgggttacgataaatacatcatttaggtcattttttagcgatagaatcggttataaatctgggttagcgctcaataacaatgaaatgattcaactcttagataaaaatgatccactacttgatgtcttcactagccaaaaagagcaattgtgtcgcatcaggacaaatcacattgaagatacatttcaaaaaactttgtatcgcctaggtgtcacaacacaagattttattggtcatgcaccaacattactcgagatggaattcaggaatgatccaatcaagaggaaactattccaacaagtattatgtactcttggagagactcactttgataaaggtaaacaatcaatattcaacgaatttgatgaaagccaatactataaacatattcaaacacaattcggtaatgaagcatttattattgcacgtaggctcgtggaattaacgaaagatagtgaagaagccagtccctggggctggctttcagcaagagtactcgattggaaatcaccaattgaacttagaggcttgtttgagagtgaatcattagatgcaatgtacggaaggttcatagaccaaagatatttgaattatttatccattaataccgaaaaactcggttcaatacattggagacaattcgaagctctaactgctgagtactttgaacgaaaaggatacaaagttgagatagggagtgggagaaatgatggtggcattgatgtacgagtttggaaccctaatgcaaataccagtgatcctcctgttcagcttattcaatgcaaacgaacaaaatcaaaaattgacaaggtcttagtaaaatctctctgggcagatgtaataaatgagaatgctaaaggcgggataattgtaacaacatcatcattttcccctggagctcgagatgtctgtaaagccagaaaatatcccgttagagaaataaataggcaaaaagtcattcagtggttaaatgaattacgcagaatcggtagaggggtattcatgggagattag

SEQ ID NO: 292522 - DNA, 1800 bp, Morganella morganii
gtgaataaaaagtatacgtgctttgaagatagtcattttatttcagctttaaaaaacagggatgatttagttatttttgaagaaaataaaggagctgtttttgctttagaattattctttggtttagatgatgttttaaatacagtttcatcatcaattactggtggtcacgatgatgccaaaatcgacatcctatttgttagtagagaattaaaatctatcgtgttgattcaagcatatgaggctcagacatttaaaccaacagctaaaggaaataagggtgcagatttatcctatgcaattggtgccctgcttagctcaagcattgatgatatacctgttcaaatcagaccccaagtagaagatgcaagagaagctttgcattcaggtgaaattgaaaacatatatgtttggtatgtacataattgcccagaaaacatccaagttaaacaacagatggaactaattttagaaccaatgctggaacaattaaaaatctataataatgaagaagtaaatattaatgcaactgttcgtgaaatgggactggatagcttagatgagttatataaatcttcaacacagtcaattattatttctgatgaaattatatttagcgaagagcgaattggtttttctaaaaaagggaaggattgggaatcatttgtgaccactattaatggagagtggcttgctaatatctataggaaatataactcaactgaattatttagtgctaacgtacgtaatttcatgggagctaataaaaaagataatgataaaataataaatgctgggatacaacgctcatcggaagagtcaccaaatgatttttttgtatttaataatgggattacagcattagttcatgatttcactttaattgataatggaaaccaaaaatatatacaaaaaataaaaggaatatcaatcgttaacggtgcacaaaccaccggttctcttggaacacttaaagaaggtgtcaaactagacaatatagaaataggtatacgatttattaagtgtgaaaataaaaaattaatagaagaaataacgagatataataatagtcaaaataaagtaatccaatcagattttagagctaatgacccaatccaaaaacgcttaagaggggagttttccagacacaaagctggtcattatgatggcggtttacgcggaattccttgcccaaaccgaagcttaagaatagatgcacatacagcggcacaggcactaatggcttggcatggaagcccttatgatagttatcataataaaatgaaaatatgggaagatgacgacctttatcaaaaggtatttaaccagtccataactcctaggcatattttatttatatactcattgcttgaagcatgtaatatccttcaagaggaattaaaaataaaggataagaaattagaattaaaagatcatgaaaaaaaattccttttatttcttaatgaaagaggcagtgcatttttaataatacatgctctaaaaagagtaattgatgtaatccttgagaaaagtgtaaaatcaagttacggaataggatttaaagattcagtaaatagatcaaagtgtataagcctctggaaggatttattaacaatcttgtcgtttcagctaacagatcttaagcctgggctcaaaaatagactttctaaccaatcagctataaaatcagcatgtgattcatttcaaactatatttggtacaacattcatgatgatgaaacaacaaactaatactaatccatattctaattttacaaaaaatatcaataataatatataa

SEQ ID NO: 292523 - DNA, 330 bp, Morganella morganii
atgaaggagtgcagaataccattaggagaaattagtcgttcagatcttgatggaattaaagatttatttgagcaaaacgaagatttatttaaggatagcattttagccaaatttgttggagatgaccctcgctatgaatattgtgatgggtcgtttaacgttagtgatattaatgaagaagacatgtgttttacagcaacagtatcttattatgcaggttgtaaggatatgaatactgtacatccatccgaaggttgtgtcagttacgaaataattgataatgaaattgtttttgagttagatgagaccacttggtcggtagataattag

SEQ ID NO: 292524 - DNA, 588 bp, Morganella morganii
atgggaaccgaattactcgctgcattaaaagaatccacaaattatttaacgtgggctgtcttttcttttgtcgcctgtttttcagtgtataaaacgagggattacagagtaaaaaataaaataaaaacaagtcgttgttcacattttattttttggttctatatcttattctttttcttttttggggtgatcaatattgtactggtaatttatgaattttcgaacagccccataccttacccagttaccggcgctgtaggttttgtagcgttattagtggttataaacgcagcaatagttgtatttggtaaattagaaggtaccactggtaaattggagggaaaaataccgacagccaactctctgaaagagtccgttattcagattctggatacggacaaatatcccgtaacctggttgattcagatggataaagataatgtggtattcagccgggtaattaacggggatgtagatgagagctacgcccccgtaaattatgataaggcaaatgtatatgccgcttctattctgaatggtcttcaaccaccaaaacacctttttcagtccgataaacagactgattaa

SEQ ID NO: 292525 - DNA, 216 bp, Morganella morganii
atgtccatgacagataactatacagaccacaccgtcgagcttgctgagttgatccgccagctaaaatcatacccaccggatactcgtgtttcttttggtgggcttgatttctaccgagtaaaaaagcggggtgacaaattgattcagatcgaatttaatcagtctgtttatcggactgaaaaaggtgttttggtggttgaagaccattcagaatag

SEQ ID NO: 292526 - DNA, 1173 bp, Morganella morganii
atggtgttgctggttcaccctaacggctccaaatactggcggcttcgttatcgcttcggcggtaaagaaaagatgctcgcgctagggaagtatcctgaagtttcgttagctgatgctcgatcgcggcgagacgaagcgcgtaagcttttagcgaacggcgtcgatcccagtgaaaacaagaaagcggttaaggtagaacaggagcaagaggcgataacgtttgaagtggtcgccagagactggcattccagtaatcagaaatggtcttcggcgcatagcgctcgtgtattaaaaagtctcgaagataatctctttgctgtcatcggtaagcggaacattacggaactgaagacacgagatctgcttgtccccatcaaagcggtggagtcatctgggcgtcttgaagttgccgcccgtttacagcagcgtactaccgcgattatgaggtttgctgtgcagagtggtttaatcgactacaaccccgcgcaagagattgccggtgcggtggctacggcgaaaagacagcatcgtgctgctctggaactcaatcgtatacctgaactgcttcaccgtatcgatcactattctggaagaccgttaacccgactggcggttgaactcactttgttggttttcatccgttcaagcgagctgcgttttgcccgctggtcagaagtggattttgaaacggccatgtggacgatccccggtgagcgtgaaccactggacggtgttaaacattcacagcgtggttcaaagatgcggacgccccatcttgttcccttatcgcggcaggctctagccattttggaaaagatcaaaagcatgaatgggagccgagggctgattttcttaggcgatcacgatccttgtaagccgatgagtgagaacactgtgaacaaggctttacgagtgatgggctatgacacgaaaacggaagtctgtgggcatggtttcaggacaatggcctgtagctcattgattgaatcgggtctatggtcgagggatgccgtagagcggcagatgagccatcaggagcgtagctctgttagggctgcctacatccataaagcggaacatctgggggagcgcagattgatgctgcagtggtgggcggattatctggatgcgaatcgggagataggggtaagtccgtttgattttggaaagtaa

SEQ ID NO: 292527 - DNA, 150 bp, Morganella morganii
atggcaatcactgctgaacgtaagaaacaacttgaaaaaatagctatcaggaaaagcattgagaaagaaaaaactattttatggactgatttagttaatgatttaattgataatttcttacttaatgaggaaaaaaaatatcacagttaa

SEQ ID NO: 292528 - DNA, 819 bp, Morganella morganii
atgcctttgtttgttaaaccaaaggataaagggacgcttccgttctgtctgaaactgatggaaaaagcccaagggttcacagatcgctttgatttcctcgttcatgttgcgttttcccgttcaatcggaaaacgtcaccgtaaaccccctgttctgcgctgccgtgtgattgatgttttattacaggcaatgtgtttccattatgacccgttagcaggggaaactggccgtgttcagcgttccgtcactaatcttgcgatagagtgcggactggcgacggaatccgataacggaaatttatccattactcgtgtaacccgagcactggaatcactggctaacgattttggcttgatccgttatggcagcgagtttgaccctgttatcggctgcaatgtgccgtcagatattgagtttacaccggcactgtttgaagtcctcgatatttcccccgaagcactgacggcggcacgtaacagccgtgcggagtgggagaaccagcgacgggagaaaaaaggcttacctcgccttgatatcatggaactggccgctaatgcatttcgttatgtccgtgacggattcaggaagtatcacaaggagcggcgggaacaaggcttaaaacgagccagagcaaagcgggaatccattctcagccgcaaagaaatcgaagctaaggtaaaacgcgaagtgtccttagaaatcgcggctggccgcttccctgtcgatatggccgctgcacgcagggaaatagcccgacgaacgacagaacgaactatcctgtcacggggtaattatacccgcttatcatcacctgcctga

SEQ ID NO: 292529 - DNA, 273 bp, Morganella morganii
atgtataacgtaatccatgtacacatagcatgtggtgattatatggacaagaagttaataaaaacaatcagattaaatgataatgaggcattaatattaaaagaagctgcgtttaatttttctaaagaaaatattctaaatgatgtgcatattatctacaaagagtctgatttaattcacttcatgattgagcatttaacatgccgcttagatattaacaagaaaggtgagttgatttttattgaagaccagttggataagacagaggtatga

SEQ ID NO: 292530 - DNA, 723 bp, Morganella morganii
atgagaaagttattaatcgcgggtatctttgctgtaagcagtcttaccagcatcagcagttttgcatggatagcgactgagggtacacagatagcaaataatattcagttgctggaacaggtcaggcagcagatggaaaccgtccgaaaccaaattcaggatttgcagagtctgccatccagtgttttgaatatggggtctaacaaattcaagataatggaaacatttaatcaactgaaaagtatctatcaggaaggtcagaacatagccagagccggacaggatgtcgctaaatactataaggatatgggtaatattgatattgccgatgcacttaaaaacgggaattacccgcaactgttcaatcagtggagcgtgcagaaccatgacacagtaaagggaattttaaaacagacaggattatcagaacaatggcttactgaccagcaaaatgatgttaaagattataacgccatgctgaacagtgctgatggttctgtatctgctttacaggcagcgggtaaactcgcaaacgctcagttagacagtataaatcagcttgcacaattgcaaatgtcccagaataacctgctggcatctcaggcagcgactcaacaaagcgaaaaagatgcggagagagccgatacaatccggcgttcagaaatgaatgtgatcataaattctgataacaacaccgctgctgattttctaaagagggactaa

SEQ ID NO: 292531 - DNA, 4038 bp, Morganella morganii
gtgtataagaaaaatgaagtgtacattccacgtattctgataaaagatcatgaggactatacgcaagcagaacttctggctacagctagacatattatcgtgcttgctgaacctggtgcaggaaaatccgagctgttaaaaaaattagccgcaactctaggcgccgagcacttcaccgccaacgttttcaatcaagtgggcccagaagaaagtaacaacgcagttgttattgacgcgattgacgagctggttaagcatgagcaaacagctcttaagcaactacttggtttattgcgtaaatccaagccaaagcaggtaattctctctagtaggtcaagtgaatgggatcaagcttccacacggttgtatcaagacttcttaggacatgaaccttttgtcgtcagattgaaaccatttgatgagcaagcccaacgagccatctttgaagcttataaaccaggcgaaaatttcaacaaattcgctaaggagcttgggcgtttcaacctcacatcactattacccaacccaaagtttcttcagcttttttccgatgcatatgtcgaaagtgatcgtcacttcaatgataaacgttctattttcaggctatctgtcgaacatctggctaaagaaacaaataagaatgctatcatctcagatacggatttatctcctgagcaaaaagtatcgttatcagcggagatatttgcgaaattactactatctggggcagaaggggtaacaataagccaagctgaaaatgataaactctacccacttttgtcctcgctttttagcgacaggaaaattccgcgttcgattctcgctacacgacttttcaagccaggaaagaaggaaggaaatcaccaacctgtacataaaattgtcgcggagtactgcgcggcaaaatattttatagaacgcattgaagcagatgttaaagcattaagcatttcccagtgtatgagcatcattgcgcctaatggtgtcgtcagagatgaattaagaggcctgctcggctggatggcaacgataggtaatcgttcacttcaagaatcaataattgaggttgatccttataccgtacttgcaagtggcgtcccctccgaattgcacccaaaagctcgcatcaaactcattcgccgtttacgtagtatttctcaagatgaccctttctttcgacgtagtgatgaatggcgcagattcagtatccacggtttcttcacttctgcagtagccgaagaaattaaggaaattttcgatgaaaataatgacggtcagttgaaaaaactgatactagaactaatagaaggttccgatgcgattgatattttacgtgaagaactgtgtgcattagtactcaatcctcaagagcaggaatctgtacgtcggttggcattttttcgattatcagaagccaagtcagcttttaatgagaatttcctcaagaccctgttgcttgaatgcagttacttatctctcaatattgctgctatttttcttaaaagaagagaaaactcacttgatgaagtggatatgttagttaagttttttcatgacttagcaaacattcactcccgcagtatttttacattttcagaatctgaatcaaaaaaggccatcgattcattaatcgacaagctgacgcttgatgttactgacacaattttagatagattgtcctcaacactcacctgcacatgccatagagatttgtatgcttgtaaatgcagcagggcattgagcgcgattattttttctctcttggatcgccatatggcgcttgcaacagcaccacatgaccccgtgcaggtatggatgtggcttaaaaacctaaatgttgcctgtagtaacttcaaacaggacagaatttctgtaaaggtactcagggaagatgacgcattgcggcacggtatttatgcactggcatttggatctttaaccaatatcgatgaactagtgtggaccagaaaaaaaagttttctgggcaactggagccatcctggcctgcacattggggttgaggatcattactttcttctcgaacttgcatttgaattaggtaacgaagcgttgtgggaatcattactagtagcgcatatcagacaaaccttcccaaaagatcagtttcgcatagatttgcggcagctatgtcgtaagcatgcccgcgaaaattcccgcctactgaaaatttggaaggcgtttgatcgttcaagtacaaagaaccagtttaagatagcaaaatctcaacgctatgcggtccgtaggcagctgcatgctcagaaaaatctagttattcgaactgaacgatcactaaacgctatacgaattaactacgaaaaaattaaacaaggcggagatttaaaagtcctgcccctctttgctgatctcatactcagtacaactaataaaatcccagagcagttaggtgacagagcttttctgagtattagtttgcaaaactccattccaaaaatcgtcaagaagatgaggtatcacggagatttgagattatttctcactacattgaaaaataagggattagagaaagttttttttgctggctgtctggaaacgtttcgaagcaaaggctcgctagtagatttagatcttgaggtcattcaggtgttcagagcaaacagtttctggggccagagtgtaatggcaaatgatgaacgtaatgcgctttacgaggaagtaaacaaaataatattctccactcctcagacaactgagtcatttttccgaaagctaattgagcctgaacttgctataaatactatatctgaacaacttgatattctgaggatggaaacccactttaaacaattaaattccgacatagctttagaatggctaataaagtacccttctcttaattttataaatttgaagaaactattcaatattgcctgcaatgctaaaaatcgtaatgcaattgagatattaattacgcaacgatgcagagcattaatattgcaacatccactcacaacagataacattgaaatcgaaaaagtccgtatgttttggattattcgagcattctattttctggatgagtcatttagtgattgctgggagggaatctgcgcacataaaaaaaacctcttgttgttctgtaaattgaatttcaacatatctgaatatgaaacaatctattggcctaaacttacgcctcaaaaggccaagtatttactcgatggttttgttggatattggtctgatatcgaacatgtgggatatacccatgacgaaaaaactgagtatgaaaatgcccaccaagtttttgataaaataatatggtccttcaaccatgcagaaccgaaccatgctttaccgattattgaaagccttctaaaaaataagctaatgaatcgatttaatagctcgttaaaaaatgtcaaagcttcgttaattcgtaaactcgggcatcttaattttcttgctccttctccatctgcggtcgttgaatggcttgataaagattcagttgcaaccgtagaaggcttaagggaactcatcatcgatcaattatatgccttccaacaaacgttattcggtggggaatttaatacggttgatcgcttttatatgggtacacaacgcctcaatgaaaataaatcaactgaaatcattgcagaatggctcaataatcgtcttgaacctaaaggtatatctatagtaccggagcatcacatgcatgctcaaaagcgttgtgactttaccgcgactaaaatgatagggggaaaaagaagacttcttgttactgaagtgaaggggcaatggcacaatgaattatacaccgctgcggaatcacaacttagccaactatattccattcatcccagcgccgaaaaacagggaatatatcttgtactgtggtttggtaaagacgagttaattgcaggaaaaaagaatattcatatcactaacgcattacaactaaagcagagcatcgaaactcggcttccatctcagttacaaggcctaatcgatatttttgttttagatatttctcgccaaccagctaataattaa

SEQ ID NO: 292532 - DNA, 408 bp, Morganella morganii; identical to SEQ ID NO: 280885

SEQ ID NO: 292533 - DNA, 1677 bp, Morganella morganii
atggatgatcaaaagagacaattaattaacattaaagacaatttattggtcagcgcctgcccaggggcaggtaaaacaaaactattgattggtatgttagaggataatttatatcgaaatgaaggttttcgttggcatatagtgttaactcacactaacgcagcagctgatgagatctctagcaggatagataatctaagtatagaggtagatagggtttggtgcgggactattcattcttttcttttagagtgggttgttaaaaagtatgctggagctatatcaagattaaaagatggattttctttactttcagaatataaacaaagaaaaataatccagagtatagaaagtgataaaaagctaggagtaaaaatacgttatagttgtgatgagaaaggtaacgcatttgtggaaccttattgccattcgttagatgataaatacaaagagttacttgtaattcaggagtataataccttcaaggaaagtaatagactgattgattttgatgatgttattaagcttggcgtggaatttcttgaaaacaatcaaaacatatgtgagcatctttccaggttaattggcaatatttatttagatgaatcacaagatacaagtctgattcagcttaaagcattgtcatatataactaggtataatcgtgtctcagtatttattgttggtgataatgaccaagccatttatcaagatcttggcgtttctataaaggataaagatgtaattaaatctgagctgcaattatctgaattaaaacatgaaactttgtctgggtgctatcgatcttctgaattactggttaaatattataaaaaatattctgcttcgcgaaataatgttacttctctgcgtgaatttgatgggaagtctccaataataaaagatatttctaaagatgaattgccacaaagggtgtttaatttaataaatcaataccaagtaaaatataatagcgtttccggtattgctattatagggcctgataagtactatcttatggcgctaataaatgctttatatgacctttcagaaaacttcgtttatgattttcaatcaacaaatcccctatattgtgctaggaatactgtattttacgagttgataagtttggttattttggatgtaaatgttattaactaccaaagaagaagttctcttgcaagaaaaattgttgattctgttcctgaattaagtcatttgacgccattacaacttaagcgtgatttaaaggagtttcagtcagtaagaaataattttatattttggttgagggagttatatgattttttagaaatgaagtatcaaaaatccattaaacttgagacagattataaaatatgtaatgcagcggcttctgtggcaaaaatcagggctggtatgggcgcaattagtaagatgattaacaaagacaaaaatgttgtctctgtatctactatacatggttcgaagggtgaggaatatgattatgtaatctctattgggtatcatgatcaggtggtgcctcatcaatcatcttttgaaaaaggaaatgaatatgctcgcgatattgctaatagattaatgtacgtggctttttctagagctaaggattatatgaatatatttatagatgatcgaagaaaagttagtcctttctttattagagaacctgactaa

SEQ ID NO: 292534 - DNA, 2133 bp, Morganella morganii
atgtttattaagaccctctcggtaagaaattttagaaattttaaggcaacgtctctttccttcaaaaaagaatgcgtcaatacaattgtaggtgaaaactcatcggggaaaacaaatgtctttgaagcgatgagacttatacttgacgataccttgccatattataagcgatatcttgtagaaaatgactttcatcgagggctagggacagcgtttggtcattgggttataattagtttggagtttgatgaaataggtggggatgaagagtcagagttactatgtcaattaaatactaccgttaatggtggtggaacagggcgaataacttatatttacagaccgcagttttacatcagagaacaacttttcaatttaaatgatattgaagatgttgatgagcgtagaagcgcatataacatactgaaagaacaatattcgattgataagaccacgtatgaatccttagtgttatgtcaaggtacagcagattttagcgatgatggattatactctcatgtggttggtgattttaatgattgtttattccctgacccaaagttagagcggattgatttaattggtaatagacaacggggttataatattcaggataatatcagttgtacttatgcccgtgctttgagagatgtggtaagtgaacttaagaataatcgattcaacccatttcaaaagcttttagaatatgtttctaaaggaattgataatgatgacgcattaagcgaaaacatcaagaacgtgaatgacagaatatcatcgattgaagaagttaagaggctttctgagggcatattattatcaataactaatgctgttggtaccacttactcgccagttttgaatgttacatctgaattgccctgtgaactaaaagagttggtaaaggttcttcaactcaaggcaggcgactctctttgtgaaggatatgtatcagagctatcagagatgagtcttggtggcgctaatttaatatatttagctttgaaattgtatgagtacgaagaaggtatcagtaaaaacctcttagctaattttttaataattgaagagcctgaggctcatattcatacgcatatacaaaaatctttatttagcaatctgaaaaataataaaacgcaagtttttatatctactcattcaactcatatatcatcagtatcaaatatatccactacaaatgtgcttgtaaaaaatggtcttgaaacaatttcttgctctccatctaacggattgaaaaaagaaaaaattaatcgcattgaaagattccttgatgctataagaacagatattctctttgccaagaatgttatcctaattgaaggtgatgctgaagaaatattaatacctcatctcgttaaaaatagtttcggtattacacttgacgaacttggtatatccttgatatctgtacgggggactgggtttgaattactatcatctttatttcactcagaccgcattaaaaagaaatgtgcaattttgaccgatgacgacataaatttgtatggagataataagcctgattatttatctcaagatgattataataaagctgtgaactcagcagagtctggtgtcgctcgtaaagtaatcctggatgaaatagttagaaataacgcttttattcgtgcctatttttctaagtatactttcgaaattgatttagtgctatcaggcgccgtaagatactttgacgcgatagccgctgaatcatttgagaaaaaagcatattacacaccataccaagaagcattccaatcctctgatagacaaaaaataggctgctacgctttaaagttagctaataagcataaaaaaggttggtttgcaatgatgcttgttgacaagcttgatgcagattttcctatccctaaggcactctgtcagtcgttagggttcactggtgattttaataaattcactctagcaaagatggttcgatatcgtagtgaggttattaagaataaagatggggctgatttattaaataatatattgggacaggatgatttagcatttattatagataacatagatgctgctttgggtatatttaaagctcattaccctaacgatcctttaacttctttgcttgaggttcatcatggatga

SEQ ID NO: 292535 - DNA, 156 bp, Morganella morganii
atggttataagtacctctgatttgatttttgtcaacatgggccaactgaagctcaatccaagcagtatcaaaatcatgatcgtgaaggatagtagaaaaagtatgccgaaagccatgaccagtcactctcccaacatagccaattcccttgattaa

SEQ ID NO: 292536 - DNA, 2202 bp, Morganella morganii
atgattagtgaaatttttattactccgcctgtagctatgtatttgtcaccaacgagtatgacagatttacggccgattaattttatttttggtgctaacggaacaggtaaaactacaattagtagaattatagctcaagattctacgcatacccactgtttattgcgttggaaaaatgctgctaagttacaaactatggtctataaccgtgactttgtagaacgtaattttaatcaagaaaacacagtgaaaggggtatttactcttggtgataatcaagttgaagcagagcagcagatagctaatttaaaaccagaaatagacaagcttaccgaacaaattaatgggctgcataatcaattaaatggtaataatggagttaaaggcaaaataagtgaaatggaaagcctagaattaaagatgaaaaataaatgttgggagcagaagaaagcacatgatgattattttctaactgcttttacaggtgttcgcaatagtgctgataattttaaagcaaaaatcttatctgaatatgaatctaatacatccgaattattaactttggaacaattaaaagaaaaagctaacgttgttttttcgaaaaacccaaaaacattctcataccttacaaatatatcaataaatgaacttctagctatagagtctaatgaactactagggaaagtgataattggcaatcaagatgtagatattgccactttaatcaataaaataggtaatagtgactgggtaaggcaaggattggaatatcataagcacagtctggaaaaatgccctttctgtcagcaaccaacaaatgaagaacttagtaaaaagttgatgaatttttttaatgaaacatatgctgaggaaactaaatcaataaatggtttgttgaataaatatgtggggttgatagaatttttacagaatttgattgatgataatatacaaaaagaaaatcaatttttaaaggttgagttatttcaatcagaatctaaagctctttttgaaagattaaaagtgaacgaaaaattgctccaggataaagttaatcaacctagtaaaataataaagctagagcaaataaaaccatcgttagatatactgcagaatttaattgatgaagcaaacgtagaaactaagaagcacaatgaaattgtttcgggaatagataatgaaaaagtaattctaattagtcagatatggaagtacatagttaatgaaatacattcagacctgttcgattataataaaaataaaagtatcttattaaagcaaataacaggaatgaatgctgggattgaagataaaagcaagagaaagctagctatagaaggtgagattggtaacttggagaaacaatctacttctattcggccaacaatgaataccattaatctactattgaaaaagtttggttttaattcatttcatattgaggttgaaggtgataccaatcactataaaatcagcaggaggaatggtgataatgcagggcaatccttaagtgagggagagaaaacatttattacatttctttatttttattctttaattaaaggggcgcagtcttcaataggaatatcagatgatagggtgattgtatttgatgatccaatttcatcattagatagtgatattctttacatagtcagcagtttaattaaagagatattggaagaagtaaggggtggaagagggcaaataaaacaagttttcattcttactcataacgtgtattttcataaagagatttgttttcataaaaaaagaagtaaaagaaatgccatggctcacgaatctttttggatagtaaaaaaacaagaaggtggatctgttataaatagatgcgaggaaaaccctatccgttcagcatatgaattgctatgggaagacattaattcatcgaatgtttctagcttaaatatacaaaatacattaagacgtattttggaaaattattttactatttggggagggaaaagtaaggacgagatttgtgatttatttgatggtaatgataagttgatttgtaattcattattttcatgggtaaacgatgggtcacatgctatacatgaagatttgtatattaatcatggctctcaaacaaatgaatcttacttgaaagtattcagagagatatttgtaaaatctgatcaaattgggcactacaatatgatgacgggcaatatttga

SEQ ID NO: 292537 - DNA, 486 bp, Morganella morganii
atgctgacaatgctggatgaggcggatattgccccgccgtggtatgtcattaatggtgaccgttacggtatagacacacatcaggggcgggttctgcgggcattttcagctgactttaaagcaagatggaacattattcagaccgccgaaacaatcacattgccgaaagtgcagcagtctgacgggcgtatgccgtttctgcgccctgtaaacggaactgcccggaagaccgggactgtaaccggcgataccatccgtaactttaccggtgaattaggttatgaagctaactatggcctgacaaccggtgaacgtgatgtgaacggtgttttccgtgctatcggggcatccaaaggctcgttcatgggcggtggtggtggccgaagtctcaatattatgtttgatccgtcaacagtggttccgaccggctcagaaaacaaacccctcgacatcggtgtaacatggattatgtatttaggagtgtaa

SEQ ID NO: 292538 - DNA, 375 bp, Morganella morganii
atgaaagttaggctattaagtgacggtggatataaagaggatttatcacaagtcagttttccaatcattgtgaatgcaacattacttgataatcgaactcgaataataatggtctcaggctccgaatttaacatcgctttaggttattatccgttatttagtccagatgattatgagttaatgatgaagtttaaaataggcgataaggttattgtcgcagatacatccacatctggttctatttattctattaatgatagcgtacctgacaaaatacaatattcagttgaagatgaagaagggcaaacatcatggtggagtgaggaagatttggagccaatcaatgaacaaatatcacgacaaatcagactttga

SEQ ID NO: 292539 - DNA, 279 bp, Morganella morganii
atggatagtatgtattccgactttcacacatggtttaaagcttctcacggatatagcccatcagtggcaccggatgatagtcacttggttggtgtccgtagaatggcttttgaggctggatataaagctgccctcaatgctttaaccattaagctaccagcaaaagaagaaaacccggcggatgataataattatgcacatggatataaccgcgcaataaccgaatgttccgatgcaattaagcgtcagggatttactgtcgaattaactctgaaataa

SEQ ID NO: 292540 - DNA, 276 bp, Morganella morganii
atggaatttaaaggtacgccggggccgtgggttcacgccggaggcaatagcctgacagaaacaattggcggcgctatcaatggtgacggcaaaacactttgcctgattctaggtaagggtattggaaaggaaaaggcgaccgctaatgcgaaactgatggcggcagcaccggaaatgattgattttctgctccgaatcaacggcgcttattatctgtctgataaacatcaatccgaattaaaaagcgtcatcaacaaagcacttggccgcgaatag

SEQ ID NO: 292541 - DNA, 525 bp, Morganella morganii
gtgggtgctttgccagagcaaaatgaacaagcctcatcacatgacgtagtgccagcagataatgacaatgaagtagcgattcaggagatcgaaagggctgttgtcgacaaccctcaagtactgaaacgaatacttgataatcctaaaatcatttctgttatgaggcaggagtatcatcgcgggcctttgcctagtcctaggcaaatgaagcagtataatgatgttcttcctggtgccgctgagcggatttttcaattgactgaaagagagcaggcccatcgccataactcagaaacgaaggctcttgatggcgctatatctcgtgacaagcgtggtcaatgcatggcgtatactctatccttattaattctcggtattgctgcatattttgcataccagggagataagtggttcgctggtgtacttatcaccggcaacttggttgcgctggcaacagttttctctataggaaagagagcaggaaaagaaaaagagcaacccactgactcaagtgaaagtgaataa

SEQ ID NO: 292542 - DNA, 729 bp, Morganella morganii
atgaacagtgtagcgaaaacagacttaactttccaggacattacatttgagccggtttatcaggacggtcaaatgtggctcacatcaacggagttagcaaaagcgttgggttatagccggactgataacgttagtcgcgtgtattcccgtaattctgatgaatttacggagtcgatgacaaccaccgtcaaaatgacgttggttagaaaaacgggtgaagttgaggttgttgtccgccttttctcactgcgcggcgcacacctgatagcaatgttcgcatcaacgccggtcgccaaacaattccgtaagtgggtgctggatattctggatcgagaaattgaactcggtaatcatttgccagcatttcactatcattacccgattgagtctgctgatgtgcatgaccgtaaattccagaatacctggttaacggctcgccggttactcgatgaaagaaacccggcgccagatctggcgttactcgaccagcttgaggctgatggatttgatgttacaggtgcaaaggcccgtatttatgcactgtacaacgtagctgaaactaccgtcagtatggaggatgtttttgcagagtcagggaaaatgctgcaaagactcaaagataattttaaatggggagcgaaaacagggggactgaacgtaacttttgaaggaaacgaaaaaggattggtatatggcggatttaaaaagaggcatatcggatgccactaa

SEQ ID NO: 292543 - DNA, 1266 bp, Morganella morganii
atgaatatatgcaaatgttttaaatgtgatacctgtgaaacgttaattgattgcagaatcgggatgtctaacagagacattcagccttttcagtttgcctgcccagtgtgtgaagaacgtatcacttttacaatcggctcagagaaaggcgatctcactggcgcatcagatataattgattttaaagcaccattcacaggtgagaatcatttcgttgaattacaccttgatttccccgtttattttggtaagtacacgatggggatgacgactttttttcgtgcaatggatgaaattggtagaaatgaatttggtcatttagctcaacgccttgatatgttgaaccgcctctatccattgcaaagggagttagagagagttattactcaatacaaaaaaggtaatataaataactttgaaaaagtgtgtgcgaagttacctatggaaaaactgagaagtcataaaaaagaagacgttttagcatccttgtacactgcaacatcgattatgtcatctccttttacaatccatgagcaaaatgaagaattgtccaaaggtttttcccttttatatcatcaccttcacaggaagcataaaaagaacgtcatcagctttgttgaggaaattattaataataaatttctaaaaaacctgcattttgaatgtcttggcttatacccacgccttgttgaacttgatttaccattacgaccagcccttttttatgattacattgaggtagagaaataccgaccagttcccgctcgcgtatcaacggctgactttgatacatgcaataattactacaaagatttggcagaggttttcgctcgtcagttaacgcttcttgcaggcctgaataatctactaaagcgaggtgatcacaatgaatttgaagcgacattaaagttgaataataagaacgaacttcgtaaagaattatcctctctgaatagatttgctaatgtggatttaggccataaaattcaatatatcgacgattgcttttatacaattaatatggaggccatcgataataggctcaggaacggcattgcacattataaatacgaatataaagaatcaacgcaagtcattacctattaccctgccaaagaaggtatggaacgtgttaaatcggaagatattacttttatggagtttctgcgtaaaactctgctactattccgtgaagttcacaacctgaatcatctcatcaagactacactctattacataatcctgatcctgaaaaaagacatgtag

SEQ ID NO: 292544 - DNA, 669 bp, Morganella morganii
atgatttctaatgagaagagattaatcgattttatcgaggaaaagtattcccgtttttcaggatctattagtgaaatatcaaaaaatggagataatttatttattgatatggattgtaattttatccatttggataaaattcccatggtaatagaaaatggagaaacagtgagtaattgcttttctgttgacactttaatctattgtagtgagaaagattgcctttatcttatagagtttaaggaggggtggcctcaaggtgattctgcgaaggaattaagatttaagtgttacgaaaccatatctaaattaatcagaaactggtctgctcatattggttctcgtcatgacttctttaacttaaagataaagtatgttgttataactagggctccgcataagaatatcgatgaaaacggagaaattcatccgtcttttcttcacgtgcttgatgcctcaaaaggagtttttaaattacaggttttaaacaaaacatatgttgatgatgtaagagtttttgttgaagatgataaaatattcaaattcctaagtagggtgactaagtataattcaatgaactactatcataaaggacagcataaaagaactgaatggcagaaagacttgagttctggcgatatatctagtttagattgcctgtgtccctaa

SEQ ID NO: 292545 - DNA, 1308 bp, Morganella morganii
atgagagttgaaataaaaaatgtaggatctataagcaactttgatgttgatatttctggtctgacagttgtttcgggagaaaatgactctggaaaaactgccctttcaaaagtgatttactctctcggtcaaagctcatctttttacaagttcaaacgcaagcttttgattagaaatagaataaaaaacatatatgataagatgttcatgactcttaataaatatatgcacgcggagtttccaactgaggaagaagaagatttaaatggcgctttatctgccctgatggaatttctttacacagcaagaagaatgacgtcctctgatgatttggagttcgatcctatttatgttgtcgagaatgcagaatatatactcaatcacttctatatagaagatgaagctgtaaaaagagaattcactcacatggttataatgcttaaaaaaatagccatggacaatgttcgctttgctgatcacttcctttcatctctaaaggaagagttttcaagtgacctagttaagaaaaactctattagtgatttttcagagataacaattacaattaatgaaaaatgtagttatgtgaaatttgataataaaaaaataatagaaacagaaggagattttgatattccttttattgactcaacatttgttgatggtccttctgttttcttgctggaaaaggttcttgggcgaactgattatgttatgcgttctaaagttagatctagtgttccacatcatgtaatagatttgtgctcgaaaatagatggaactagaaatacactttcatcaatatctgaaagtgatgactcatgttggaatatgaatgatttttatgatggaatcatttcatttgaacctgaaaaagaagattttcacctcaaaaaagatgggtatgttttttctggaaacaatgtatcttctggtgtaaaagcactttccgtcatggatattcttaatcgcggtggttatcttaacaaagaaagtctaataattcttgatgaaccagaaacaaatctccaccccaagtggcaaaaaaagtatgccgaggccatagttaaactttctaagaaaggcgttagggtattagttaatacacatagtccatatatgttggagtctcttaaagcatatagcatattttttaaagttcaggctaagttttacttttctcataaggtaaatgatgacgttggtcttatggataccgatggtgatataagtataattattgatgctttgtcaggtcctcttcgtgatttgatgctggaaatgcaaggagaaccggatgatttctaa

SEQ ID NO: 292546 - DNA, 465 bp, Morganella morganii
atgtcatgtattttcggggaaaacagagatatattttttccaaaattaagtgaatcactgcatttaataacattcgtagatattgctattaagtatcttcatctaaaagggtatgccccttatttttgtaaaacggaagatgaagcacgtactctggtccagacattacctgagaaagggatatggccatgtttatttacaccaagtgatactactggtgaaaaagattttgaagaatttttcacagataacgagacacttgatatgtctcgctttgataatttaggtgtcataaaaaatgatcctatatacagtgaagaacttcttaatctttttgaagaaaagatcactgaaatgaaagctaaccgaaagtggaacaaagagcaactagttgaattattttataaaatgattccaaatttcggtcataaagaaactggtaaatatctcgatagtaaaatgtaa

SEQ ID NO: 292547 - DNA, 333 bp, Morganella morganii
  misc_feature (283)..(292): n is a, c, g, or t
atgaataatgaatttaaattaatgttaattacaaacaaaccagatgttgctgaatatgctgataacattggcgtgcacagaatttttatagatctggagatcaatggaaaagttaaacgacagggacatttagatactgttatcagtgaccatcaacttcaggatatactgccagtaaaaaaatcactacagaacgcagagttattagttcgtattaacccattatttgatggtacacaacatgaagttgattatgcaattgagtcaggcgctgatatcatcnnnnnnnnnnttacaatatcatctaatgattcagctgctcccgatgtttaa

SEQ ID NO: 292548 - DNA, 1008 bp, Morganella morganii
atgaaaaatgaattagaggccttcgttcaaaataatggtcttacaggtgagatgtttttcatcataaacgataatgacaactatatttatcgacgtgttattttacatgatgaaaatactgaacctctcatcactgaaaatttcaaaaaatctatcactgatgaaattataaagagaatatctattaacgataatggtgatgcaataatagataatatcacggatatgaattatgaacataaaggtgtttactattttgatatcgccagcgaagataaaagcactatcattaaaataattgaagaaatatcgtcgttgacagttgctgacaaccctattgactttaaattcaatgacgtaaatctcgataacattattggtcttgtttatcacatgagtgatggtgataaaaatatttttttgtatcaacatagataccccaattttttacacaaaaaatcaaggctctcatttttaggtgagggggatgtattagttcctataccttacgatatgataaacatatccaaagtaattgatttttttgtttttgatggaattagttatgctattaacattaaattattagaagaaagatatggacttactcaagtaattgacaatatggtttctgaagtaactccaaaaatcattgaaatggagattgtcaataaatctgtcttagccgagccagagaaaatcttcgacgatatgaaagatgatcgtggtttcatgagaaaattagccagagttcttaaaaacggaatattggaactaaatatcgatgttaacattgttaatgagataaagactagtttccccacaataggaaggaatattgatataattaatgatgataatggtatgcaatatataaagctgacaagtaaagcacgcaaaaaagcttttatcagattgttgaatgatgaagccgtacgttcagtcttaacacaaaagccatcgattgcacaaaatcacaaacctgaaaaaaatatcactcccacatga

SEQ ID NO: 292549 - DNA, 636 bp, Morganella morganii
atgacatctactaattctaacagtgcatcatgcgacaatataaagttcaaatattatctttattttttatctttgtggattttatttctatctgtttcaataatgtcctttgattgggtttttattgaaagattggttagatttattttattgaagtatacatttgaggatgtatttaacaactttaacaagttaaaagtcaggaactttgttttcattttctgtatttcgatggttttttcgggtatttcatctgtagtatatttattttcatcgttatcaagaggttggggaagcactcataaagtgagtaacgttaaaaatcaaacgcatgaacatcttgaatttttaactacttatgttatgcctcttgtattcactgacgttaatagcaaaagaacagtaatcaacctgctgctgatgatttgttttatcggtgttatttatgtcaggacaaacagattttatgccaacccatcgttggcaatacttggcttcaggttatataaatgtgttattaaaaatgatccttctggtaaggagtacacagtaatatgcagggggaaaatgtctaatgattgtcaagttaaaataaagaaaattgatgatgatactttgatcgcaaaacttatttga

SEQ ID NO: 292550 - DNA, 1008 bp, Morganella morganii; identical to SEQ ID NO: 14128

SEQ ID NO: 292551 - DNA, 1107 bp, Morganella morganii
  misc_feature (251)..(260): n is a, c, g, or t
atgacaacagttattgcaacagaaattaaaagcgaaaaaatacatttgcgtataactccctctcagaaagaaacttggagagccttagctgaagctcaaggtgttagtttggctgcttggattgaaaataaaatatcgatagctttagcatcaaacaatgacactttccaaaaagaaaaatataaacttatttctcttttttctggttgtggcgggacggacttaggtttttgtggtgggttttctgtacnnnnnnnnnntaaacaatataaaaaaacaaaatttgaaataacttgggcaaatgaatttaatcctaatgcagttaaaacatataaaaaaaatttcagccataatatagctgagggtgatatttgggaacttatagatttagtgcctaacgaatgtgatgttttaattggtgggttcccttgtcaagatatatctatcaatggcaaaagagcgggcgtcgatggtaaacgtagtggtttatatcttgcgatggtggaagcagtcaaacgctctcgcccaaaaatttttgtcgccgaaaatgttaaagggcttcttatgaaatacaacgaggagtcgttagctcgtgttattaaagattttagcgaactcggttacaatgttagctataaactttataattcagctaattttggagttcctcaaacgagagagcgcgtttttatagtcgggactctacacggaaatccactctttaaagaacccgttgatatactgcataaaaacgaatggttgacttgttatgatgcaattcatgatttagaaaatatcgatgaagatcgtatctttaaccatatctggagtaaagcaaaaaaaagcccagaccaaggaagtaggcgtttgaaagaagataaaccatctcagaccataagggccgaatgccatggtaatatacaatttcattataaactggacagacgtatctcaatgagagaagccgctcgtcttcaatcatttcctgataactttgtttttgagtcaaatttgagagaaactgaaagacaagttggaaatgcagttcctcctgttttagcttggcatttagcgcaagccgttgaggaatatttagacaaattataa

SEQ ID NO: 292552 - DNA, 711 bp, Morganella morganii
atgagagcaatcagtttaacaaaaaacgaatctgattacggtataaaaatcagcgatactttttggaataaaaatcatattgtcactacagccaatgttttagcgtcacgtgatgaagaattggttgcgcacattctactgtctattttactaggaggtaaaagtcaaaccgcatcaaatttcctgaatgatgcatatcttgaaggtgcccctaccaatgtaaaagctaatgattcaatagctaagcacggaatagataccctatataaacagttttgctttgtatatgatgagataaagaaaacaataaacgaattcccttgcatttactccaagcatctatataagagcaagcctgtaggtgtttcagattcttttcaggtagttttccttgctttttatgaaaagatgtttaagcagaataaaaaaatacagaactataaatcactatccaaattaatgaaaggcttagccagtgagtgtatgtcaggattaagcaataatagaaaatggacatctgctgacaggacaagaatgataagggctgtatcaggtgtgctctcaccacagtttattgctagagagggaatggatccaatatcacaatcttgggtagagaaccttgaaaatattttaaatcaatcccgaacagaaaatgtttgctatgattttaagattggtttttacccgctcaacgaatccaatgattaa

SEQ ID NO: 292553 - DNA, 441 bp, Morganella morganii
atggcaaattctcatgcgggagaaaattatatagttgtaggtgttgctgataatcatcgtgatgcagaaaaatattgcgagaagtataaatccaaagctagaaaatgtggtgagttttatataacaggaataaaccacgaagctgatgcgaatataacgaacattgacaggtatcaacaaaaaataaagcaactaattgaaagggaaccaataaatgacacaacaaaaagattaatattacgaaatatcctactttgcaaatattatgacaaagatgttttaatcttaaagataatccgtggtaaagatccaattaaatatgatgggagtatttatattcgtaaaatggctaatacagaccctaccccaatcgctcaggacgatgagttcgaattttataaagaatttatcgagcaatcttcacgttatccatatttatag

SEQ ID NO: 292554 - DNA, 552 bp, Morganella morganii
atgcgtaaatttttagccattgcgggccttaccgtgttgttatcaggctgcggtgaaaaaggtgattttgagaaagctatcaatgcgaagatttcacattcaaagctgtgctactccttgcaggataatgacattgtgttcaataagggcttccccatccgggtcaaccatggctaccgttcagcggggtatagtgccagtgatgaaatattgaaaggtctggctaatcaggggctgcttgatgtttctcaacaagctaatggtttcagtagtgtcgatgttctggaagtaacagacaaaggccaagcggttgagttttgggatcgtaaagatggtgcctgtgttggtcatcgtgcggttgctgagataaaggaatggactgaaccgggaaacggtaatcagaaagttgttcgcgtgtcttatacatggaagttggcggatgttccttcatgggtagacaaaaaagtgttctcaagtgtcaagggtatgaatgaacctgaagagagcatgattaatcttgttaaaaccagcaatggctggaaagcgatctaa

SEQ ID NO: 292555 - DNA, 558 bp, Morganella morganii
atgccactggtactgtctgctgccgcactaacaggatgccagcagctcaacgacggcgtgaatacaattaatggagcaatcagctcgtcgttgtcttcagtaggtaaagcgctggggggaacagccaccactcaaagccttggcccggtatcatctgtatctggccttggtgctgtttgcaaagactatgaagaaaatgcaatggcagcagaaaagaaatggactggcaaaaggatctctatcagcaacgcaactgttcttgaagttacgaagggcagaagtgccagcgacatgatgacgggaatgccgaaatcagcccctaactattatctgctctttaaaacctctgataccagctactgcggcgggatggtctggctggattactactccggtattgataatgtagttcttacttataagaaaggccagaaagtcagcgtcaccggaactgtaaacaatttcgaagtccgtggattcgctaccgtcaacaatgccgatatgccagttcgtctggttgttctgaaaaacggcactatcagtcacaaaaagggataa

SEQ ID NO: 292556 - DNA, 468 bp, Morganella morganii
atgaggaaagtaaaattagacaatgatgatttaattaagtatctgaacaccattaaagcattaaaaaaatatccaacgatgtctgaatacagagaggaatatcgcaggctaagaaccgatggctcacccttgattgaagcaaaaaaatttaaatcggcgcataccgaacttctgagattagacaggaagaaaaaatcactgctcgaaaaatttattgaagaactcaaccctgtcagtcacgtatcagcccttgcgtcaagaaagcttgaaaaagtacaggagtccattatctaccgaaagtcattacttgagaaaagccctgatgaactcgtcgctctggtcataaaacagcgcatagaagcagctcttgagttccagcattctgttgagcaaagtcttgagcaactttctggtatatcttctgattttaatgcatcagcaacaaagcgccgaaaattttctatctag

SEQ ID NO: 292557 - DNA, 237 bp, Morganella morganii
ttggttgatgaatttcatgtaatgtatatgtataaaaaaatccaagccgaagctgcggcaacagatatgaaaacactggaacagcttttgaggaagtttcgcaaagttgttgcggagcgtcgggaagaatactatcgggagattggtgagaaaaaggctcagaatttgagggctaagagattacaaaagttgcttgagaaaatggagcgtgatcgtgtatcaccacatgagttataa

SEQ ID NO: 292558 - DNA, 297 bp, Morganella morganii
atgtctaaagaaaatgtagtaacaaataagtctacacagctgttccttgatcttgctataagatcattggaggcaagctggaagctttttcaggaagtgaatggagatggagatgctaatgactatcttgatgatcctgatttcatgagtccatttattatgaacatcattgaccatattcagaataactttgagaagtttacgacccaagaaggagattacggtgatattaaggaagttaactttgagcagattgctgctctgttagtgtggcattcagaacgattcagaaaataa

SEQ ID NO: 292559 - DNA, 237 bp, Morganella morganii
atgaatgataatattgcaatatcagtaagtctgctatgtgagcaaacacctgaaatactctgtaccatccaagcaagcgtcagtacgttcattgcgctatgcgggtattcagccgaggaagtaatggatgatgaaaacctgacagatgcgttgaacagttatgttaataacgaactggtcagtgaaatggatttaagatatggatcagtgatcattaatctggtttataaaaagtag

SEQ ID NO: 292560 - DNA, 489 bp, Morganella morganii
atgaaaaaattatttatttctggtatcatagtatctattgctttactgataggtcgtatttctggttttttcagagaaatttttgtcgcatctatatttggtgtatctgttcattctgatatcactatcttgctgcttaccgtatctgatttacttgtcaatttattagttggcggtgcatttagtatggtactaataccagcctttaaatcagaaccatcacgtgtagctaacatgctgtatctgcaatcttttattttttcaggtatcttattttttctgataagtctgttaataggaattaacgcagaatattttgtttatttaattgcccccggacttagtaatttccatgaagtagattatattccttatgtcagatatgtattactggcaattcctctgactgtaatggcaggtgtagttacagcttacatgcagtttaaagagaagtttagccatccccatatgttgatgatatcgccctga

SEQ ID NO: 292561 - DNA, 477 bp, Morganella morganii
atgaaaattgttatcattaaatacagatatctgaatctggtttatgaccgcaaaaacgatcggattctgggtgttgatcagggaatcgatcgtgacaagtaccgcaactatcatctgaaagaaacctatactcgccgcagcagcgggcatcgcctgttcgctctgaacgctcaggacggcaaacttctggccagcatcgagaccaaagatgtaccgatttccctgctgctggatgaagatagcgaaaggatttacgtcaccaatcgcggtggcattcgagtggagaaaggcgtgggctcgctttccgtctttgagagtaaaacactggctcatctgcaaaccctcccgctgcttccacacccaaacagtctggcactggatagcaaagcgcacgcgctgtttgtcaccgtgaaaaacgacggtgcggcggcaaaagccaataacaacgagagcgtcgtgcgcattcctctgcactga

SEQ ID NO: 292562 - DNA, 480 bp, Morganella morganii
ttgctgtcgggccttttattgtgcacaataaaaaagcgatatcactatcgggttttcgatcagttaaatcagtacagaagcctcaccctccgtaatgtggtaatgaatcaagaatatagtccggtcccgtcacatcctggaaaccgtcctcattctcatcatcactgtactcaatctcatcagattcatggtctgttaaccggtcatggtcatactcgctgtatccgcagaaaccacagccttcttcagcataaatatgacgaacctgacaacggaaacgcgcagacagaacacacaaaaccgctgctgacgacggactctacggggtctcaaacgtcactgacagcgctgctgcatcccagtcatcaagacagtgaaaaccactgctgttcggccatttcacaccataacggcactgataaaggtgatatgtattgttaccgggggcaaacgcctgccagctctcctgccgccagatga

SEQ ID NO: 292563 - DNA, 144 bp, Morganella morganii
atgggatatacacattattttacacaaaaacaaagcgttgaccccctgatgtggcagaacttccgtgaacatctggacaagctctatcatcactatctggcagatcccatatccgcagagcagaatgtgctcggcatgaactga

SEQ ID NO: 292564 - DNA, 600 bp, Morganella morganii
gtgaaaatcatttcacttttttttattttgaatgctccggtttatgcaaaaacattatttttaggtgattccttgacagctgtttatgaaaaatcagcaaaaggagttgttgacgataaaataaaagcgaaatatgtttccggttcggggttaataaataaaagcaaaaaggactggatcgcttttgtgaataattttgatttgcgggaatttgataatatcattattagtctcgggacaaatgattttgttcagtatgatcagaataacagtcttgaatattatagtcgtgtgttcgaagtgattgctgaaattcaaactcaaaatccgttggcaacgattatctggatatctccgccacatttaaaaaatccggaacatgaacgttatttaatacatacccggcatataattaaacacagtgcgatgttattaaatattcattatctggatattaatcagccccatattttaggggcgcaatggcaatctgttattcataatgacactgtccggactggggatggaatacatatcacccgcaaagggggcgaacgggtaatgaatgaaatagtaaaaatcctgaataaacggggttga

SEQ ID NO: 292565 - DNA, 393 bp, Morganella morganii
atgaacgctgtcatcttgcagattaattgtatcgaaatagtatcagaagtgaatgaggcagggaggatttgggaagaggctcgcgtctgttttgaagcattgaccccattatctgaaacggatacatgtgccatgattacccgttattttgatactgtaaaagattttaatacgttaataaaattaaccccgccgttatcttcaatgacaggttcttttattatcatttcagagaaaaataaaaatcctgttcagaagttaaaatatacgatccctgtgacggaggaattacttaatcttattctttgtggagagtatgaatatcagaatgaaagtcatgagcaatttacgttggcctggttgggtgattttaaatttatttaccggacgtag

SEQ ID NO: 292566 - DNA, 900 bp, Morganella morganii
atgtcaagacgtgaaaaaatgcttaaaagggatttggttaacgccatcaaaaaaggcggtgggagttttaaaaccgtttcggattattcaaagatattgcaacgtgtaggtagccgtctagcggcacttaatatacaaatcaattccgtcaggcaaattaaagtcaggcacgttgaactttatatggatagccgtaaaaatgatggagtggctaacagaacattacaaaatgaaatgacggcaatccgccgggcactggacttgagtggaaaaacgatgatggcagatccaaaacatgagcgtctgagtaataaagcactcggtattgccggtggcagccgcaaaggtacgaaagaagcgataactgacagtcgttatcgggaggtgctcgagcgtgttcagcaggttgacaaaggtgttgcggctgccatgcaattatcccgctatctgggacttcgtaatgaggaggcagtgcaatcagctaaatcactgaagacctggcaaaaagcacttatgcgtggggataataaattgcaggttatttttggcactaaaggcgggcgggccaggatgacaacagtggtcgatcgaccaaaggtgctggaagcggtcaataatgcgttatcgcattgtgagaaacagaacggaaaactgattgaaaaaagcgaattaaaatccgcactaaaccattatatcaacgtattacggcgtaatggcggattgaccggcagaaaagaaaccccgcacagtttgcgttatagctatgcacgggatgcgatgcattttcatattgctaatggttacagctataaagaggcactggcgctcacatcgatggatttagggcacggcgatggacggggtacatatattgagaatgtctattgccagaaaatgtaa

SEQ ID NO: 292567 - DNA, 333 bp, Morganella morganii
atgagcgctagagactttacatataacgatatttttgacaataaagaagcattttttgaaaaaaaaggtagttccgtcatggtattgacaccaaaagcagccattgatgtatgtcaggaagctacaaaacgtaacttgtggattttgggtgttgacggtggctactggcggaatcctggttttcaaattgacggaactacttcatggtcatgtaaaaccaaactacgtgaacaaaataaattgtctgaaaataatcaattagcaattgataatatcaaagatgatgctgaatctgggtatacagcatttttagtgacaataatggatcactaa

SEQ ID NO: 292568 - DNA, 1602 bp, Morganella morganii
atgggtgataccatcactgttaccggtacacaaccgactggaccaaccaatacagaccccattcccggaacaggcggaatcggccgtattccggtaatccctaatcccggattattacctcggctggaaaaggcccgcaaaaacccggaaaccattgctgaaattaacgagcgtgttctcaaaaccactgcgatggcggccattccgctggccggtgcgcattctacggcagctacatggggattcacgtatacatctggaactgcgggtacttatctcggtctgaaagaactcagcgctacaatcagtaaatcgctggataaggccatcagcaaatcgcttcctgtactgggcaggatggcgggagtggccggtctgctgttttacccgaataccagtatcatgtctcaggaagatgaaatgcgggagttaaacgaatggcgtacagcgtacggtgcggtggataatgctcaccgtgttgttgtcaccgccgcggatattatcagccgtgtgcctgaaaaaaacattccgcagctttccgcggttgaaagccattttcagatgcagagcgtgattgatattaaaactgataaacagattatcgccgccacaccagctgccggtaagatcccggtggtgaaggctgttaaaacggataaaccggatgtgtttaaagcgcagatagtgccggggatgccagcattccatatcaggatggacagtacggacaaaaaaccggcaactcctgtgccagaaccggctaaaagtttaaccgcaacacaatatctaactgagcctgcagcgaacactcatcaggcgtttgtctggtttgagggcgcaccgcatatccgtccggtttatgtttccgtgtcaaaaattctgagtgaggcggaacagaaagcacaggcggaagaagcgaaaaaacgggaacagaaggctcttacagagcaggaaaaagcccttattgcggcagagcaggagctccatgcggcggttttagtgctgacaaaggcacaggcagacgagaacttgcataaattcgcagtggtagcggcacagaaagcttatgacgttcagaaagcggaatatgatgactggctgcggcgttttccgtcgggttttgtgaagctgaatccgataaccccactgaatattcataacgtgtacgggtcgaaaaccaaagctagggaagcagagctgaatgaagctagacatttactggcaatagcggtggaaagccgcaaacaggcggaaggcaagaaaaaagccgctgaggataaggttaaggaagccaaagacaaaaaaggaaaaacacctgaactcaaatttgatgacaaaattaagaaggatatgcgagatcgtagttggactgagcaggacatcaaagacactgtagccaaaggaccgacaggaaaatctgttgatcagcgcagaccggtaaaaaccgaagacggcttagggcgaaatgacccagccacagtctatggaaaaccgggagaatatgtggtgattaatgaccgcaccggtgaggtaactcaggtaagtgacaaaaaagatctaggatggatggatgactcacgcattcaatgggagaaaaaataa

SEQ ID NO: 292569 - DNA, 270 bp, Morganella morganii
atgcttggttttagtgttggtctgataatgttagggttcgtggtgttcttcccggttatttatttaatcggctatggttttacttattttgattcgtggcggttaggtaaggaaataccacggcataaaataaaagttaatgtcgtgctcggtattatcctgggggtcatattgggcggggttgcacagcatatatgggatggcctaaatggctgtatgcagctaggttatccctttggtaaatgttttttaatgttagataaaatgtga

SEQ ID NO: 292570 - DNA, 534 bp, Morganella morganii; identical to SEQ ID NO: 81810

SEQ ID NO: 292571 - DNA, 444 bp, Morganella morganii
atgaatatcgaaatgattatcagtgtgctatctatggtttctttctttttgtcatttttcttttacgaaagaaaaaagaaggttccacttacctcaaataaagcaatgaacgattttttcagtggggttttctttttaagagaaaataacattaatttgattgttgggcggtgttcaatatttttaggaataccagtctcttactttattgtattcgtaaaaaatagatatggaattgaataccttccatcaataatttcgttgtggattgttgcagtttatttttttatatactcatcagtgttaggtgatagagaagttattaatcgagattttttttatgagttatttgtttctaatggggaaaaaggctttagaatttatttatggtgcgttaggttgatttttatttcatcaatcatgtttgcttttatctttagataa

SEQ ID NO: 292572 - DNA, 966 bp, Morganella morganii
atgcaggcggcaacggcagcggttcagggcgtgatgggcggagacctgaaggcggcgctggcgaatggtgcagcaccgtttatcgcaaatgaaataaaaaaacagatcccggatgaagaaaccgatgccaatctgaaacgcaccatcgcccatggtatagcaaatgccgcccttgcgctggccaaaggcgagaatgttgcggcacaggcggccggggcgatgactggagaagccatcggtatactggctgaatatatctacaacaaacagccgggtgaactgacagagcaggaaaaagagaatgtcagtgtctgggcaacgctggcgtcaggtcttgccggtggtctggcaggcggagatatacagagtgtggcgaacgcagcccaggcagggaaaacaaccgttgagaataatacatttggccccaatacattttttggacaaatggcaaactccgtaaatccagatgcaactttagcatttgatttaatgggtaagggaaccgcagttgatgaaattaataaggctatagaatatagtcatcagcggccatcgtggggagttgagtataaggtgaaaccttatgtgaagggtgaagcagctttgggaataggaccagggtatttttatgatgccagtgttgacccatctcagtttgcgattaatggaggagaaactctggcgattggggggcgtgtttcaggacaagtaggcattcaatttggtccatattttcctgatataggtggaactgagcgaaatacttcttttggtgtgggatttggtgtgggtaacatagaaatttcccatggaaaagatggtgttggattaagtttaggggccgggccttcttggggatggagtggtatatctaagagtataggcggcgaatctattgatataaatggttcttcaggaactgaaaaatacaagtatgaatttaataatagtggggctgataaatga

SEQ ID NO: 292573 - DNA, 372 bp, Morganella morganii
atgaaggttacaccaccgaatccaccaacaaatattcagcaaaatagtgaaaaaggtaaagggtttgaacaaaagttcttcgagaaatatcaacaagaaaacgttatttctcaaaggaaaatcacaataaaaacagagaatagaactaaggttagggttgatatgaacggtaaagatgaacatggagtaataaactgtgttgagtgtaaaagttctcaaactgcatctttaactgataatcaaaaaactggatgcccagatttagaaagaaatggtggggtaatagtcggtgaaggtaaacctggttttgaagggggaacaaaattacctccaactaaagtcgaaatcgtcagaccagaaagcgaaaagtag

SEQ ID NO: 292574 - DNA, 354 bp, Morganella morganii
atgaatagcaagtgggatttattttcattgcagggaaatgtgattagggagctaagcggctttttgtttattacaatggttgatggttcacttaaaggatttatagcggattcagataacataaatagtacagataaatgtactaagataattttatcagaaagtaatattaaaaaaatttttgagcaagatgaaacatttggaagtttagttggcagcgaatatttttattttgctatgcccatcatattgaaagatgttgttgtatgccaggaaaatcatgagtttatattgattgaaagtagtgttttaatattattcgaagatgatataaaacaagaaatatttatttga

SEQ ID NO: 292575 - DNA, 984 bp, Morganella morganii
atggaagcggcagtgatcgcttgccaaggtgatatggaatgtcaacgcaaagaatatgcaacgataaaaacagattatgataaccgctatagagaacatgtaaaaatagtcacagaaaatacatctttgggggatttggattatcaatattatccagataacacacgagttgagagtgttattgatggagttgtgaatacaggcccagaaaaagtagtagatcttgctacaaatgtgactaactatgtaactaatcattctgctagtgaaatgcttggtgataccctccaagttggtaaaatagttattggtattcctcaggagtggttgagtcaagatattcccgctcagtcattagagaaagctttattttccttaggtgtatcaacaggacatgaaattggtgaagctactttttacaacatggctggtacatcagtagtttctgttggtgggaaagctcttcagtggagcaatggcaaatggatccctgtaaaaataggaaatctggaaccaggaaaccctttaagcacaagtatagtaagaaatggtgatagattagtccttaatcagggtaatttacctacatgcggccctaattcgtgtgcaatggttatgaatacttcagggctgaattatgatctcggaaagttaattactgatgctaaagttactcctcagggagctagaatgaacaatttagcttcagcaatgagaaaccaaggacttgccgatgctcgctttatatctagagtatccgttgaggagcttgctgttgcaacatcaaaaggaaatccagcaattgttgcaatgaagcttgatagaggtggtcatgcggtagttgttgatgggattacagtcaggaacggtcaaactgttgttgcaatacgggatcctgcattaggaagacaatattttacccctattgatgaatttaaaaataaatatatgggacaggcaataatcacgtcaccgaaaaaataa

SEQ ID NO: 292576 - DNA, 429 bp, Morganella morganii
atgtctaacaccagtaagatgtatcaccacatcaaagaacacatagaaaaaatcagaaatgccccgcaagttggggaggcagaccagtttctatctaatcaggtcataaaccgagcctgcttaattctgtcactggaatacctgttatctgattaccgccagaagcacagcacgatatttaaccccctgaacggtaaagatgccctgattcaccttattattaataaatataattggctgatttccgatgttcgcaaaatgccacttaatgatttattactggccgtaaccaacgaactatctttcactaatcttcccgatgagtgtaaaaatttcctggtatctattcattacgataaataccataattgctttgaggacttcccagatgaagagtgggatgcctctatttctcagttatatttataa

SEQ ID NO: 292577 - DNA, 210 bp, Morganella morganii
atgacagtagagaagaaagaaccggccattatcccgaacggcaattccattgaggaaatatatcagtggatggaaaagaaactggaggcgcggaagttagtggtaacactggaaacgcaactgaaatcactaaattccgcacagtgtactacgcaggagcaacttaatgatgcaagctccgcttcagttataaatataactgagaaatag

SEQ ID NO: 292578 - DNA, 3117 bp, Morganella morganii
atgtcaaaaaatacacaatgtaatccctggtatatccacaatttacagctggaatataaaatggaaaatgtattatttgttaatatcagtgatatacatgtaagtgataataacaaagatagagtgataaataaacttaataggtttattggttttttgaatgtattaagtattgatcatgataatatatttatattagtgtctggtgatatagcatatagtggtaaaaaagaagaatatgattatatctatcctcattttgaagaactggcaacaaaatacaatttaatattatgtccagggaatcatgatcatgatttttcttgttatgattcgattgtgcgcaaccagctattaaaggcagacgtcaatacccttgatgatgaggcccttgaattaataatcaaggggatgaatcattatatagaatttgaagattcattgaccttatttgaacctagagaagaaaataaattatcaaagtcatatttgattaagctggaagatagaaaattagaaattacaacatataacacagcttggtgttctcaattacatgaaaaaggcgggagtatgtctttcccaactaagtgtataattgagccttcccagtgtgaaattaatataacaatgtttcatcatccattgtcttggcttgaacctaataacaatagacatttgagaaatatcttacgtgaaaatagtaatattgttattacaggtcatgagcatgtagatgatagttttaaagttgaaagtgagagtaataagtgccttatgcttgaggccatgccatttgatgatgactggagcgaagataatggcttcttaacttttaagtttgaaagtaatgatataattatccgcccctttaaatggcaagataatgaatttgtaaaaataaatgaaattagacaaagtgagattattaaaagtaattctatcagtatacataattacacagtaaaaatggattacttaaagtctataagagatattggtgtcaattttattcatccagataaagatgatttgactttagaggatatatttgtttatccaaacttaaggaaaattgatagtgacaacaagcttgatatgaaaaatttttcatcaggtaatatactttctggtgataaaagaaaagtaattttagttggggatgagtattgtgggaaatcaacgcttttgaagaaatattttcttgatgctgcaaaaaaagggtatttacccgtatcaattgattgtagcatggtcaagagagctgggattgaatatgataaaacgcttcagaaatctttaattctgcaatatgaaaatttaagtttaactgactttgttaatagtgaaataactaaagtagcattaattgatagttttgatttaattcgaggtgataaaaaatctattgaggtttttctagataaaacatctcgggtctttgatatagttataatttctgtaagtgatagttttgattttaatggtagtgaattaattggtgaaaattattttgatgagacatttgaaaaatatgaaatgttgcgacttgggtataagcttagatatgatttagtccataaatggaactctttaaaagaagaatgttgtaatgaaagtaaactattactagcaaaaaatgatcttactttcaaaacaatctcgcgagttattggtaggaattatattccatcaacaccattttttcttcttacgctattgcaatctatggatagtgggaactctttagatgtcaatgctagctcatatggttactattatgaatatttgatcactcatagtctaggaagtgcctctgtaagaaaagaggagctagatgaatttttcaattatgtaaaagaactatcgtttcattattttacaaaaaatatcaaggaggaaacaaaagataacttatgggatttcaatactaaattttgtcaggaatatggagttagaattgattatgaaacgagaatatctctacttgtaaaagcaaaaataatggagtgtaaaaatgatgggtactataaattcaaatatccatatgtatattatttctttatagctaaacatttggctgaaacaattagggatgaggatacagtagagataatagataatcttataggtacgttaggaaaaagacgtagtatgagtattttgatgtttttaactcatcattcgagggatgagtctattttggataaggttgttgagcaggcgaaaaaacttttcaaggataataaaccagctcatcttaatttaaatatacagtcaattaatgatattattgactcacttccaacattgagttttgagaaaaaagatcgctttcaattacgtcgtgaatatgagaatagtagagatgagattgaaggtaatcatgagttccatagcattgatgatgaggaagatgataatggtgatagcctgcatgatagtaacagcgaggatcaggtaacaactgatcttttaaaagaaatgaatttgacatttaaatcattagagatattgggacagttatctagaaattactatggttcattaaaggtaccacaaaaaaaacgcttattaggtgaggcaattgatgccccgctaaggtctcttgatttttttatcagttacatcaaagatgatgctgatgttgttctggacactattgaacgtaaaattgctgaacagaacagcgaaagaaatattaattatacgcaattgcaattaagagaaattgcaaaacatttattattccaattagtacttggcttaagttatacttttataacaaagatatcatcctctattggtagtaataacttacaaccagtaattgatgagttatgcgatgctcataattcaaatgcgggtaaaatattaaaattagcaacgcttcttgagttaggtaactctataactgttgagcatttaagaaatatacttcaaagtcttgataagaatccaatatcggataacttagttaaaagcatcatattaaattatctatatatgtttgagcgttctgatgccgaagttaaacaaatatgcgctgtggcaggaataaattataattctgtatcacgacaaattggttttgataagctaactaagaaaaattaa

SEQ ID NO: 292579 - DNA, 405 bp, Morganella morganii
atgagtgataaaacaactgtttccagaggtgaacgttggggcatcaaactcgcacatggaacaaaatggggaatacgcagcgttaaaaaactggatcgctactgtacagaaaaagtaaaagaaaaaggttttcctggctggttaggtcatttgccaaaaatcattatcattaccattctgattttggtcgttgtatttaatctttctttattattcattttattctgtttatacttattattacatgtcaagtatgatgatgcatctggtatattgaatacttcaaagtcaaaatgctctctctttaatgatgatcctcttgttgaaagaacatacgatagcgttaactcaatagatgatggtgctccatatggagagtctcatggaacatggggaaataactaa

SEQ ID NO: 292580 - DNA, 126 bp, Morganella morganii
atgaaaaaagcgccggggctggttgaacccctggagtttatttttacatcgctgaacagatgcaacagcaaggcgttatcgaaaggtaacgcctttttatttgacaaaagttattcagctatgtga

SEQ ID NO: 292581 - DNA, 714 bp, Morganella morganii
atgatagatgtcgaaaaaaacaatgaggcggaagatgttacctcgttgcgggcagggccgttaaaatcacaattgtcacttacgatccatactgatgttgctatccagctgtggaaagggcgtaagcgaaataataaaagcaattctgatagtgaaaatcgttggttaacacccagtgttcctttgtttctggccaccgctgcgcgtgtgactgatgatgcactgaaagggttattgtttgcagaaatgtggttatacaggctggaacaacatctgaatacaagagaagagcgaatttcttcattgattcagaaaatggaggatacgctgaaagttatccctaaaaatgtgaatatttctgagatcgcatccgttgctccggttaatttgggggtatacagccgaacgcctgttgggtatcgctgtgtctggcttttaattggtgttgatcaattagctttaaaagttcttcaggcttatcactatgggttacttagccgacagttgagggataaaacactggatgatgcctgtcatcaggtacgcagtattttagggatggcttttcgttaccggcaaattctgattaatcgtcataaccttgatattcataatgatatgtatcagcaggcggttaagttctttggtgaattagatgctgatattatctgcgggaaaaaacgttctgcttttttacctgttctcaaacattaa

SEQ ID NO: 292582 - DNA, 696 bp, Morganella morganii
gtggcgaacgcagctcaggcagggaaaacaactgttgagaataacgggattagtgacggatttaaactctcgaaaggaatggcagaatatggattgtcagcattgacactggctaattcaatgtcaaaggataacaaatcaccacaagaagttaccgccgcattatctaaacatgcgaaaggcgatctccctgaaggacaagatccagccagaggtttactggttgcatgggcaccagttcctgcgattgcagccagtacagttatagcaccggcaacagcgacatatgggtttttgtttggaggggcattaggtggcgcaacagatgcgacgcagcaacttatcacgatgaaaccgggcgaaacatatagttatacagatacgttgattgcaataggtacaggctctctgacacaaggtaaaggtgttatatttacaacggtagtgaatggaggaggggcctatttggggagctcaattaagcgtgaagatccaacagcatcagtagcaggttcgatttttggttcagtgctgggaggaacaacgtcaaataaagttactaataaattgatagataaaggatatggtcctgttacatcaggggttgcaggagatgttgcgggggctatagtggaatcatcatctgaaaataccattaaacaaataattaaggatggtgaaaatgaaaagaaataa

SEQ ID NO: 292583 - DNA, 294 bp, Morganella morganii
atgaaaagaaataatctacttaattttaagatagttatatgggttttattctttcctttaataggagctttgctatcaatttgcggtgtttttattgggtatgttgttgcttattttaaattgggtgtttttcctattgaaacaatctttcctaaaatagttgatgccataaagcctggcgtagttgttgggttgttattaggccttagcttatggatatggggaatagttattcctgaactaaccggtaaacttaaatcagataagaaagatgataacgatacgaaacaatag

SEQ ID NO: 292584 - DNA, 339 bp, Morganella morganii
atgaacaaatatcgtgacaaatcagactttgagattaataaggctgtggctgaaattacaatctacggtgattggtatttatcaccaacggatgaacgacctttcacattcttcaattatggtattaattcaagcaaaacagtagagctacctgattattgcaacaacccagcggacgcaatgccgattattaacgagtatggaattagcctcatatatcaagagggagaatttcagtttgcaactaatgacgggaatatagagtgtagcattagcaatccactgaaagccgcaatgattattttcctgatgatgaaggatgcggagaatgaaaaatag

SEQ ID NO: 292585 - DNA, 222 bp, Morganella morganii
gtgaaggttaagttattgaatgatggtggctatgctgggctggagaacattattttcccagtggttgttgaggttaacaatcattatgactcagggtttgatgttgccggatcggagctaatcctcatcggcggagatggagagcatttaaatatcaatttcgattactatttttctatcagcatcggagaatgcgaggcaatcaatgaacaaatatcgtga

SEQ ID NO: 292586 - DNA, 321 bp, Morganella morganii
atgtattcatttgattttataattacactggtgaaaggaatggggaaagtaagaatattattatgtatcgttaatgtatttcttcttgtgatggggtgtattatattcaacaacagtaattttttctatagtaattattacagcacggacaaagtaatggttggacttattatgatcgtccctgctattttaaatatgatatatatatttaaatgcaattgtcacgataaaaaagagacaggaaataactcgctgttctcattatggattaaacgtaaaaaattagagaatgaagcaaaaataaaagaattagagaaataa

SEQ ID NO: 292587 - DNA, 723 bp, Morganella morganii
atgactaacgtcagcatttccgtatctaaactcccatctattattcacaatagcgttcctgtgatcaccacagaccttctggctgatgtctatgagactgaaagcaaaaacatacacatgaattactcaagaaataatcagagatttattgctggtaagcatttctttaaactggaaggtactgaattaaaagaatttaaaaacagacccactaattgtgggtctgtcgcaaagcaggctcgcagcttaatcctctggaccgaacgcggcgctgcccgtcatgccaaaatgctggacaccgatcgcgcctgggacgtgtttgagattctggaagacaactacttcaccaaataccgcggtaccggcaggatcaataaatcgttaccccgcaatgcctctaccgatgaactgctggcgctggtggatcagttgcaacgcaaaatttacgacggggagtatatccctgccgggcaggtagcacaggaatatagcttcccgaaaacgaagaagtcacgttcgcagatcctcaatgacttcctccggtcgccggaagacgacaccctccaccagcttctcgcctatctgaaacgggacggccacaacgtggaagaagcagagcgcgtcctgatgtggctccgcgactatatgtgcgatatgggcaaaaccatcaacactatcattacccacgctcagtacatagaacacgccgtcagtaagttataa

SEQ ID NO: 292588 - DNA, 207 bp, Morganella morganii
atgcccagaatgcgggagccgaagaatacagaagccattccggccgcaccggctgtggttgccattccccccattgcctgtatcacaccgaaagaggcgatggaagcgagttccagcgcagccaccccggagacatttaccgctgcctgcagagccatcatgacgagctgcggagtgggattagtcaggttgagtttcatttcttga

SEQ ID NO: 292589 - DNA, 858 bp, Morganella morganii
atgaaaaaatcaataatcgcattatcagtgttagtcgctagttcagcatttttctccgtggcagcaagtgcatctgatacaaagtcattcgatcaattagctattcaagcggatgattcgtttgctctaaaagtgctaaaagcagctggaggcaataaaaacactcaggacgtcgaagtatcggctgaagattgggaaaaggttaatggttcttcaggctctgtcatggcgttgaatatggctgctggtacagctggtattggtgcatttggtggtagtggattaagtggtggtttattgaatgctggtttgttctttcttggctctacgaacaaaaagcccttggcttggtttaatctgatccaagtaattcctgcttctgaattaataagtcactcccagcaattatctgattatttagcgaaagatataggaacagaatataagattggaagcgtcaaaattgggagccaaatgactcatccaatgtttgttaagaatgcaaaagcccaactaccaccttacaaaaaagaagcagaatggtcatatttaacctatggtgtgtctgtacctaagtcgacattaaatgcagaacaggcttcatccttatttggccaatcatttgagtcaggggattatgtagtagtaacaacgacagttagtacatgcggtgagctggttctgctagataaactaaatgccctaaatacgacttatccctcatacctctatgtaccgcctgtaaataaagttgcgaatagggactgtcccgaggcagataaattaagagcagaatatcagcaggtgattgacttggataaaaaacagacccatttatttattaaaccgaaagcctaa

SEQ ID NO: 292590 - DNA, 594 bp, Morganella morganii
atgagtgacaattcaaccctgtttataactttggataaacaaataacagcgtggaactcatttttaaaaaacgaaaacaaacagatagatcatgacgaagccacaatttttgcactttcaacgtcagaaatgtatctacgttatatacacaaatctacggaactagagcaactacgctactactacatagcccagcgaatagccgatctctattggaagcacaatcgagaccatagagggaaagactctccaggatatccaggccattttggctgtcgagtaagattgcgagagatgaaattggaaattttctgggtttataatgagtttaagcctaaaaagaattctgacaaataccaggtgatcagccattacctccctcgtgagggcaattatcgctatccacaaagcacctttacccgagcacaagattgggaaaaaccggtgattactgctgttgaagatgctttctcaataatccgcagagccaactcaaatctaatgcgggttagacaactgtgccgttggaatgacaccaatctattcaaaatgacaggcgatatcgacgattttaagatggataatcctttatag

SEQ ID NO: 292591 - DNA, 2019 bp, Morganella morganii
atgagtttacaaaccaacctcaaaggccgactgagaaacacctctttacccaagagtcatggcttaatgccagtatttgaggcggtggtaaactccattcactctatagaggaaagggggaatagcgataacggcaagattattcttcgtatcaatcgcgcagcccaaggcagtctcgatttagacgctaagtccctgcctccgatcatcggtttcagcgtgaccgacaatggctgtggttttgatgaggccaactttcagtcatttgaaacccttgattccgaccataaaatagacaagggctgtcgaggtgtcggtcgcctgatgtggctaaaggtgtttgatcttgtcgaagtagaaagccattttatcgatggggatggccagcttaaaaaacgggtattccgctttgacgacaaatccggcgtccatggtgaaaaggttgtggagactaccgaacagcagtcgggcaccctcgtcaagctggccgggtttgacgacaactttcgaaagcaggttcccaccaaagggcagtccatcgccaatcaattgcttgaacatgtgctctggtactttgttcgtcaaggctgtgcacccaatatacaagtcgaagacgctggtgagattttcgaactggattccttgctcgaagaacatatgcacgctagtgcattcctcgaaacgataaaaatacgcgattattcgtttgacctaactcatatcaagtttcgtgcatcggtaaataaaaagcatcagctagctttatgcgcagctaatcgattggttaaagaagaatccattcaaggaaaaattcccggcttgtacggcaaaatatctgacgcatcaggggaatttacctatacctgttacgtgtcttctggctacctggatgagcgtgtacgcagcgagcgaacctcttttgatattgctgaaaacgtagaggacatgctcaacgaagtaagctttaaagatattcgcgatgcagtactcgcacgcacgaaagaatatctgcaagatgttttggcagaaaatgtctcggcgggtcgtaaacgcgtagatgattttattaatagccatgcaccgcgataccggcccattgctcactatgttgcagaagaacagctcattgttgacccagaaaagtcggacaaagacttagagttacacctgcatgctcagtggtatgaggtcgaacgacagttagtcagtgaggggcatgacatcatgcaacctcaaaatgaggagcacgtagaggagtacaagggacggctgagtgagtatctgaaaaaagctgaagacctgaaacaatcagatctcgctaattacgtatcacatcgaaaggtcattattgacctgctgcaaaaatccatcgagcgactagatgatggcaagtatgcccgtgaggatatgattcatgagctaatcatgcctatgcgcaaagattctagtgaggttttactggattcttgcaacctttggttgatcgatgaacgtttggcatttcacaactatttggcttccgacaaaacgctgaatgcaatgcctattactggtaatgattcaacaaaggaaccggatttactcagcctaagagtgttcgataacccgctgcttgttaatgatcaaaatagctttcccttagcatctatcaccgtggtcgagatcaaacgtccaatgcgcaacgatatgcgggaaggtgaagataaagacccgattgctcaagctctcggttatgtagagagaattcgcgagggtcaagcgaaaacaaaatcaggactacttattcctagaaatcatgatatccccgcatactgctatattgtgtgcgacctgacctctacaatggtaacgcgctgcaaaaactttagtttaaccatgactgcggatggcatgggattcttcgggtacaaccccaattacaaagcttatattgaggtcattagttttaatcagcttgtgagggccgcaaaggaacgtaaccgtgcattctttgacaagctcggactcccttccatgtaa

SEQ ID NO: 292592 - DNA, 1221 bp, Morganella morganii
atggaacaggttttgtataaactgccagatgggtgggagtggcattcagtcaaaaagcttagccataacatccagtatgggcacacggctaaagcagaaagtaacggtaacgcaaagttcttgcgtattactgatattcaagatggaaagatcgactggcagggagttccaacagtatccctagaagaaaaagaaatcagcaagtacgcgttgaatgatgatgacttgatctttgcccgtagtggtgcaactgcgggaaaatctattctaatcaagaatgcgccaaaggatgccgtattcgcatcttacttgattagaattgttccaaacaaaaaggacattattccagaatatttaagttatttcttcctatcacctgcttactgggaggttgttggtcagaatgccgcaggcgcagctcagcccaacatcaacggcacaaagctttcagagtttattgtacctgtggctcctcaaggagaacagaaacgcatcgtcgaaaaactcgatgcattgctcacccgtatcgacaccgccatcgagcatttgcaagaaagcgtcacactgaaaaatagccttcttcaatcagcactcgatggtcagttttcagctatcactgagagaatgacgattgaatcgctggctgaggtaaaaggcggcaagcgcttaccaaaaggcgaaaagctaggtgataaagagactgagcacccatatatccgagtggcagattttacagataaaggaacaatagatttatctgacatcaaatacatatcgaaggaaatccacgagcaaatcaaacgctatgtgatttccaaggacgacctttatatcagtattgctggaactatcggtaagacaggtttcgtccccccagaattggacggcgcaaacctgacagaaaacgctgctaagttggttatcaaagataagcaacaactagatttaagctacctgtatctgtttacattgacctcagacttctctgctcaagcagggctagcgaccaagacagttgcacagcctaagttggcgctaactcgcttaagtaagattgaaatcccaatgtgttccttgaaagagcagaaattattggtgtcgacgattgaggcactgaaaagcaaaattcacgatgcggaagcagttcttctagggaaaatagaagatttgaatagcttaaaagcatcaattcttgattccgcctttaaaggcgagctctaa

SEQ ID NO: 292593 - DNA, 1515 bp, Morganella morganii
atggttttatcttcgttttactacgataaaacctggtcaaaattattggtctttttagctacggctctggttcgagacggcaaaacaagaacctttttacttgaaaaagggtacgcaaaagagagtcaggatatcaacagagacgatatatcaagtaagttgtcattttcttttcgtgtagataaacgctatgcacagcgtgttcaagatgcgttaaaaaaagaagaagttggagtaaaaggcactcttagacaaacacctttctaccgctcgttagaaagttttgtagaagagctaatagaccgtgagtatctgtttgaagagaaactttccaccaagaaaatcgaattatcatcttacgaattactctcggtaaagttcgctaggattaatcctgatgaagacttggatgaagttgattttggtgacgacccatcaatcagttttttaacacaagcagtcaatggtaacttcattaacaaaagaagcttcaagttaatgcttttgggcaacattgagttagatgatttaagcgatggtgaataccaactgctctttctatacgcattgatagacctttttgatgcaccgaatactctatttctgtttgatgaagcagattcgcacctgcactacaaaaacgtagagaaactatggtctctattacacagcattcaaggccatgcgattactacgacacacctgttggactctatttctgcaaaagaaaacagcatagaacatttgaaagtggtggaacacggtcgaattaacgaagacaacaagatcaagcaactaatcagccgactcagtgtactttctcgtgccaaatccgttgaatttgaggtgtgtggaaaactgcctaacatcgccttattagatgactacaacgactggattatctttaccaaactcgcctcacgtgcaggattagacttaaatcgattagccactgtgcatgccatgaaaaagtcgtccagctacgctactgctaacgaaacctttggcaagggcaaaatagattggttacatggcttaagcaagattgaatcaccacttgtaacaacaaaaattttcctaatttgtgatcgagacgaggcggcattggactggaatgctgccaatggcgttcaagtgaacgggcaagtgtaccgtgatttgctaaatgccattcaatggcctcgtgataccagagtttcgccatatctattggcttggaaacgccgtgaaatcaaaaactatttgctttcatacaccgcattggcgcaccacaatctgcttggccaaataaacaatggtgatattgcgcagcgcaattacctccagtccaataatcctggtgataacaacgatattcgtaggatgaacgtcaaggacattatcaacccgctgattaataccgttggcgaaggcttggacccagcaaaactccaagcctatatcgatctgattccgcccgcagaaatcagcgaagacatcaccaatatgtacaattttattatcggaaaactataa

SEQ ID NO: 292594 - DNA, 216 bp, Morganella morganii
atgatccgctgccaccttgcccgcttaatgggtgaacaaaaaatgcgcattagcgacgtaatgcgagaaacgggccttagccgtaccacagtgacgctactttacaaagaaaccgcgctcaaggtggatttagaagcgctcgataagctgtgtgatttatttaagtgttcattgagcgacatattggaaaaagtgccaagcgatagccaacgctaa

SEQ ID NO: 292595 - DNA, 1125 bp, Morganella morganii
atggaggtgtccgagctgctggagcacgatcttggtcacggccaggttgatgacctggacaccgcgccaccactggcgctgctggcgatgctctcccagcggagcggcatcgagccggaccggctgcgttgcatgagtttcgccggctgggtgccttggctactggacagccttgatgatcagattccagacgcattggaaacctatgcgttccagctctcggtgctgctgccgaaactccgccgtaggacgcgatccatcacgagctggcgtgcctggctgcccagccagccgatacatcgcgcctgcccgctctgtctgaacgacccggcaaaccaagcagtactgcttgcatggaagctgcccctgatgctgagctgcccgctgcatggctgctggctggaatcctattggggcgtgcctgggcggtttctcggctgggagaacgccgacactgcgccgcgcaccgccagcgacgcgattgcggtgatggaccggcgcacctggcaggcactgacgaccggccatgtggagctgccgcgccgacgcatccacgctggattgtggtttcggctactacgcacgctgctcgatgagctgaacaccccgctttcgacgtgcggaacctgcgcggggtatctccgccaagtctgggaaggctgcgggcatccgctgcgtgctgggcaaagtctgtggcgaccgtatgaaaccctgaacccggcagtacggttgcagatgctggaggcggcggcaacggcaatcagcttgattgagatgagggatataagcccgccgggcgagcatgcaaagctgttctggtccgaaccccaaaccggtttcaccagtggcctgtcggcgaaaacgccgaagcccgaacccgtcgatcactggcaacgggcagtccaggccatcgatgaggccatcattgaagcgcggcacgaccccgagacggcacgctcgctgttcgcgttggcttcctatggtcggcgcgaccccgcttccctggaacagttgcgcgccaccttcgcaaaggaaggcatccccccggaattcctgtcacattacgtgcctgatggaccctttgcatgtcttagacagaatgacgggttaagtgacaaattttga

SEQ ID NO: 292596 - DNA, 420 bp, Morganella morganii
gtggacgaatatcccatcatcgacctgtcccacctgctgccggcggcccagggcttggcccgtcttccggcggacgagcgcatccagcgccttcgcgccgaccgctggatcggctatccgcgcgcagtcgaggcgctgaaccggctggaagccctttatgcgtggccaaacaagcaacgcatgcccaacctgctgctggttggcccgaccaacaatggcaagtcgatgatcgtcgagaagttccgccgcacccacccggccagctccgacgccgaccaggagcacatcccggtgttggtcgtgcagatgccgtccgagccgtccgtgatccgcttctacgtcgcgctgctcgccgcgatgggcgcgccgctgcgcccacgcccacggttgctgtgggaggaaaataaagtgtcatcctaa

SEQ ID NO: 292597 - DNA, 771 bp, Morganella morganii
atgactgaagaattacagcgcggagtgattcccctggcgcgttatcatgagcagcagcttcccgagtatcaggacaatccactcatcagtgcattacctccgattcctgatctgcaggaagtggtcggcctgatgcagcaacttcccagtttcgagccgcaggaggcgcttctggatggtcggctccgggctcatgccattgcccgtctgttgcacggcttctttcagccactcagccaccacttggagctggagagcaagatcagcctgatgatccgtcagggctacatcggtcggaacccggccagcggtgcctggtatgcacacctgcagaatggctatcgccgggtggaggaggaggatcttgatgcggcggtgtaccagagtgttacctccacagccaacagtttgtcgctgttcggctgctccggttgcggcaagacgcgcacgctggagcggattctgggtatgtacccccaggctctccatcaccccgattacaacatcactcaattggtctatctgaaggtcgactgccccattgacggtgacctggatgagctgtgcctcagcttcttcaacgaggtagacaagatcctgggcacccactacagccgtagccacggacgcaagaagctgggtaccaaacgtttgatggcatccatgtgccaggtggccaacctgcacgcactcggagtgctgatcatcgatgaagttcagaacctcaacgaggcacagagatggatccgtaaatttgaacaactcctataa

SEQ ID NO: 292598 - DNA, 2088 bp, Morganella morganii
gtgttgtccgttaatcaggtgttccgtatgggagagctccgaaagcgcctgctctggtccggtaccgagcaggctgtctggattgatatcgatttggacacggcgctgcccgaatcgatatcggttgcagagctggagcgtctgattattgagggtgagctggagagcattggcgatcccttcgaggagacggtccttcgggaggtggaggcaggctcccctgaccagctgaaacgtgatgaggcgtgggcgatgctggcggattatatgcacgatccccagcttttcgtgcggcgccccagagggctcattgtcggaagcatcatgcaacgccatggtgtcaccaaacagacggtgtacagattactgaggcgctactggcaacgaggcatgtgtaggaacgccctcttgccggactatgtcaactcgggtgcccgtggcaagcgccgaaagccgaacagagccaagctgggcaggccaagagtggtgatggcggggaaagggcgtaatgtcacgccggatatcgagcgcatttttcgccgggtcatcgaggaacgcttgctcaaggaaaaacatccgtccattcctgatgcctacgcctccgggctgaacctgctccgtgctgttcagccggagctgccgacctccgaactgcctacattggggcagttccggtacttctatgggcgcgaatatcatttcaccgacaccttgccgcgcaggatgtccgcagtggactttgccaaggacttccggccgctcaacagcacatcgacgactgagaccctgggtccaggataccgttaccaaatagatgccaccatcgcagatatttatctggtttcagagcatgaccgcagccttatcgtcggcaggcctgtcgtttacatggtgctcgacgtgttcagccgcatggtcgttggtatgtacgtcggattcgaggggccctcctgggtcagtgccatggtggcattggccaacacggtcgccgacaaggtcgagtattgtcgccagtatggtttggagatcgatgccagcgattggccggtcaagggtttgccggatgtgatactggccgataagggcgaactgaacggcaccaaggttgaggcattttcccaagccttcggcgtccgcatcgagaacgcaccggccaggcgaggtgatgccaagggcatcgtcgagcgctattttcgaacggtgcaggagcgtttcaagccttacgccagcggtgtggtcgaggacactaccagccggaagcgaggtggccacgactacaggcttgatgccagtctgaccttgcccgaattcacgaaaatcatcattgccggcatcctccaccacaacaatttccacaccctgagcaaatacgacagggctgcgggaatgccgggcgatctgccggcgattccagtcatgctgtggaactggggcttggccagcttgaccggtcggttgcgcactgcgccggaggaactggtgtggatcaatctcttgtcccatgagtcggccacggtttcggagctgggaatcaggctattcggctgcttctacagttgcccggaagcaatcagggagggttggtttcaccgaggccaggggcgtcggccgacaggggtaacggtcgcatacgacccgcgtagtgcggaccatatctacttgcggccgtccaatagtctcaaggattactgggtttgcgatcttgccgaccgtagtcgacgtttcagggggatgaccttctgggatgtctggatactgtccagagaggaacggcggagcgatgtcaatgcggcgtcaaaagccttggcggaaagaggcaagcttctggagcagatcgagtcgattgttgcccaggcagagaacgccagtccgctcaaaactggcattagcaagaaagatctgggcacccagatccgcgagaacaagcagcaggaaaagcgccaggagcgcctgaaaacagcatttaaacctgagaaagcacagcgggcgaaacccgcggaggtgatcccactgcggggcgagaagcaggaagattatgcctttccggatctcagtgacctgatattcaaggaggaagaagatgactga

SEQ ID NO: 292599 - DNA, 846 bp, Morganella morganii
gtggatgcaggctttttcatgtctggaacattcaagggcctgacccaggcacagattgatagaaggctcaaggaggggcgtggccaaggccagggacgggactacaagccgttcatctacaccagggatgtgtcctcgttggggcgctcccaccgcctgcctggcagcaagacccggcgtctgcaccatcttttatccgatcttgaactggccattttcctgaccttggatcggtctccccaggtcactgatatccgtgagcagttcccgatgcgggccgaagatacggtgcgcatcgccgaggaacttggccttgctcacggtcgctacaaaggaatccctcaggttctgaccagcgatttcctggtggattttgatgacccccagcgcccatccgtcgcgatccaggccaagtacagtgccgatctgcagaagccggaagtcatcgagagacttgaacttgaaaggcgctactggcaggaaaaagggattccctggttcatcatcacggagcgcgaggtatccagagaggcatttgccaatatccaatggctctatccggcccatgctgaagacgacattgcacaggatgatctcgcacactatcagcagctgttcttgctcgagtttcagcgtcacccagaccggaagctgaccgccattgcccaggaaatggatacttccggccaactggaggctggtcaagcactctattggctacgccagctgctggctcggcactggtttctcttcgatcttgacaccccttaccgcgtgctgaagccgaaggatctagctgccaaccctcatcagattcatcaggagctgatcagtgttgtccgttaa

SEQ ID NO: 292600 - DNA, 201 bp, Morganella morganii
atgagaaattatttttatgtttactatgaaggttatgatgtagcaggaaatgctatatttaatggaaatggtagtttttataccgatgggccggcaacacctagtgatattgaagatttcgtcaattttctacaagaagataataaaaaatataaccctaatatttcaagaatattaataaaaaatctaacaaagctataa

SEQ ID NO: 292601 - DNA, 354 bp, Morganella morganii
atgccaccacgcatcccccgcgcctgccgcaagcgaggctgcgcaaagacaaccaccgaccgcagcggctactgcgaagaacaccgaaatacaggctgggagaaccaccagcagggtaagagcagacacgagcgcggctacggtaccaggtgggaccggttgcgtgctgtggttctgagccgggataagcatttgtgccagcagtgcctgcgtgaaggacgggtaaccgaggcgaagacagtcgaccacatcactcccaaagcacatgggggaaccgatgcagaaagcaatctgcaaagcctgtgctggccatgtcattaccgcaagacggcgacagagcgcaatcgcggctga

SEQ ID NO: 292602 - DNA, 1194 bp, Morganella morganii
atgagtgagctgaattatctggaaaagctcctggacggggctgaagttgagtggaagccacttggtaaagtgttagttagaaccagaggcactaagataacagccggacaaatgaaaattttgcatcaggataatgcacctttaaaaatatttgctggtggtaaaacagttgcttttgttaattttggtgatattcctgaaaaagatataaatcgagagccttcaattattgtaaagtcacgagggattattgagttcgaattctgtgacaaaccgttttctcataaaaatgaaatgtggtcttaccactctgcaaataaatacataaacatcagatatgtttatcactatctgaagttacatgaggtatattttcaggggattggtagtaaaatgcaaatgccacaaatagcaatacctgatactgaaaactatctcatccccatcccttgccccggcaacccagaaaaatcccttgcgattcaatctgaaatcgtccggattctggatgcatttaccgcccttaccgctgagcttaccgctgagcttaccgcacgtaagaaacaatacaactactatcgtgaccagttgctgagttttaatgacggcaaggtggagtggaaaacactgggagagattgcaggatattccaaagcccgcattagcttcgataaactcaatgaaaacaattatgtgggtgttgataatcttctgcaaaatcgggcagggaaaacattgtcaaattatttacctacatcaggtaatcttacgaaatttgatattggtgacatattaattggtaacatcagaccatatctgaaaaaaatttggcaatctgactgtgttggtggaacaaatggtgatgtgttagttatccactgtagtgatagctcagtttgttcacgatatttgtaccaggtgctggctgatgatgctttttttgaatataacatgcagcacgctaaaggtgccaaaatgccacggggtaacaaagaagcaattttaaaatattcagtaccggttccctctgttacggagcagacaagaattgtcagtattctcgataagtttgatgcattaactaattccatcactgaaggcttgccccgtgaaatcgagttgcgccaaaagcagtacgaatattaccgtgacttactgttcagctttccggaaccggaatcggtgaacaactga

SEQ ID NO: 292603 - DNA, 1179 bp, Morganella morganii
atgcaacaagatagtctatttagcagtgataactccaaacaaatgcaggcagcaggtccagtgatctgcctaggaaaaaccttcgctaacgaccaagaacgccgcgaatattttctggctttgctggctgaaaagctaaaagacccagaatttcgtaaaatagaaggctttccagtcggtagcgataaggatattttaaccttaagcaaccctccgtattatacagtatgccctaatccttggattgctgattttattgcagaatgggagctacagaagtcagaacagccctctgattatcactatcatagagaaccctttgctgccgatgttagtgaagggaaaaatgatcctatttataacgcgcactcctaccataccaaggtaccgcataaagctattatgcgttatatcctccactatactcagccgggtgatacaatatttgacggtttctgtggtacaggaatgactggagtcgcagctcaaatgtgtggagatcgtgaagcagtcttatcgttaggctataaagttatgccagatggtactattttgcgggaagaagaagatgataatggtaaaatagtttggaaaactttctctaaactagggtttcgtaaagcgatattaagtgatttgtcacctgcagcaactttcattgcgaacaattataatacacctgttgatgtccttgcttttgagaagcacgccaaacgtattctgaaagatgtagaaaaagaatgcggttggatgtatgaaaccctccatactgatggaaaaactaagggcaaaatcaactacacaatttggtccgatgtttttatgtgttcagaatgtactgaggaagttatctattgggaaaattcattagaccaagatgaaggtaaagtactagacgaattcccctgccctaattgctcagcaaaactaaataaaagaaacatggcaagagtgtgggttaataaatttgatgaccttctaaaaaaaacagtaaaacaagcaaaacaagttcctgtattaattaactacaccattgagggtaagaaatacaaaaaaaaaccagacactttagattttgctttaatagataaaattgagtcgagtgtaataccgtattggataccgatttatgaattgccgaatggtttcaatacgaaacaaccgaaagcttcgcactga

SEQ ID NO: 292604 - DNA, 837 bp, Morganella morganii; identical to SEQ ID NO: 278213

SEQ ID NO: 292605 - DNA, 213 bp, Morganella morganii; identical to SEQ ID NO: 289525

SEQ ID NO: 292606 - DNA, 840 bp, Morganella morganii
atgtaccgctgtcattacaacacggccgacaccctgaactacattaattcccgcctggaagcccgttaccggacagcactgaaaaacgtatccgaacaactcagtaaggtgacgacatggcagcgtactgaaatcaaaacccggactgaccagcttatcgccactgcagaaaaagaactggggatgattaatacgctttccgggtttgactctgcccttctgcacagtgaaatcagcaccggtaatgataataaccgtaatatccgcctcagtgccggaaaattatggtccccccgggaaaatgagctgaatgaagagctgagtgacctgattaaacagtggaataccatcacggaatcactgtcatttaatgaagggagcagtattgaccgctggtttgaaaatccgtctgacaccctcagttcactgaagcaggaactggctgaactgaaggcagtgcaggcgcaggagcatcgggagggggatgaccgccgccgtgaggatgaggcagccctgacccgcgcactggccgcactggaagctgctcatgctgagtcgaaagactggcagatcacccaggaactgatgtggagtgtgaccggcggtgaaccggtattcaccggcggcaggtttctgctggatgaccggaacgggcagcacgaactgaggcccctccacccggtctcacgcggaccggtgaaccgcggaccggaaatgctggccgatatttacggggacagaaccgggaccgatgcttaccgggagatggtggcattcgggttatatctgcatcagataaaagatatcagagtgccgtctgtcagcccgttcggttactga

SEQ ID NO: 292607 - DNA, 213 bp, Morganella morganii; identical to SEQ ID NO: 289525

SEQ ID NO: 292608 - DNA, 840 bp, Morganella morganii
atgtaccgctgtcattacaacacggccgacaccctgaactacattaattcccgcctggaagcccgttaccggacagcactgaaaaacgtatccgaacaactcagtaaggtgacgacatggcagcgtactgaaatcaaaacccggactgaccagcttatcgccactgcagaaaaagaactggggatgattaatacgctttccgggtttgactctgcccttctgcacagtgaaatcagcaccggtaatgataataaccgtaatatccgcctcagtgccggaaaattatggtccccccgggaaaatgagctgaatgaagagctgagtgacctgattaaacagtggaataccatcacggaatcactgtcatttaatgaagggagcagtattgaccgctggtttgaaaatccgtctgacaccctcagttcactgaagcaggaactggctgaactgaaggcagtgcaggcgcaggagcatcgggagggggatgaccgccgccgtgaggatgaggcagccctgacccgcgcactggccgcactggaagctgctcatgctgagtcgaaagactggcagatcacccaggaactgatgtggagtgtgaccggcggtgaaccggtattcaccggcggcaggtttctgctggatgaccggaacgggcagcacgaactgaggcccctccacccggtctcacgcggaccggtgaaccgcggaccggaaatgctggccgatatttacggggacagaaccgggaccgatgcttaccgggagatggtggcattcgggttatatctgcatcaggtaaaagatatcagagtgccgtctgtcagcccgttcggttactga

SEQ ID NO: 292609 - DNA, 258 bp, Morganella morganii
atggtcaccactcatcttatcgtggcgcgttttcagataggcatttacgtgctgaatgactacgaaaaagccctgctgctggataaagcaatccgtgatgcctgggagccgatagtgcatggttacatcggtcattatccggtgcagactgtgcagcgcggcggattgcagcaggggaaagaagagctgacaaaaaacaccgtccgctggtcagtcatgcgggattttatcatcacttatcctgaggatgccgtgtga

SEQ ID NO: 292610 - DNA, 888 bp, Morganella morganii
atggatgcgagatacgaagaaaaaactttcgaaagttacttcaataatgagcttgatagaaaaacatctatttatttcccccttggccaagtgcaagaaggcgttttaggcttggattccgttgctcgttctaacagcaggcggctgtggaaaacactgggatatccattctggttttttcagaaattttcaggcgttgaactaacaacaatcgctcgtgaaatggagcagcatcttggccgagaggttaagaacataccggccatgaaagttaacttgctacttcagtataagagaccgcagtatataacgaattcaactggcgctgagtggcacttatggaaccagaagtatttccgctatgaactgtacgctcagcaacatgccttgctctcccacatagaaacaacatttgggaacgatgccgtagtcctttacgctgctccttctgtcgtagatgttgacgatctcgtcaccctaaaaatagctaactcaattattgataacactaattttagacgcgcaagagaattggatgggcaccacaggaacacctatataaaggcaggaacatattcgcaggcatgtagtgaaccagaaaagattgagaattttaatctaattgaaatgattgaagcaatgcagccacaccaatcggtagataacgcccaactaatcattaacttttcaagtcagattaatacagccatggagaatgtcgaagggattggttatttgaaaacggcatttgagaatcgaatgaatgaatctagacattacgagcttcaacagttcgaattgttctactcaatgcttactatgtcagtgttcagagaagttaccggctgccaatggttgataccattggacggacaaaaaaatgcataa

SEQ ID NO: 292611 - DNA, 741 bp, Morganella morganii
atgagcaatacatatagaaacgacaaagatttagagttactccgttacgccgataatgaaatgctcagtatcttagtcaaatacttaaccatagataaagatggcacaactcgcttcaccgaaacattgacaggtgataaacaatttaaagctgcccaaggcaactatcaacaagtatggcagcttatcgcgggtgaattacaacactttggtggggatactctagttaatctgtttagaagatcgggcgtgaaatacagagaaattctaatcgatgtttgtaaaaaactgagcataaaaacggactataaagcaggtattgttgatattgaacaagcactcctagccaagctattcaaggattcttgggaaaaaatatcagagactgaaagagagcaacttagaaaagaacttaaaatagatccttcgttaacgagtagcgccgctttggctgcaatcatcactgctattagggtgggtggtttaatgtcctatcaaatcgctatgattgtcgcgaactcagtagcaaaagcattacttggtagcggactcacaatcgccgcaaacgctgggctagcgcgtgtaattggactttttgcaggtccaatcggaatagcagttacggtgctcttggcaatacctgctataagtggccctgcgtttagggtaacactaccctcagtcgtgcaaattgcggcaatgagacagcaaatgttaaattcagaggagactattttctaa

SEQ ID NO: 292612 - DNA, 882 bp, Morganella morganii
atggacacaattttcactttcgactgggcacaagtttacccaaaagttatagaggggctacaaaacggtaaagttgtcttaagggatggcgttgcgtattggacggagctagctgaacaatctggaattgttcaacatatgcccttaaagcaagtaccttttgatccagaaaaattgaacgaaattagtcaattgatacaagctactcatgcaacacagatggcagcgatcgggttatcaaccgcgattattgtaggtgctattgttgttcaaactatgtacttagcgaaaaaaattgacaagttgcagcagacaatagatgtcatctcttctgatattgatgctcaaaacatcttattttacttagaaaaaatgtctaaatatttcggtactattgagtcagctagagtgcttttacttgataaatcactggtatctgaaactcaagatattgcagcaagtttaatcagcacgttatcaatccaaagaaacgaagttttgtcgctgattgacaacctaacttcatttgcagataaagcgacggatcgacaccttgaacatatgctggatttcatctcattaatgctggatattttacccaaagctatttatatagaaagtcaactttgtgaccgctatggcaagttcaagctctctgagcacctcatgcgtgaaaattccaatcgatacaacagaacacttaatgaatttcgattttggtgtaacgacaaagcaaaagcagcgataagaggtgatgataaatcaatctccattccatttcatgaaaaaaaagcacagttacagctgctctttcaatcagaacataaccctatgctattgcaggaattacatacaccgaaattagcggtagttgccagctaa

SEQ ID NO: 292613 - DNA, 1155 bp, Morganella morganii
atgagtgagctgagttatctgaaaaagctgctggatggggctgaggttgagtggatgacgctaggcaatgaaggcgttgttgaaattgctaatagcggacgaaagccagtaaaagcttcaatgcgtacaacaggtaaagtaccctattacggtgcaaataatattcaggattatgttgatggttatactcatgatggagagttcgttctaatagcagaggacggttcggcgagcctggataattattctattcagtacgtaacgggaaaattttgggcaaacaaccatgtccatgtagtgcggggtaaggggagactcaactctcgctttctataccactatctcagtattgttaattttgttccatttttatccggcggaggacgtgccaaacttaccaaaggaaagttggttgaaatcccaattcccatcccttgtcccggaaacccggaaaaatccctttcgattcagtcagaaatcgtccggattctggatgcatttactacccttacagctgagcttacagctgagcttaccgcacgtaagaaacaatacaattactatcgtgaccagttgctgagttttgatgatggtgaggtggagtggaagacactgggtgagcttgcagaaaatctggactcaaaacgtaaacctataaccagtgggttgagagaaactggcaaaatcccatactacggcgcgtctggtattgtcgattatgtcagggattacatatttgacggtgattacttattagtctctgaggatggcgcaaatctaatagcccgtaatacgcctatagcatttagtattagtggtaaaacatgggtaaataatcatgcacatgtgcttaaatttgaaacttacgcggagagaaagtacgttgaatactatctgaatagtatcgacttaacttcttacatttctggtgcagctcaacctaagttgaataaaaagaatctggaaagtatcaaaattccaaatcctgccccaaaagaaaaagaacgcattgtggctatattagataaattcgatacattgaccaactccatcactgaaggcttgccccgtgaaatcgagttgcgccaaaagcagtacgaatattaccgtgatttactgttcagctttccgaaaccggaatctgtgaacaactga

SEQ ID NO: 292614 - DNA, 198 bp, Morganella morganii
atgacagataaaacacagaagctaaagccatgtcctttttgcggcggtgaggcgaaagccagcgaagtaagagctggtgactttaattattcggttgttacgtgcggcgaatgctgggctaagtcaccccatcacgtctggagacaggacgcaatcgccgcctggaaccgcagagcatcacaatgtgagaaggagtag

SEQ ID NO: 292615 - DNA, 210 bp, Morganella morganii
atggaaccaacggattttgaaaagtggtgtgcgggggaacttggctattcgcctgagtgggtcatgatgcagaggacaataaattttttcggcactgccgggtacaaggtgagcgagattgaagtcagataccgcgcctacatggccggagttcgcagcagactgccgtaccagacaccgccaaaaggagatgaagatggaatggattaa

SEQ ID NO: 292616 - DNA, 435 bp, Morganella morganii
atgcagaaatggtcgcgggtttttaaatccagggaactgtttaagcgagtggccgggttatctccggtagcaacggaattatacggtcatatcgtcgagaactgtgactggcggcacggtcgctatgttgccacctctgaggaggccgcaggggaattgggcgttaccacaagaagcattcagcgggcgaacaaggaacttgagtcggcagggttaattaaattcaaacgcgggatttacgctgtgaatcctgagtttaactggggaggacgaagctggaatatttcaaaatcctgttactacacgatgggagtcaaaggcgctcaggtgattgattttaatcatgcagcagaggcgattaattcaaaaaagcttgaggagattggccgcagcgctctgaggggagcgcgcagccgtaaatcacaaggaaattaa

SEQ ID NO: 292617 - DNA, 183 bp, Morganella morganii
atgaaaaatagtcaccgctgcgaaatatgcaataagcgtcttaatgaaagtgagcgattttattacggctacacctgtgaacaatgtgaacgtcatttcattactgagcatgaaggaaataaattaaaaactgcattttcgctcatcaggctttatttcagaaaggtaatttattcagcgtag

SEQ ID NO: 292618 - DNA, 471 bp, Morganella morganii; identical to SEQ ID NO: 279238

SEQ ID NO: 292619 - DNA, 327 bp, Morganella morganii
atgtgcctgccagtgagtgacatcattgctttccagattgatgacagcggtgccttcgtcagtcagtccggtgaaaatttccccttttgcctgcgcgatggcttctgcggaaccgaactcgccgatatgggcggcaaacaggttattcaccagtgcggtctgcgggtgtgtcatggcagcggtatacgcgatttcgccggtgtggttggcacccagctcaatcaccgcaaactgatgtttttctgtcaggcgcagcaatgtcagcggtacaccgatatcattattaaagttaccggcggtaaacagggtttcgcctgcctgctgtaa

SEQ ID NO: 292620 - DNA, 333 bp, Morganella morganii
gtgatccgcgccatcggccgcacaccggtcacactgccgacttatatttacgcggtgaatattctcaaccagctcggcattcatccggatgtggaatttatccgcagtccgaactgccagagccgcgacaatatgacctttgagcagtttgccgaaggtgtggtctggtcgctggggcagcttgatgaccatgaaatgacactgctgcgccgctattacgaccagcaggcggctgacggcctgccggtggtaccggccacccgcgactgggccatggtttcctggagtgtggtaccggaatccgccctgctgctgccgggaggtcagaagtga

SEQ ID NO: 292621 - DNA, 282 bp, Morganella morganii
  misc_feature (244)..(253): n is a, c, g, or t
atgcagaaattaactctgctgaaaggattgccatgctttaaatttaacaagataatgttaatgctttcatgtgcaatgataaccggcaacatggtcattattaagaacggctatgcagatgaattttttaaccctgcatttttgtcagataacggtaatgaagttgctgatttaagccggtttgataaggggctgggacaggctgcgggtgaataccgggttgaagtttttcttaacggggagnnnnnnnnnnacacaggatatcctgtttgtcagcaatga

SEQ ID NO: 292622 - DNA, 423 bp, Morganella morganii; identical to SEQ ID NO: 279168

SEQ ID NO: 292623 - DNA, 255 bp, Morganella morganii
  misc_feature (208)..(217): n is a, c, g, or t
gtggaaagaaagattgacccggaaggagacagtgataaagcgatcacactcaaacagcgcagaccggatatttataatattttactgaatgaagagaatgtaaacggaaacatttccaaaattcagattattaatcaaattatcagtactgcaatcagtcagcaggaaaaaaatgaagatcctgagaaactgatgctgaatgtgcgcnnnnnnnnnngcgctatccttaccggtttccgtttgaaaactatctga

SEQ ID NO: 292624 - DNA, 369 bp, Morganella morganii; identical to SEQ ID NO: 281094

SEQ ID NO: 292625 - DNA, 228 bp, Morganella morganii
atgatcgacggtatcaacgccaaaatgcgcagcctgacgactcagggttatttactcggcggtgagtgctggtttgatccggatgccaacagcaaagaagagctgaaagatggtcagttagcgatcgattatgactacacgccggtaccaccggctgaaaatatcaaattgcgtcagcgtatcaccgacagatacctgatggactttgcatcaaagattaaggggtaa

SEQ ID NO: 292626 - DNA, 1467 bp, Morganella morganii
atgttggctgaattaatatcagacaattggggtgaaattaatttattctataaaaaaagtactctaagtctgagcaagccatttatagatgacgaatctttaagggctatatcaattacaaagtttaatcaattatatgaaagaaagataattgattctgctggctataaatatgctttagtgactgatatttctagttattttccgtctatttatacgcattctattccttgggcattagatggaaaaaatcaagcaaaagataattttaagaaaaaaaagaaaggactaggtgatagaatagatgattattgtcgtaacattcaagatggacagacaattgggctgccaataggaagtgacacatctcatattatttctgagattattggaaccgctattgattgtgaattaaaagaaaaaatgaatgtgccccttagagggtttagatatgttgatgatttctttttattctttgaaaatagaatagatgcagagaaagcattagctatactgataacaattattagcaactatgaacttgaaataaatgcatctaaaacaaaaattatagaaactaaagacctaattgaggagtcgtggcgatatagtttgaaaaaaattagtatatctcataaaataaaaaatcaaagaaatgatatacataattatttttcttctatttttagtttggagaaaaaatataaagatgaaagtattgcaaaatacgcactaaagcaactaagctcaagtataataaaaaaagataactgggatgtaatggagtcatatttattaaaaatggcatatacatttccaaattccattgagattgtttcaaggtttttagttacatataactattataattataaaattgacattaagaatataaaaatatttgttaatagtttggtagccgagcactcgaatgcatcacaccataatgaagtgtgctggttactttggctttctaaagaattgaaagtaaaactgtctgctgccaatgtaaatagagtgcttaatatggatagcaatgcttgtgttctggttttattagatctgatgagtcagggattaataaatagaaaatatatccctgaaagcaagttggaaaaatatatatccagtgatagtttaaaggaatcaagttggttggtttcttatgagggtggaaaaagaaaatggcttggtaataatgatgtcagctttatagaagaacgtaaggaatttaaattgctgctagatgaaaaagtttcattttatgacgaaaaagcaataccaccaatgctctttaatataaataatgaacactataataacccgcttggaatagatttgttattgaatagtgatgatgatatcacggataaatttaaatttaataatttagatgaagaatattttgacaataatgatgagcaagatgagtgggatgatgatttcaatgatgacagtgaattttaa

SEQ ID NO: 292627 - DNA, 2322 bp, Morganella morganii
atgcaaatatatagccatacagaaccggccttaaaacaagaaattttgaatctatttcaagcatctcaattaattcctttttttggcagcggatttacaagagatataagagctaaaaaaggcaaggttcctgatgcagaaaaacttattgagttaatatgtaacattgcaattcaacaagacggattgacagataatgatatagatgaaatcaaaaacatcaatcaactaaaaactgcatttggtctgttagattcggaccaatacatacccagtcaaaaatcaaaaactttgctaggaaatattttttccgaatgtaaactaatagattcagataagaaaagcattctgaatatggactggccccatatctttacattcaatatagatgatgcaattgaatctacaacaagaaaatacaagatattgtgtcctaatcgaattgttcagcgagagtttatctcggcaaataaatgtctttttaaaattcacggagatattaatgagtttataaaatatgatgataaaagcttaatatttacatggaaagactatgcacatagtatagaagaaaacaaatccatgttatcattcttagcagaggaagcaagtaactcctcttttcttttcattggttgtagcctcgatagtgaacttgatttaattcatttatcaagaaaaaacccattcaaaaaatcattttttttaaaaaaaggaagtttaagtataggtgaaaaattaaaactatctgagtatggaattgaaaacgcaattatctttgatacttatgaccaaatatatcaatggctaaaaaccacactttctggaatacaaagaaaatctccaacaagaaccttcgaacttgacgattctgcattaacaaaagaagatgcgatagttttttttgctaatggagggcctgtaactaaaataaaagatgatatacgactccttcggaattctataacatttactaaccgtaatgtttgtgatgatgcagtcaaggcgctaagaaaaaatgattacataattattacaggtcggagatttagtggtaaatcaattttattattccaaataataaatgcaaagaaagaatataactcatcttactactcatcaactgatacatttgaaccttctattaaaaactctctaataaaatgtgaaaatcacatcttcatatttgattctggctttcttaatgctcaaagcattgatgaagttttaagtactaaaatccatcctaccaataaaattattttatgctcaagttccggcgatgctgaattatatagattcaaattaaaggataaagggatagagtataatgaaataaaagttgaaaactcacttactcacaatgaagagatttattttaacaatcaactttcatctaatggcctgccactatacaaaagtaaagaaacattattaaacctttcctatagatattattttgaatataaaagccagctaaataataataattttttcaacaaaacatttgatgaaaactcaatgtttgtattgattttaatagcagcctttaataaggccaccttcagccacatatatagtcataatgagtatttcaacattcccgatttcattgaaaaaaatgatcgactatttgaattagaacctattccttcagaaccaaatggtgttcttgtatgtaactcaccttcttggcttttaaaaataattcaagagtatataaatagcaaccctaaatcatatatgaccattgcaaagttaattatatcacttgaatctaaagggtttagcgcagcatccagaaatttaataagctttgacaaattaaatgaacttggaaatggtggctatattaacaaagtaattaaaaatatatataaagaaatagcatatacctatcgttacgatatgcattactggttacaacgagccaaatcagagctaatatcagcacatacaatagaagatgtgatcgaaggtatgaactatgctagtaaagtacgattagatagccatgaagtaaaaagtcagacttactttagtgctacattagtattggcacaattatctgcaaaagctttgaatatgactggagataaaaagtatgcagtaaatttctttgaaagtgctttagaatcaatacgtaattacaataacaatgcaagacatataaacaagatgatggataaacgcgatggagggtttaagaatgctatcgagtatttagaaaacaactctataatagaattactccctctcagagatgaagtaaatgaattaatatcattctacagaaactacagagaccatagaaacaactaa

SEQ ID NO: 292628 - DNA, 264 bp, Morganella morganii; identical to SEQ ID NO: 277406

SEQ ID NO: 292629 - DNA, 546 bp, Morganella morganii
atggagattaattctctacgtcattatgtagagaaagagttcttaaaaatatttgaagagaaagccaagctattggatattaaaataccaaatattccaagatatcaatatctttactctattacatcatttccttatcagggggtggaacttcataaaataattatggcttaccatttttcattctatcaattaataagtaaaagagataacctacatgaatttccatttttgttagatgcgattttcaaagaagatattgatgatgggaacagagatcttatttttaattttttagggaaagaatcagaaaataaaaatcaacttttatttactgttgcagaatatgaaaaagatgaaaatccattaaaaggaaatcctctttttaatattaatgaagttaataaaaaatatttttcaggaaatgctaaacaaatttgtattggtggggcgaaatctgtaagatcctttctatttaaaaaggaactaaatgacaatgataggtatttattagatgatgcattttatttgttggaaacaatatga

SEQ ID NO: 292630 - DNA, 1038 bp, Morganella morganii
atgtctaaattaatcctgagaaatatacttgcatattctataagtagtgggaagttttttagcactgatttcggagattcagttaatatcatccatggaagaaatacctcagggaaaagtacattgatgcagtcaattctttattctatgggagttaatgactcaaaagaaaatttaactgatataattaatgaaaatgtaatttttcgacttgagtgtgaagtaaaaaaaatagaaaaatctgaaaaagttacttttgtccgatcggatgatactcttattgttcgtatttctgatgcactacctgagcgctttgatgggattaatggaaataattcatttgaatacggtaaatacaaagagctgtttaatattttatttgattttaaattaaaattactacagcagactaattttgtcagtgctcccattgaggcggccttcttaccatactatatatcacaatcagttggatgggtttatctaagagagtctgtaggtgactatcgattttacaaagactttaaatttgattacctagattattatactggattaaaagatgatactgctaggctaaaaaaatatacattacaaagagaaaaacaacaacttgaatatgagaaagagcaattaatacggtacaaatcaagagataactcattgaaaatctctgaagtattagagtatcgattaaaaggtgaaacttttgattatttaactagttataattctcttatttcgacatttatctcggacgaaaccaaatataatagcttgtgtaataagcttagcatgcttagaggaagacagaaagttctacttcaaacaattagaaatttgaagttacagaaaccacgagtagataaatgccctgtatgcgaacaaacattacccggcgatatacggaagttatatatatataatcaagatataaatgatgcgttaaaacagaaagatagtgtgtcaaatgaaataaaagaagtttcatcatcattaaattcaacagaaataagattaaagaaaatagtaaggtaa

SEQ ID NO: 292631 - DNA, 1992 bp, Morganella morganii
atgctgggttatataccaaaggagcacagcttaccgaaatggcagccatgtactgttaatgaactgcttgataataaaacctattctgtacaggaaagtaccaggcctgaattattttcaggaatatatccggaaaatatgcccaaaaagctcagaggatttttctggtacggcagtctgggcaatgaacgattccgtttgcccgttcagacaagtttactgagcaggcagtcagtcctggagcaacgcttatttaatttacgtcattatctggatattgaagggaatatgatgaacctcccgttatatgcagctgcgtttgatccgttcgatctgctgcgttcccggctgggaggaacctctgaactggcatatttacagtccgggtcattaagtattccgtcatattgtttccgaaccatgctggaaaaagcaaaagaacaggcggcggcactgattactttaggggataaacggctcagttattatgagcaaaaagaacgctatcacactgaaaatatgcaattaaatgatgcggttgcgcttgcggatgccagtgctgcgattcagtcatcgctgcgtgaccagcaaaaatctgctctggactctctgaatgaagccaggacgatggctgagagcaaaaagacatattacggaagcctgagtacgagtacaaaagaatgtcaggccagaaatttattagtgagttcatccgtgtttcatggggttatttcaggtgctgctgttgcggcaggtattgcggctgcgattccgcgtgtatttggtctggcgcaggataccggcgaccatggtaaaacagcactgctctctgctgtgggggggactgctgcattaggtgcggaacttatgcgcggtactgcggagtatgttcagatagatgaacaataccgtcgccgccaggaagagtgggcatttttggcgtctcaggcagaaagtgaaataaaggtactggataaacagattgatgctcagaacgtggctattaccgcagcagaaaacagtgttaaatatacaaagcttcttcagacgcaggctaaaaacctgtatgactatttcagtcagacccgtcaggttaatgaaagtttgtacgaaaaaatggccaatattattggcttattgcatgaccagttgtgttcactggtcagaacattttgtgcattaacagaagcatcctggcgttatgaaacggatgattataaacggcagacatttattccggccgatctgtggagtggcgataatttaggtattctggtcggcgttaaattacagaaagcgttgctggaaatggaaatggcgtatacacagcaaaatacacgccgcctgaatatcacaaaaacgatttcactgaaatcacttgtcagtaatcatctggttaaaacaaatgaaacagcgctgacaacatgggatgaagtaaaagaagcattaaaaggagcgaaaaaactgtccttcgggttatcccatcaattttttgatacagattttcccggacattatgcccgaaaaattcactctttatccgtgacatttccgacattattaccgccatatcagaatatgcgggttcttctggagcagacatcgaatacgttattagtttcaccggatattgatgcggttaaatccctgtatacatcagcagaacaaaaaaacagtgaatcaattatccgtaatttgcgggtgaaccagaaaatcatactctcccgtggctgcgatgacagcggagagtttccggaagatgcctttaccggcggacaataccatagttttgaacacagcggagctatttcacactggctgctgtccgttccccgtccgcagaatagcacagagctcattgataatcttaatgacattatcattaaacttaattatacggcgaaaagtggtaatgatttctttgaagcggcggtcaatgaattactggaaaatacggaatcaataataaaagagtgcagcgacaatgattaa

SEQ ID NO: 292632 - DNA, 1755 bp, Morganella morganii
gtgccttatgaggttactgaacagcggattgctgtccgtctgattgaaaagcggggcagctatccggtggtgcgtccgtcagttgttgaagagcgcagctatctgtatgaacggtttgtgatggatccgaaatgtacacagacggtaatcctcagcagtgatcaatatggtttgccactggaacaggtcactatcagttatccgcggcgggcacagggggctgttaatccctatcggtctcttgacagtctgccggaacgtacatggcggagcagttatgatttacagcaggagaaactgcgttttgtattacagaaaaacagttattacgttcttgataaccatgggaatggtatccggcagctggcgatagcggatgcacaacggcaggatacggctgaatttgaccgcaatgaattgccacaggatggttattcactggagagtttattacagaaggatagcctgagtaataaaccggaacagttcgaattttccgggcaaactcgcgtggcgtatctgaataagtccggaaaaagcggagtattatcgcctgactttcctgtacgggttgcttatacggaacacgctgaatttgatgaaaaacattttaaaaaaatggagtgctatttcctgggaagaaatatagcgaatttattatcatccggcggatacaaggaaacggagtatgcatttccgacaaaagatgaaaaaacaaaaatcatctatgcagcacaacgggatatgacggaatacggaactcaggaacaatttttcaaaccgatgtcttatcgtgctataaacctgacgaagttcaataaatttgagtgggataaatatttttgtgtagtttctaaatatacggattcagccggaggaataactacacctgaatataattttaaatatctttctcccgttaaaataacggatgtcaatgataatacatctactgtgacatataacggagcagggcaggttctcagcatccggttttccggtacagagcaggggaaggttacggggtattctgatgctgtattaacgatgcctgattctgttactgatgcacttaacctgacagccggattaccggtatctcagttatttttatatgagccaaacagctggatgctaaaggtttctcctgaatttatgacgccggagtataacgatattatctcaaggctgaaaaatgatcatatcattactgaagatggttatttcagtgcattttcccgggaccgtatgtctgaagaaaaccgctgcttaataaaagcgatgatgataccggatgaaaacagattaccaccacatatattacagttacaaactgaccgttatgataatgacaacactcagcaaatacggcagaaagtgactttttttgatggcctttcccgtcagttgcaaacatctgtcagggtagaagccggtcatacagctataaaaaataaaaaaacgggacacactctgaaaataaataattccggctttcgctgggcggtaaccggccgtaaggagtataataataaaggttatattatccgtgagtaccagccttattttattaatgactggcgatatatacgtaattatattgtacaaaaagatcagtggtcagatactcattattatgatccgcttggacgtcttatcagcgtagtgacagcaaaaggctatttacgtaacagtatatataccccttggcttattgttcaggaggatgaaaatgacacagagaaattatcataa

SEQ ID NO: 292633 - DNA, 465 bp, Morganella morganii
atgaaaaaattagtatggatgttgttgttttttcctttgtttgcgatagcagatactaaagatatcgtcatggattggctaagaatcaatgcacaatacgaagttaaaccaacggaatggcataagaaaaatgatacatggatggtggattttaccactaaaaaaaatgaacaaatgaaagtggctgtaacaggtaatcgagtggctattcactcggtatttcctcaaccgattactgatatgtttttctctggttgtgcatctatttcatccgaagtaattcctgaagcgggttactgggatgaaaatgccactgaaaatactaaggcactaaatcaattctggaaagataagggatggagtgagtcaactgaaaataaagaagttattattgatggttggaaaataactgcctacaaaaaacctgcggagttgtcctgtgtgatagaggcagtttctatctga

SEQ ID NO: 292634 - DNA, 228 bp, Morganella morganii
atgcaaaaagagtatcgggtcgggattgaatttgaatattggctgacacagtaccggaataaaagtgccgccggtattaaatcctttgacaatattaccctgtcagagctggcgcctgcactgaataaccgcccggggatggatgatgcctcgctgcataagggtgatgcggggattaaagccggttactggtatgttgagggcgatgttatgaaccaccaacaatga

SEQ ID NO: 292635 - DNA, 186 bp, Morganella morganii; identical to SEQ ID NO: 277664

SEQ ID NO: 292636 - DNA, 228 bp, Morganella morganii
atgcgtcctaatattacaatcacagttcctgagccgtttctgccagttgatgaattctgccggcgccatggcatggcagataaaacagtacgcgacatgattaaagatggtcgtctgccagtacgcgaaaagaataataaacagaaatgcgcaagggtcttcatcaacatgctggcgctgactgttgaagccgccgcatcctgcaacatttcactggaagcgaagtga

SEQ ID NO: 292637 - DNA, 639 bp, Morganella morganii
atggttgaacgtgttaaaagtcccattgtcgggacttttatttttgtatggttattctataattggaaagtaattttaattttattatttagtaaggtggatgtagaaaataaaattaatattatatctggttatataacagcaaagtcattttattatccattttcaattgcagttttgtattgtgttgcaattcccattgttacactttttattgatgttttattaagaaaaccatcagaagcagcaatcgagcttcgttatgaaaaaataaataaagaatatattgaaaaagagaaagcagaaaaattaagagctaatgcagacattgcttatgaaaggcaaaaaactggtgctgaaaaagaaattcaagaaatgaaatttaaaattaatgaatctaagcagaaagaaggggttttaacaaaagaacgagatgaagccatattgaagagcgatgaactagagatagaaataaataattatgaaaatctggtttttaaactgcaaaaagaattagataaggaaaaaactaagtctagttcgttagaaaaagatattgattatatatataagaataataagaatgtaaaatcaagaagagggacgttattgtctggtaataatatacttaggctttga

SEQ ID NO: 292638 - DNA, 678 bp, Morganella morganii
atgataagaggccagttaaatcagtctcagtttaataagttgcgtgaagcgctgaaacagcatgatttaacaccgcaaaaacggcaaaaattactcattagattagcaaaaagtggcgttatcggagccactaagcgaaatataaaaaaacagcaatcacctgatggtgagccgtgggaagcaaggaaaagtaaacgtcgtaaaaagatgttaagcaatatgccgaagcttctgaaaataaaagaaataccagaaacagatagcgtccgtatttacctcggcggtggaaattatcgtaatggcagtaagccggtaccagcgggtgtcgtcggttattcccagcaaaacggtaatcgggcaactgttaaaaaatcaagtgtttctaacattaattccaaaagaaacaaggaattaaaagcatcaaagaagcaagcaaaaaaactgagagagcttggctataaggtgcgtaaaggtaaatcgtggaaaaagccatcaatcaaaagtattgaggcaggcatgacattttggcaggcgggtctgttaatccggatgctgagtgatgaagaccctaaagatgcatggactattgatctgccagcccgcgtgttcttgggtattggtcaggaagactttgagaaagcgttagcccgggagcttcagggtatcggatttggttaa

SEQ ID NO: 292639 - DNA, 753 bp, Morganella morganii
atgaaagaaatttttataaaaaaattaataggaaagatatttcctgagtttagtaataaagtaacctgggctttaattacaatcggtattgctattcttgcaatacctgcgcccacgtatttattacttgtcaattttataattgacgtctataacaagaaaactgattctgatatcaatcttataacaattgatagtatttcaccaagcaatggagttgctttaactctaattatattaggattagtttatcatttggcaataaaagcacttcagctttatccggaaatttcaaatgaaaaaaataagaaagatatgagagaaagaaaaagagctgctgacattcaactttatgaacagtttattgaaatcttacctccaacctcattactaatcgaatttttaaaaaatcatgattttggaatttcattccatgataataatataaaaaatattgatgtatttaaatatggttggaatcatccagaccagcactttcatgatgaagaaattgaaaaaaaatcaattttcctttatgatgaaataatgaagtttgataatttccttgcatttaaatcacgctatattaatgattctattttaagcatactcactgccagagatcgatatatggaaatggattggctgcctcaaacagaagaaaatgtaaataaagccaataaatggagtctggaaatttatcatcattactgtgatttcatatctacatgcaagaacaatttagctatataa

SEQ ID NO: 292640 - DNA, 789 bp, Morganella morganii; identical to SEQ ID NO: 287977

SEQ ID NO: 292641 - DNA, 2157 bp, Morganella morganii
atgtccaggctgactgatttaattgctaaagcgaaggccagagatcctcagttgggtgcagaccttgatcgagaaatcaagatcctgtcatcacgccttcccttcgggttgaatttcgaacgacatagccctgaaatcgtagaattgcccttacgaccagttcgcaagggagacaaagtacgaattctgccagagcgaggctcccttaagaaaggcgatctgcgtctatggcaggtgaaaaacatccacaaggcgaagaaggtcgcagatcttaaattgctgggcgcagctgatatcgagactcagactgtagcactatgtgatttggtagttatagctgagtttcgtgacacaatctggccagggctggttagtacgggaaaagtacaacgtggtggagacaaacctttccactctgtcatcaatggcgaaaactatcatgtgctgaaagccttaacctacacgcatagaggcaaggttgatgccatttatatcgatcctccatataactcaggggcaaaggactggaagtacaataacgattacgttgaaggtgacgatatctatcgacacagcaaatggctggcgatgatggagcggcgtttgctgatagcgaaagagttgttgaatccagcggattcggtgctaatcgttactatagacgaaaaggaatatctgcgactagggttactcttagagcaaacttttccaaatgcaaacactcagatgatctctactcaaataaacccaaaaggggtttctcgagaagggagctttagacgttcggacgaatatatatatttcgtaatgtttgggcagtctcgacctattcgattgccgctttcaatagaatggtccacctcgacacaaaacaatgaaaaaaatacagaagaagtcgactctgacaagaaagtaaagccaggatggacttcaatgatgcgccgtgggtctgaagctcgtagaagtgaccgtctgtccatgttttatcccatttacgcagatccaagtgaaaggaagattgtagaaattggcgaaagtttgcctgaacatgaacatgtcccccctcatcgagaaggattagtgccgattcttccaattagaactgatggttccgagggaagatggcaaattggtgccgaagagttaaaagaaagaatcaaacaagggcgtatacgactaggaagacagacgtcttacggttttgtcgtgaattacctaccggatggcgcttacgcagaagttatgtcagacagattcattatagaaggacatgcagcggacggatcattgatcgcgcacagtgccagtaatgagacatcgcgtattgcaccaacgcaatggaagattgcctcccataatgcctctgaaaatggatctactttattaggagcatttatcccaaaaagaaagtttccgtatccaaaatctctgtatgcagttgaagacactttacgtttctttgtcgctaacaagcctgaggcaataattcttgattttttcagtggctcaggaacaacagcccacgctgtcatgcgcttgaataagcaggatggtggtcgccgccagtgtatttcggtgactaacaacgaagtcgctgctgacgaacagaaaaaattacgcgaacaaggtttacgacccggagatccggaatgggagaattggggtatctgcgactatattacaaagccgcgtgtgcaagctgccatcacaggcaagactcctgatggcaaaccgattaaaggtgactacaagtttaccgatgaattcccgatgtctgaaggctttgaggaaaacgctgagtttttcaccttaacttatgaagcagagaagtcggttagctacaacttggcttatgcccgtattgcgcctttgttatggttgcgagctggggctcgtggcaaacgtatcgacaaactgcctgctgaaggatgggcgctgactgatgcttatggcttgctgacggcggtggatcaagccccatttttcattgaagcaatcagtcacaccaatgatgtgcaagtagcctttatcgtcaccgacgatgagcgtcatttccagtctgttgccaggcgtctgccaaaaggtattgagccggtacgtttgtatgaatcgtacctgaccaatttcagcttcactagtagggaattaacagaatga

SEQ ID NO: 292642 - DNA, 645 bp, Morganella morganii
atgaaacgtaatattgatgatttcgacggaatgaaagattttattctcagtgttattactgtagtggcttggtttctaatagtgaccattgtgattgttggttatttcaccgtagaaactaaaggcgaaagtattatgatatcacttatatcgatgttttttactataatttcagcattaggaattgtggttacaataactgtttattgccttcaaaaaaactccaaaaacaaagagataaatagaattaaaatcgcacttatagatgatttaagtcaactattttatgcaattgaaaaaatattagatttccccgccaatgatgatgctatgattttaaaaaacgaaaacggaatatctattcacaatgttaggtcagaaattgggttttctataaataaatttaacaacatagaccaacttgatatatacaaagtgaaattaatgaaccatgaccaattagcatccatggcaataagtcgaataaaaaaattcctaatggaatacaatttatccatagataaattaataaataacgcaagtattcgtggtggttattatcatgaaaaatcaccattaattaatttatttagtggtaggcataacttagaaacaataaaaatgtggatatcaactatcaaatag

SEQ ID NO: 292643 - DNA, 378 bp, Morganella morganii
atgaaccggaaagaagcggtaattgccgcgctgtttattgctgctgtctggtgggtatatgacatttaccgggataaccagcaactgaaggtgaataacacaaggttgtccggacaactgttagcccagcaggtgataaacaccaccacgctttcagccatcgccaccaattaccgcgtatcactcgacaacatcaaggccaaacgggaagaggacacggagaatgtcaaagttaagactgttatcaggacagtatttaaggacagcgaatgcgctgttgctcctgttcccgctgatgctgttagtgagctgcggaaatacgcggacggaatacgttcccgtaccggtggtgccgcttccgccgcaactgaccactga

SEQ ID NO: 292644 - DNA, 312 bp, Morganella morganii
atgaacaatacagcagtacccgcgtcaccggcggcagtctggcagacactgctgacttacctgctgcaacagcactacggcctcactctgaacgacacggaaatcagcgatgaacgtgtcattgaggcctgtctctgccggggtatatcgttgtgtgaggcactgaatacctttgcagagaaatacgcactggtccgcaccgatcagtgcaacagcagtatcactgcgaccgatattctgcgggcacagaaagcgaccggtctgatagctaaccactgcagctatgccacccgcagacccgttaccgtataa

SEQ ID NO: 292645 - DNA, 372 bp, Morganella morganii
atgagaacattcaaaggattaagcaaccaaaaccggagtccgacgagtaatgttgttccgattcgtccgggtggcggggttgcttctaacgatgataatagtggtgctgcgaaagctaagtggattgctggggcgacggcaaaaggcttaggaagcgttttgcgctccctaacctttctcatcatgttgtggctacgtttgccggttcgcctgttgttggttgccacatcagcgatggcttttattggcgttgttctctgccttgctatttttagcgaccgttccatggttccgggtttcatcattattggccttgcttctacggctctcgcttggctctatgatttagttctcgccaaactgaccccttaa

SEQ ID NO: 292646 - DNA, 351 bp, Morganella morganii
atgaattattacaaagacgaaaacaacggtgtttggggatatgatgatgatcaggtagcgaggggttttgttcgtgaaggactggtaaaaataacagaaaaggaagcggatgaattactcgtaccaccgccgccaaccaaagatcaatcaatagaacaagctgaggtaaaaaaacagaggttgatgtcagatgccactgtagaaatggcaccattacaggatgcagatgatattggtgaggctacagatgaagaattatctaggctgaaagcttggaaaaagtatagggtaacactgagtcgtattgatacatcaaccgcacctgacattgattggccggttaagccttaa

SEQ ID NO: 292647 - DNA, 429 bp, Morganella morganii
atggaaatgtttttttaccttgatgaagaaacgggcggggtttatgcctacgatgaagggcaaatgtccgttattaaacggataaatgcgcctgattttgataatgaaaaagagcagataccgcagattttctttgaaattgacgagaaaattaaaagtatgcataaaatgacggcggaagaaattgaactgcatatcaaccccccggtgacaaaagaacagcagattgaccttgcggaaggcaggaagcgtattcttatggcggaagccagagataaaatcagtgtgctggaggatgctgttgatttaggaatggcgacaccggaagaaatatcagccctgaaagattggaaaacataccgggttatgctcaaccgtgttgatacttccctcggggctgatgtggtatggcctatgccaccggcttaa

SEQ ID NO: 292648 - DNA, 396 bp, Morganella morganii
atgtcatacagtgacattatgtcaactattgcaacgataatagcatttattgcaattcctgcaacgtactataacggagtgcgtgttggtcgcgtgaatgacaaacgcaaagagtttaatgcggttgcagaaccgatgctggtaatccttgaggagcatattgattatctgaaatcggggagaaagccacaggtgatatccatcttctgcggctctctattcccacaagaaaccctgtcagcattgcggcgcaggctatcagaaaagcaagccggtgaaatgaacaagcagataaataagtatctggaatcgatagatgggttagatgcagatggcggttacgatattgcaatcaagaatgcagcgtccctgatgaatctgccgcggcttagatga

SEQ ID NO: 292649 - DNA, 135 bp, Morganella morganii
atgcagaacttagaagctaaaattatcgaactggaaaaggccaatgcgatattgcaagggcagtgcggcactctcgcagctatttgcattggcttaattgtcgtcatgcttataaccgcataccggttaaaatag

SEQ ID NO: 292650 - DNA, 582 bp, Morganella morganii
atgaaattcaagtttattctttttggtcttctggtgctgtcgcctttatcttttgcagatcatatatctgatttggaagccagcgccacaaagggagacatggttgcacaatcatctcttggtcgaagatactacgttggtgatggagttaagaaagatccggtgaaagcagaagtatggttcactctggctgctaagcaaggagaccccctatctcaaacaattttaggtcacatgtattactacggtaatgatggcattaagcaggattacaataaagcagcagaattacttctaccagcatcaaaaaaagggattcaggaagctgaggccattatggggctaatgtatcttcagggcgttggtgtaaaacaaagttatcacacagccagtaaattattcacttctgcggctaacaaaggtgagccaatggctcagtataatttggggttaatgtacgcaaaaggtgacggagtaagacatagctattccgtggcaaaggaatactttggaatggcttgcgataatggcatgcaacagggttgcactgaatacaaacgacttcaccttgagggatactaa

SEQ ID NO: 292651 - DNA, 261 bp, Morganella morganii
atgactgcaccgcaaggtgctcgcccaagcttccctgaggggatgctgatactcatcgacccggaacaagaggttaaatttggtgatttctgtgtagcgcgcatgcttaacgatgaattcacatttaaacgattaatcagagagggtgagatggaataccttgagccattgaatccgaaatttgagatgatccccatcaatggaaactgtcagatagtgggaaaagtggttaagtcacagtggcctgatgataccttttga

SEQ ID NO: 292652 - DNA, 210 bp, Morganella morganii
atgaataacttaagtcgataccgtaaagagctgggattaactcagtctgatttagcgatagcacttggttgcacaaagggaaacatcagtcattacgagaatggcagacgtaaagctgatttgaacatgtgcagaaatcttgtcgctttttttaataaaaatggggcatccatctcaattgatgacctgttcccaccaaaagcagcataa

SEQ ID NO: 292653 - DNA, 210 bp, Morganella morganii
atggaaccaacggattttgaaaagtggtgtgcgggtaagctgatacgttcggtcaaatatatcattctcttcagggcgcaccaacccgacggggaattggtttattcccacaatgaaatcgagaagctgcacagtgcctacatggccggagttcgcagcagactgccgtaccagacaccgccaaaaggagatgaagatgaaatggattaa

SEQ ID NO: 292654 - DNA, 192 bp, Morganella morganii
atgaaccatatacagcatctctttttattatgcaaccgtgaagctgctaaaattgctttgcttagcaattttagcagctatttaagtgttatatataaaatattttttggtaaaatcgttaaaggtttttttgtttatagtcagtatccaaatggactaataaattgtcttcttccactgtaccataaataa

SEQ ID NO: 292655 - DNA, 519 bp, Morganella morganii
atgaaaaaatatttattagggattgtgctggcacttaccgcagtgggagcgatggcggttgatgggtacaaaggtgtgaagtttggctcatcttttgaaaaaataaaatcagctggtttatgttcttttgtaccgtataaacaaaacagtgtgtctcatgtatctttgtaccaatgcacggattttcgtttttcgggtaaaaatactatagcaatggtgtcattactggataataagttcagcagattggttatcgttgtaaataatgggagcattcaatcgctatatgctgctttatctgaaaaatatggagaaccatcattcctttcttcttcggaggaagtacaacaatcaatggtaactggtgagcctgtttatgttaaatttgacaatgataccgttatcataaaagttgaaaaagttaatggtattgaagtctcaacgcttatttacacagttcctgattttgaacaaaaagttagcgatattcagaaaaacaacatatctgatgacatctaa

SEQ ID NO: 292656 - DNA, 447 bp, Morganella morganii
atgccggtcactattaccgccaaagttaacggattccgccgctgcgggattgcccacccggacacggccaccacgtacccggatgatcgcttcaccaaagcacagttagccgaactgcgtgcagagccgatgctggtcgtctctctcggggccggacaggctgccgggggtgacaccgcagcagaagaacagattgccgcgctgaaagcggaagtccgttccctgaatgcggcggctgaactgctgaaagatgataaccgtcatcttaacgaccgggtgagtgatctcaccggacagactgagcgtctgaccgccgaaaataccgcccttcaggctgagctgaccgcactgcgtgacccgcagagcccgccgtccgctcaggataaacaggacgatacgccgccggataccggtgacagtgacaaaaaatcatccgcgaagaaatag

SEQ ID NO: 292657 - DNA, 630 bp, Morganella morganii
atggcagattacaacaccgaaattcagtatgcggtatttgatgaaaacgggctggctactgtgccgggatgggctgaggtgtattgctgtcacccgctgacacgagaatataccgggaaaagcatggatgaggtaccgctgggattcagtctgaaagctgatgcctatccggataaaccggaattaccctcaccgggatttgccattgtccgcagtgaggacggtaagcgctggctgcatgtggaagactatcgcggtaaaaccggttataacaaaaccacaaaagaaaaagccctgataaacgcagtcggtgcgctgccggataatctgacgttacttgtgccacaaacaccgtttgataaatggagcggtaacaaatgggtgactgataaggccgagcagcaagcgtatgaggtcgctgttgccaaaaatcagaaacagtcgttattggtagaagctgagcaggaaattgctatgctggagcgtaaaatacgcctcaacatggctacgggtgaagatagggcaaggctgacagaatgggaaatattcagtgtgaaactcactgataccgacacatcagccggtgccggtacagaatggcctacatcatcggtttcaccggccagataa

SEQ ID NO: 292658 - DNA, 558 bp, Morganella morganii
atgacagatagtaataatgtcggagacggtcaaactcagcttgggtataacgccggcacagaagaaaagccaatatttaatcattatctccgtgggactggctctgtttttgtcgatacattgaacggactttctgcccttggcgacataaaatcacagaaatccatcattccgaaagactacaccaactttgataaccgatacctgcaactaagtaagctgggcgataagaccggacaggttccggatatggggctttttctggcaaatcttggctatcatggctggcagtcactgccatcactggatggcggaggaaatctgattattcagtgggggtcatttggtcagttcaagtcaggcgacggcgttaccgttaattttcaaaagccatttccaagatattgcgtttttgctatcgcaataacagtcagacaatcaaccaatccaacgactcaggaagccgcatatctggctgaaaaatcatcaacatccgcccgtttcacgaagggtggtaccgaaacatcagatggcgtctggttagccttggggtattaa

SEQ ID NO: 292659 - DNA, 378 bp, Morganella morganii
atgatgtcgctgtactgggtggcgctgaaaacaatctggcgcaaagaaatcacccgttttatgcggatttggatccagaccctgatcccgccggtgatcaccatgtcactctattttattattttcggtaatcttatcggtaaccggatcggtgaaatgggcggtgtcggttacatgcagtttatcgtacccggcctgattatgatgtcagtgattacgaactcctatgccaacgtatcctcttcttttttcggggcaaagttccagaaaagtattgaggaactgctggtgcaccggtgccgacccacgtcattatcgccgggtttgtcggcggtggtgtggcgcgcggtgtgctggtcgggatcctggtcacattag

SEQ ID NO: 292660 - DNA, 1071 bp, Morganella morganii
atggcacaggttatcaatactaacgttctgtctctggttactcagaacaacttaaaccgttcacagggcgtattaggcactgcaattgagcgtctgtcttcaggtgcccgcatcaacagcgcaaaagatgacgctgcaggccaggcaatcgccaaccgtttcaccgctaacgtaaaaggcctggcacaggcttcccgtaacgctaacgacggtatctctatcgcacagactgctgaaggtgctgttaacgaaatcaacgacaacatccagcgtatccgtgaactgaccgttcaggcgaaaaacggtactaactccaagagcgatatcggttctatccaggaagaagtgaacgagcgcctgtcagaaatcaaacgtatttctgaacaaactcagttcaacggcattaaagtgctggagcagggcactaaaatgaacttccaggttggtgcaaacgacggtgaagtcattgaactggatatgcagaaaattgatctggctaaactgggtctgaaagatttcgaactgccgacttatactgctctgaaatcagatactaagcttgatgcaacagcagaaaaagcagaggctgctaaagtagatgcaacatttacgactgttgatctgaaaggccacgaactgtttgaaacagcaaccggtactatcgttgctaagaaaggtgcggattattttgaagtgaaaaccttcgaaaaagacggaactacagcgacacaaggtaacctggtcgttggtgataaactgactgatatcaagtccaaagcagatgctgacaaagtcaacgatgcaaccaccaaaaaactggacgaagcactgaaaactgttgactcataccgttcaaaactgggtgcattccagaaccgtatgcagtctaccatcaacaacctgaacaactctgttaacaacctgagcgcagcacgcagccgtatccaggacgctgacttcgcaacagaagtgtctaacatgagccgtggtcagatcctgcagcaggcgggtaccgctgttctggcacaggcaaaccaggttcctcagggtgttctgagcctgttacgttaa

SEQ ID NO: 292661 - DNA, 312 bp, Morganella morganii
atggacatcagaaaagacaaaggggctacgctttcgcgtaaccccttgttttatttggtggagctggcgtctctgtgctttgaattatatcttgttgatattaaatattttaatttaaatttatttcgtatagggttccaaaaaggaaccttaaaatataaccatagcacgttgaatggttccagtacgccaagtgaattcaaaataacatgccagtgcagtcatgtctgctatgagctaggtgcggacactgggtttaccgtttcggcaaaacttaactggcagatatcgatacgacaccagacccgctaa

SEQ ID NO: 292662 - DNA, 642 bp, Morganella morganii; identical to SEQ ID NO: 194796

SEQ ID NO: 292663 - DNA, 633 bp, Morganella morganii; identical to SEQ ID NO: 289829

SEQ ID NO: 292664 - DNA, 213 bp, Morganella morganii; identical to SEQ ID NO: 278109

SEQ ID NO: 292665 - DNA, 2127 bp, Morganella morganii
atgaataagattatttttgagggaatcgctacccataatttaaaaaatttagatattactataccatttaatacaataaccgctatttatggccgttcgggcgcaggaaaaagttctttagcattttcatcaatttatcaattatgcaaagatgagtttgatgctgtagaaaacggttatttgaatgaaagtgattataaagttgtaaatttcagtgggttaattcccgctgttgcgataccacaaagaaacacaaataacaaccctcgttcaactatatattcatatctgaatatagctcaagctttgtcatctttaaaaatcaaaagaaacgtagcagtacctaattatgataaattaaaaataaacaattataaaaatgaatgtcctcactgcttaggccttggcgagatagttagtgtggacgaatctgaattaattaatgaaaaatgtagactaaatcaaaaaccatttttatgttggcggactggtgagttatctgattattatcaccaattacttatggtctattgtgataaaaataatataaaagtagatgatacttttgattcactatcacttgaaaagaaaaacctaatactatatggagaaagcgctgagaaattatcttttagatttaaacacaaaggaaaaacgaagcaaagaagagcgttttataaaggcgtaatgtcttttgctaattcgaatataggacggagccaaaaaaattcaaagtataaaaaggaagaaaattgctcattttgtaatggaagcagaattaaccaagaaacagcccaacttgatgttttaggatttacatttgatgattttttactatctcctatatctgaattatgtaataccctgaaaaaaactataggtgactcagtattaattagagtgttgtccgcaataaataatatgggattgggatatttaaatttgtctcgttcaattcccagtctttctgggggggaaatacaaaaacttattttcagcaggcttttaacatctaatacaacaggtattctgattgttatcgatgaaatatcatcccaaattaaccctgtcgattttgaagatatctttcaaaagttaaaaaaattatcagaaaaaaacacagttattttagtagagcactcgcagtatttcatagatcttgctgatcagcaaatccatgttggcaaatacgctggttcttctggtggggaaatttgtgaaaaagaaaaaattcagccgctaaggaacctcaatcccaaaaataatatatctgattactattattttgaagggcttaataaaaataacgtcattaatcaaaatatacgtatccctaaagagtgtgttactgttttttctggaatctccggatcggggaaatcatctttagctaaagctatttgtagtcttaccgattcaatttatataagccaaaaattatcatcatatacaggacgttctactgtcgcaactatcacggatttgaataaattaattgcagaatttttctccgatacaacaaaattagatatagagtattttcttccaaacaaacttggtggatgtaaagtttgtgaaggtaagggcgtgataaaatatgaaaggggttttgaaaaggatatctacatatcatgtcataaatgtgagggtaagctgtttgaccacaatatagatgaagtaaagtctcagattaatggtatgaatataatagatgtatatgatactgagttgaaagagttaagctctttttttaataacactaagattaatactattcttgaaactatcgattatcttggaatatcacatttgaaacttaatagaaaaacgcagtccctgtcaggtggtgaaatgcgtagaataaaattatgtgaaatactatctaagtccagaaaaacaaacaaaatattgtttattgatgaacctgtcgctggacttgattctgagacggcttcgaaggtgctgaattttatatatcaaaaatctaaattattcaatgcaattgtcattatagagcacaggcctgaggcagatgactatgccgactttaaagtactaattggccctttgtcaggaaaggaaggtgggagagttatagaacaaaagatcattgagtcagttagatga

SEQ ID NO: 292666 - DNA, 1083 bp, Morganella morganii; identical to SEQ ID NO: 121323

SEQ ID NO: 292667 - DNA, 1125 bp, Morganella morganii; identical to SEQ ID NO: 121322

SEQ ID NO: 292668 - DNA, 201 bp, Morganella morganii; identical to SEQ ID NO: 121321

SEQ ID NO: 292669 - DNA, 1140 bp, Morganella morganii; identical to SEQ ID NO: 121320

SEQ ID NO: 292670 - DNA, 993 bp, Morganella morganii; identical to SEQ ID NO: 121319

SEQ ID NO: 292671 - DNA, 441 bp, Morganella morganii; identical to SEQ ID NO: 121339

SEQ ID NO: 292672 - DNA, 954 bp, Morganella morganii; identical to SEQ ID NO: 121340

SEQ ID NO: 292673 - DNA, 408 bp, Morganella morganii; identical to SEQ ID NO: 121341

SEQ ID NO: 292674 - DNA, 1188 bp, Morganella morganii; identical to SEQ ID NO: 121342

SEQ ID NO: 292675 - DNA, 273 bp, Morganella morganii; identical to SEQ ID NO: 121343

SEQ ID NO: 292676 - DNA, 768 bp, Morganella morganii
  misc_feature (727)..(736): n is a, c, g, or t
ttgaaaaactggtcaccagagaatactaaagaaatcaaagcctggcttgacatagataactatcgcaagctcgaacacatcagtctgaatgccttgtattacgaactctgggcaagagcacttctgtacaagccagggcctactgacgaagaaaaaaaaggattatgggtgtacatgactgaaattttcagtggtaacccccatcttttcaaaggaaagcaactcgattatccaacagttcacgacactctttacagccctccgcacctttttattactgatatcacccggcttgctgaacttagtgtgatggcccttagtgtgaatctcttcacctgggagaaaggaaacgatgaatattgtgtgaatacaccccaccacgaagcttatgtatcacaactcttgtctcccttatgtgagaaaacggtgttgctggaaatcgatctcggtagtggtacagatgatgaaatagccgaatcgataaaagcggctctgccacaatggaggttggtgaaaggggtggaagttaaggaaaccggtatcgtccgtttcggctatggaaccattaaaaaaatcataaattacaggttgattgcgatgctggacatcttactctgggcaacaaggaaagaactaaggatctcagatgatcgcctctcccggcttctttatactgatgaagatgaagaaactactacccgtttagggtatcacattaaagactcgnnnnnnnnnngtagtagatttcggggatttgagatcagttag

SEQ ID NO: 292677 - DNA, 207 bp, Morganella morganii; identical to SEQ ID NO: 121350

SEQ ID NO: 292678 - DNA, 564 bp, Morganella morganii; identical to SEQ ID NO: 121347

SEQ ID NO: 292679 - DNA, 231 bp, Morganella morganii
atgcagatgtttatgggggttgtttctaccctgaagacccctctgctcaggcaactcgcaaacagtgacacattgctgcattgcctgaattcgctcgtgaattatatttcaggcaatctggatgaagcagagcacatttatgctgatttactggcacagtatgaaaagaaacgcattgcacgttctctgacttatacaccaccaggatccgtggtcaggaaaaggctgtga

SEQ ID NO: 292680 - DNA, 321 bp, Morganella morganii; identical to SEQ ID NO: 121345

SEQ ID NO: 292681 - DNA, 615 bp, Morganella morganii
atgtcttatacaacagatatccagaaagcacagtttgacgaaaacggactggctgttattccgggctgggctaaaatctaccgtgctcatccatatacccgcgaatatattggtgcagcgatggataatgtcccttatggtggttcagtggttggtgatgcttaccttgatgagcctgaaatcccatcagtgcctaatatggctattgtccgctcacctgacgggcaaacatggctgcatattcctgattatcgtggttccgtggcgtatgacaaagagacaaggcagcaggttgaaattacagagctgggcgaactgcccgataacctgactttgtacgcacctgaaacgccgtttgatgaatggaacggtaaaaaatgggttaccgataaagctgagcagcaagcgcatgaagttgctgttgctgaaagtcagaaacagtcattactggcagaagctgaacaggtaattgccatgctggaacgtaaaatacgcctcaacatagcaactgaaacagaccgggtaaaactgacagaatgggaaatttacagtgtgaaagtcactgataccgacacatccactgcaccggatattacctggccgattgaaccttaa

SEQ ID NO: 292682 - DNA, 1176 bp, Morganella morganii
atgaataaattacttttaactttgcttttaacggtgccattgatatcaaatgcggcgtggtttacaaaggtcgaggatagtatttttgatgaaaaaaatgcactgttaatgggggaaatacataatactcagtcatttatgatttttgaatgtaagggtagtgatttatacctctcttatgtggaaaaaaataatgatcctgacataaagtcataccctgttacgcttttgtttaaggttgataataatagccctatagaattcaatgcaaaattccaggtgagaaatccgaactatatggaagcagtgacaaaggacaatgaaaaaatactggaagcaataaatcaactcaggtcagcaaagagcaaatacatgtccggccttacagtcaagggcacagatttccgcgtttcattttctggtgatgttaaccgttctacactaagtgccaatgcctttattaaagcctgtgggttaagcgattacactctaaacccaaaggaaaaaataggagttattgactgtagtgattcactaaaaaaaagcaacaaaggaaagttaactagcgttataaccaacccatcattgctagaagaagcaatctgctacaatggggtaaatgtaacgcaacatattgctaactccatgaagatggatggggatgtggctaaaaatctgaccgtgagttcatggcgtgataatataacatcgaaactatatgtttctttttttaatacggaaacaggtagtctcaatatggatgttgcatacttagacaaagacaaaaaaataaaaacaactaataattttctttctttagaaaagacaatgcccgaaagatggccggaagcaaagtttgtgtttgtcggtgaagctaaagatggtaataatagatggctttactttaatgttgtagaggctactaacctttattcttatagaataaaattaaaagatgatttatcacccactgaaaaagcagatgttgaattcttctctaatggtggtgtttataaaatatggaaaaatggaaatctatccgttgaaacctcatggatagatgactctaaaggaagagtgcttggcggggtgataaaggatcagtcagggaaacaggtgtgtgaacttgtaaccaatgaccaagaaattccagtagaaaaacaaaaatgtaaataa

SEQ ID NO: 292683 - DNA, 1887 bp, Morganella morganii
atggcgggtaatgcctttgattttgaactgaatgcggacgagcgagccagtgctcagattatttttctggaagaaaaagtccgaagtctgactccggcgctggatgaggctcgggaaaaactgaaactcggtggtgatgaatcagtaaccggattgcgtggtatcggtgatttgctccggggcgtatcagatgaagcaaaagctggtgttcagaatatcggagacatgatcccgccgttgaaaaactttggtgcactggccgggaaactgacaggcattggtggtatcggtgcaattatcgccggtggcggcaagctgattacggggatggcagaggaaggtaaaaatatcaccacatcagctgctaataccggtatgacggtagaggaaagtacccggctgagcggaactctccatcagcgcggtgttagtgtggacgattcccgcaatattattgaaaagcagtttgagcagttcagccgtgctcagaatggcgatgataatgatttacgggctgctattcgcagtatcggtgctgaaatttccaccaataaagacggcagcgttaatatggttgagacactaaagagtcttgaagccgcgattaaaatattgccggaacatcgaaactgggagcttcgggataaactaaagttaccaccggagcttattgccctgttacgggaaggaaaactccaggagcgattagataactcggacaaatttggcctgaccatggatggggagttcgctgaaaaaatgactgaggtggatactcagttaagcgaagctggtgctaaattgaccggtaaaatgaatcagatacagaagtcgctttatgagtttattgattcacccagcataatccctgatttcggtgatcttgatggtgctatgaaaaatatccgtgaatccgagctgcgtataaatgatacggaagataacttttatcatggtgataagcgtcaggatattattcgttgggctgctaaagacaaggagtacagggattcactaagttggtttgaggacttgcggatgaccgccctcgacccggacgacaaaatgtatactgatatctataacaaatggagtgataaatgggaggaacagagggaacgagctgaagccggtaaaaacaagccagcattaaacagtaaggtacctgataattgggttcagcatgacaaatataaccccaacagcagagggtttcgtaataaaaatcccggcaacctacgtgaagcggataatcagattggtttacaggggcctgaaggcgacactatggcagtattctcatcatatcgtgatggatttgccgctatgtcacgtcagctaatgctggatgcggaaagagggaaaaacagaatcgctgattatatcgaaaaatacgcgccagccagcgaaaataaaacgcaggaatacataaagatggtctctgaccagactggctttgggccatatgaaaacttgaatatgcatgatcctcaggtgctggctaaactaatgaacgcaatgatcaaggttgagaatggcgcccagcctttcagctatgaacaggtaatggaaggtgttatggactctattactgatgaccgctggaaagggcggcgcaaccccgatcgcgttcgtgaacagcgcgatactctcgccatgcagcaagctcaacaacaagagactgcatcagcagcgactgactttaaaatagacagagatccgactcaggcattattggcttttagtgaacagttatctaaggtgcttcaggaaaaccaaccaggcggcacgctggaaattgtcctgactaacgcggaaaccggaacaaaaagcaccgtaaacgtgaaaccgaaaggcagggtgacaactgcgatgaatatgccgtag

SEQ ID NO: 292684 - DNA, 243 bp, Morganella morganii
atggtaggcctgccgctcttgaaatccacacgcaaagctgggagttacctttccattgtggagaatgccgaggctgatcggctaactcgcatgggctactgcacttatcaggatagaagcacacacgccatggggaacctgaacgcatacactctcagcgtatgcctccacaattatttcaactctccggaatttctggatagttcgggtgcaacaacatttaagacaacaaaatattcctga

SEQ ID NO: 292685 - DNA, 462 bp, Morganella morganii
atgattgcaggtgcgaaaagagggaaaaatgaacacaagggactccattcttggcatccctactatgcggggttttccgaatcatttgtagcttcagttttgcaaattgaagaggcagggccacaatctgttgtttttgatccatggatggggagcggcacgactggtattgtctgtcaaaaaaataatgttaattgtatcggcgctgatattaatccagtgatgagctatttcgctgcttctaaaaacaaagaaaatatttcagtgctagataattctggtgaggaactactaagagatattacattaggttttaacaaaattaagaataaaataaattctttatcaggtggggtgtcagttattgaacagcttcaatggttttatcagtctatcagtgaacagttcaataataaaatgtcactatatgaagtcaaccccataaaagctttttttttgtag

SEQ ID NO: 292686 - DNA, 1074 bp, Morganella morganii
atgaaccacgaaataacaaaaaatgaaagtgatacaattttcattatgaaatcaataggaataattgctgttgttgttgggcactatgatggtatattatttaacctagcacacgcatattattatcatatgccattgttttttttcctatccggtattttcataagggataatgttaactatcgcaaattagctattaatacgctaaaaacaatcaagtacatcatcattacatatttaataattggtatcctagctgtgtatttatctggtaggtttggattttatctcggccaaccatttaaaagcgatatattaagtaccttgcagttaatttataatcgaaatttccataacaacactctgttccttgttgcgtggtttttatttgcatattcaatatccatgatatcatcatccttaataatatcaataacaaacaacataaagaatattataacaaaatctgtttttttaatttcaatagcgatagctcttggttatatatctgtaaatgttttagctccagaatataaagagacaaaaaaacaattaattaatttagcatcgcaagtttgtttctcttcaatgtttatgattataggaaataaaacatggcgcatgatgatgaaaattaaaagtaaagttatagttacaatctctttaattgtaataattatattatatagattcttcattaatggaaatattgggatagcgtggagtcactatcctgcagggctaataccatcattggtaatagctatttcctcaatatttttcatcttgatagtttcatcattcttatgtaaaacgaaagttaaaaatattgcaatgatgccaggcatttactcaaagcacattatgtcataccacctttttattttcgttattcttgatattatcgtttacaaattagggtattgggatatatcaaaaacaacagcccttaatcactacctatcttcatcaagtcagtttatttatccggttatctccgttactgcacctgtaatcatctgcgtgattttaaaaaaaataataaaaactaatagtaatattaccccgcaataa

SEQ ID NO: 292687 - DNA, 909 bp, Morganella morganii
atgttgattgcggatggtacaagttattcattactctttactgaactttgtttattattgagcggagaagtactgcctcagttagatgaacactatgacttttataattatttacaagataaaaaacagtatgaaaacaaagaatcagcatatcaatattggaaaaataaaatctcaaatctaccagacgctcctctcctgccattatatatggatccagaaaaaataaataaaataaaaactaaacgccttagctggacatttagctcaaaagaatggaaaaactttagtaattttgctaaagaaaataatattacaccttccattgcattagcaacctgtttctcatctgtacttgcaagatggactggccaaaatagcttattactcaactttacattatttgatagaaagccattagcccctgcagttaataatattatagctgattttactaatgtcattcttttagaaatgaaaacagacaatcgaccattaatttcattatctaaagacaatcaaaatacatttattgaagcttggcaacattctgattattctggtattgatatcattagagaccttcgtaaaaatggcacccatccttatgggtgtcctgttgtctttactagccatattaatcaaccacttattgataaaaatatagaatctgtattaggttctataggatggggaatatcacaaaccccacaagtttggcttgatcacatggcaattaacaaaagtggaaatattgttttacagtgggattataacaatgacttgttccggaatgatgttataacaacaatatttgatgtttatatttctcgtatacgccaacttgccaacgatcctaatgcctggattgaaacccaacctgatttaattcctaaaaacactgcataa

SEQ ID NO: 292688 - DNA, 252 bp, Morganella morganii
atgctgctggttaatttctatcatgatgaagaaccggatatggctgacgcggtaaaactctcccttcgtttcactgaatggcggactgttgaaccggagtatggcgaacttacaccaaaaaaggcagccaaaaaagagcagagcagtacggtaaaccgggggaaagttcaaacaaaagaggcgggtaccacgacaaagaaaaaagggtcagtggctacacagatcgccgatggtgactggagcttattttga

SEQ ID NO: 292689 - DNA, 282 bp, Morganella morganii
atgctgatcgtaagcctgctgcatggcttcaaaagcatctttcagttcgccggtgagaatcagatccataccgatttccaccggattaatcacaacatggtcactgcgggtttcaccggactccacctgaaactgtgtcgccttatgctcatcccggacattcagttgaacgagatttaccgactcaaacagcgtggtgaaggattccgtatcaaatatcttcacttccgtaatcatttccccagccccgtatttgtctggtgccccaaatcctgtaactga

SEQ ID NO: 292690 - DNA, 261 bp, Morganella morganii
atgctgatcgtaggcctgctgcatgccttcaaaggcatctttcagttcacctgtgagtatcagatccatgccgatttccaccggattaatcacaacatgatcactgcgcgtttctccggattccacctgaaactgcgtcgccttatgctcatcccggacgttcaccttgataggatttaccgactcaaacagggtggcaaaagattccgtatcaaatatcttcacttccgtaatcatttccctaaccccgtatttgtctga

SEQ ID NO: 292691 - DNA, 417 bp, Morganella morganii
gtggtacaggccagcaaaacattcccgaccggaatttttatcacgcagtttgcggatgatgcggatccgctggatttaccggcggtggatatcgcacagaccggcatggatatcaacggtaacctggtgagctggtcaacacctacgccgcagacggtgactattaacgttttgccgggaagtgaagaggataaaaatctcgctatcctttttgaggcgaatatcgcgaaaaaaggccgccggcatgccggagatattatcaccattgtcgcgtcctatggtgacggctccacgacgattgcccgtaacggaaaaatgaccaacggcagccgtggtaattctgccgccagtgccggacgtctgaaaacgaaagcctatactttcgtatttcaggattttgactcaacccgtttttaa

SEQ ID NO: 292692 - DNA, 333 bp, Morganella morganii; identical to SEQ ID NO: 280370

SEQ ID NO: 292693 - DNA, 1344 bp, Morganella morganii
atgcgcgagatttttgaaggtttttatgatatcactttggatgaagagacggaaatatttaaaagtgataaaactatttttgtttttgatgcaaattgttttttaaatttatatcgctgtgaagaaaaaacaaagaaagatttcatggatgtaactaataatataaaagagaagctatggttcccatttcaagttggtttagaatatcaaagaaacagattaacagttatcagtaagtcacttaaggatttaaatgaaataaaaaaatcactaagtgagataacaagtggcataagtgttttctgtgaaggtgataaaaatataaaaaataaatatcatgaattacataaaaaacttatagagttaaaggaaggcgtaagtgatacggtaaaggtatttatagaagaaaatatagaagtgagaatggagaggggggattatatctctaaatcagatgatgtaagaaaatggattgatgaaatttccaaggggaaaatatcatcatcatttactcaggctgagataaatgaaattaacaaagaaggtgaatttagatataggaataaaattggaccaggctggaaggatgaaaaggaaaaaggagattctaattcgtattttaacaatgtaatatataaagataagtttggtgatttgtatttgtggaaagagctattaagaaaggcaaatgaagatagcgttgataatatagttttcatcacaaatgatctaaaagaagactggtggtatagagtacatggtaaaacaattggaccgctggaagttttgaaaacggaaattgtcagtaacgggataaaaaaatttaaaatgtatagtcaggcagagtttgttattaagtgttctagtatatttaaagacattaatgtaaatgaaagttcaataaaagaattagagatgttaaataaactaaagcctaaagtttcgcatgattccttaaatgtacttgataggttatataaaaccacagggctgtctcatttttataataatcctacattaaaagcagctttagatcttaataaaaaatattcagcagctatagaacttagtaataaatataatttaaaaagaaactattttaatggcgtcgcgactccttcagaaagaatcgattggttgcaagaaatgaatgagataaataacgaactatctgaattagaagaggagttattatttcttcaggatataatagagtattatgaaggtagtgatttaaaagaaaataacaataaaaacaatcaagagttagagttgttaatgcatagaattaatgaattaaaggaagctaaggagtatatttcgaatattattgatgataattaa

SEQ ID NO: 292694 - DNA, 1071 bp, Morganella morganii
atgaaaataattacgttatacaatcataagggtggggtttcaaaaaccacaacaacatttaatatatgtagttatcttgctaattcagggaagaaagtattagttattgatgctgatcctcaatgtaattttactggaattgctatggcagcgacaataaaaagacttgatgaggagtcagaaaaagaaagggttattaaagaactacctggtacagatattcttgaaattcttaatcaaagaataaaaggtgattctgctttcattgatttagataaggttgaggtatgtaatataatagaaaacttggatcttatccgagggtctgttgatttatcttcaattgaagatgatttagcagaagcacatgtacagagattaagccaaagaacaaatcttatgagaacctatgttgctgtaggagatttcattgtaagattagcagaaaaaaataaatatgattatgtttttattgatgttggcccaagttctggagcattaacacgttcgttttttcttgcatgtgatgcattttttattcctgtggctccagatagatttaatgtgcaagctatatcaactcttagtcatattattaatcgttgggttaatgagcatcgacaggtagttcagtcatatatggagatagaacttccggttagacctggaaatccagcattcttgggatgtattgtccaagcatttaagaaatttgcaggcgttgccaagcctggatatcaaatgtggatggatagaattcctatggaaatagataataagataaaaccgattatagatgaaaataaatatttacctgaatttgaggacaaaacacctaaaaattcaattattattgaaataccagactttaatcagcttgcaccattaatgcaggaagttggtaaggctgtttttaatatttcacagcaagacactgctctaataacaaaaagtggagagccgtggcgtggtaataattggtcttcagcagttggaagaatgaattcttataaaagattatttaaaatagcctcggatgcaattattgattatgaatcaaaagaggtttaa

SEQ ID NO: 292695 - DNA, 648 bp, Morganella morganii
gtggaaattaaaacctattttgttgcatttatagatatattaggattcaaaaatattgttgaaaaagaacgattgtctggttatgagggagagcaattaaataaactttttgattgtcatgttgaatgtgaaaaaatcttcaaagaacatgggctggatattgtgcaattctctgattctattgtaatatcgaaggcttatgacaaagagtcattccatgagtttgttttttctgtttcagaatatcaaaagttactattacgaaaaggttttttatgtagagggggtattgcagtaaacaagcattatagtttatcatcttttctttttagtcctgcgttaatcgatgcatataaagtagaaagtgagaaagctatttaccctagagttgtggtgtctgaggatgtgataaatttagtttttcctgagaaagaataccctaaaaacttatgtaaagaatatgatggtttgtttttcattaattttttatataaagaaaatatttcctcaattggagatgttgtatcaaatgttgtggctaattgtttgggaagtaaaaatcactccataatgcagaagggaatatggctggcgaattactctgattatattttaaaaactgatctttcgccacaaaggttttgctaa

SEQ ID NO: 292696 - DNA, 192 bp, Morganella morganii
atgcttaatggatattttgatatggacgaatcaacaccagaaagggataagcggttgcttgctgtgcaggctgcattggaaattataaaggcatccgtaactccatctccggttcgtccggcaggttcgcttaaggatgctgaagagcatgtagcatcactggcagatgcaatacaaaatgctcttagatag

SEQ ID NO: 292697 - DNA, 636 bp, Morganella morganii
atgaccagattcgataatgctctatccacttttgatcatgcaatatctcgctcagtggaaatgataagtctttatgatgccctggtagcactacggaaaaaccaaccggagaatgatgatgcattaaggtcagcatatttccaagtagtaagttcatttgatttcttggctcatgaaattgctgccattgagggaagatttcgatttgaatcttctctgcaaactagaaacttgtcactaccaatggaaataatcacaattactgatgttactgatagagtgaatactgctgaaataagaattagacagataaattcattcaaagcatttgtagacccaggtaagctagcagaaatgttagcttgttattgtaataatccatgggataaaatagcagatgcttacaattctacaaaagatgagccagataaaaagaccgcttctgatttaaaggatagattaaaaaatatctggaaaagaagaaatcagatagcacatgaagcagatgtaaatcctgctatggctggaatttcattatggcctatcacaaaagaagataccgagttaactgtagaatttattaaagatttgggtagttgcttaccaatagtcatatctcagcatctaggtgtatag

SEQ ID NO: 292698 - DNA, 1065 bp, Morganella morganii
atgaaacaaatagcgatatttaatcacaaaggtggtgtagctaagactacaatgacttttcatctggcatggatgttagcttccctgggtaaaagagtgatggttgtcgattgtgacccccagtgtaatcttactggtatttttttaggcgaaattgatgctgaagaatatccatttgaaagtcatagcccacaaaaaccaaaaaatatcagagatgcggtaagaccagcgtttgaatcacggccatactctatagaagcaactgaagtttttgaatgtcctcttcaaaagaaccttttccttcttcctggacatgtcggtttatctgaatacgaaagccagctcgcggtttcacacgaactaagtaataccctttctgcgcttcaaaatatacctggggcgttacaccatgcaattaaaaaaacagcaaaaaagaataaaattgatttttcaatcattgatatgagcccaagcttaggtgccataaatcagaatctttttatgacgagtaatgccttcataattccgatggcgcctgatttgttttcatcgatggctttgcgttctttatccaggacattacctaaatgggctgaatggggaaagaaagcagcaagtaatctaactctaaaggaagccgattatccattccctgatgtgacaccaaaatatttgggttctactgttcaaaacttcagaaaaagagcaaggggtagtgaagaagcaaagcctacacaagcttttcaaaactggtttgataaattagccactactagaaataccgaatttattcaggctctggaatcagtaaatatgctacttggtaatgaaatatatttaaatgctaatgctcctactacagagtttctaatggaaattagttcattagatggtttgattgcgatagctcaagaattagcaaagccggtctttgcattggatctaaaacaagatacagcatttagaggaactgtggctgacacttattggacaaaaatcaatgatgtccgtgaggctttcgaaaccggtgcacaaaaaattattgaacttacggataaattttaa

SEQ ID NO: 292699 - DNA, 633 bp, Morganella morganii
atggcagtttactatttttatgggcgtttccctgaaggttttagtacttggaaatatcaggataaaaaatatcctctactcgatcctgatggtaccatagcgatgtggttcgaaggtcgttaccgcatccgtaaccagaatggtcaatggtctactttagggaataatcattacgctccgaattatagctcttactttgttaaattacaaagttcaaacaaagattggcgttctgatacttatttagatcggattctcgacaaacaaatgccaccggatgtgagaacgttcattataacgcctgcatctgagaaataccgtgaagtacaatcacaaattcgacggcagcaatcgcaatgggccaaagcaatcaaagccttagccaataacttgtgctacttaactgattcagaattggcactagaggctgcacacatcaaaccattttgtctttgttcaaatatggaggctgtgtcgctagataatggtgtttgcttgacggcaactgcacataggctatttgattctatatcgaatgctacagatatcccaaccgctgacccgctctataagctgatcaatattcaaaagttagaagaactgatattactacgggaacagatgaatggttaa

SEQ ID NO: 292700 - DNA, 318 bp, Morganella morganii
atgaaaaaatcaatcgtaatacctattgtccttggtttccttttaagtggctgcgcagttaaaaatgacaataccaaatttaatggattaggcctgacatatcagtccgatattcaaaaaacagacgatggtcattacctggcctccgtggagtcagctccggccgccggtagacaaagtggcgcagaagctcaggcaattaaaaatgcagcatcatattgcgccgcacaaaacaaggctgtaaaagtgataaagacagaaatcgattctcatttagttgtgaacggtgtagcccacgttacttttgaatgcaaataa

SEQ ID NO: 292701 - DNA, 180 bp, Morganella morganii; identical to SEQ ID NO: 79306

SEQ ID NO: 292702 - DNA, 822 bp, Morganella morganii
atgttgggtacttcgtttcaacagttttcgatagaggcgcttcttgcaagtgcttcactacgcagtggactgacagcattgaataagtgtaaatatcatgataaaggcagcttttataatgctttttttcaactgtcaattggtctggaacgtttttttaaaattatttatgttgttcagtatatgattgaaaatgatttgaataaaccaacatatatccatttgaggaaattaggtcatgatataagcattttacatcaaaatgcagtaaatattgcaatcaaatacgagaaaagagacaaaggcaaatgggtcttgaatgatgagcaatctgcaatattgacaatgctatcggaatttgggaaagaaactcggtattataacttaaatactattattggagataaaaaactaatgaatgaccctcttgagcaatggaattatattttggagtattgctactggaagtatacttcaacaactaaaagagagagattgagtcaagaagtaatctcatgggctgagagaaatcgattgtatggttttactaatgaatttggcctcgatggtcatattatgacgtatgtagatcagtatctattgaactggaaagtaaacaaaatttcgccttgcattgcatgggaaataattagcatgttgcaaccgtattactttttgctaatgagattacgagatactgtgcagttgatggaacaagataaaggaattaaagaccctttagtaccatactttcatgaaattttcccatatttccttttagatcgtgcaacagcgaaaagacgtaggaattggcttgattag

SEQ ID NO: 292703 - DNA, 525 bp, Morganella morganii; identical to SEQ ID NO: 14690

SEQ ID NO: 292704 - DNA, 639 bp, Morganella morganii; identical to SEQ ID NO: 14691

SEQ ID NO: 292705 - DNA, 663 bp, Morganella morganii
atgggtaaaatcttgcttgtcgtatcagataagggtggtgtaggaaaaagtacctacgtggctaacacaggctcaatgctagtcaataaaggtaagtcggtaattatcctcaagacagataaaaaccacgatctgttgagctggaacgaaaagcggacagataacggcttactcactatcccggttcacgcagcttacggaaacgtcagcaatgaaattaagcgacttagtaagctgtgtgaagtcctcattgtcgattgccccggccacgacagccaggagttccgtagcgccctgacagtatcagatatcgtggtaacactggttaagccgtcctctgatttcgaaagcgaaacactgaccagtgttacagagaaaatccgcaccgctcagaaagctaacgcagccctggaaccgtgggtgctgttcaccagaatcaactcagcaaaaccccgccacagaaaagcggccattgatctggataaattactgcggtcggacaacatctggattcaacctcttaaaacccggatatccgagctggatgtgtatgaaagcgcctgtaatgaaggggcaggggtacatgacgttagccgggcatcaagcctttcaacagcgaaagcacagattgaactagtagcgcaggaaattggaattttatag

SEQ ID NO: 292706 - DNA, 282 bp, Morganella morganii; identical to SEQ ID NO: 14692

SEQ ID NO: 292707 - DNA, 978 bp, Morganella morganii
atgagatatttaaccgaattgatctgtaacctatacaggttgacagatcaccataaactgaccacagcaacgtttaaaaatcttgctgatattaagttatttaaacctacagcagatgcagacaccatattgcagcttgaaaatatatttagcgaatactcactgagatatattgacagggatctggctgaaattctgagcaacttaataactacagataagaaacactctctggacttcgattttaacaaaatacaatctctgactgactcgaaaagtttcggttgtggatggagcaaggtaataaatggtagttggttcaaagatctttattcgtggggagaggggatgtatcctgccgaaaatctgaaagctgaaaatatttcagactgggaggataatatatggcacattgagcatgaaggtttcaagcctcgcgatcctattaatgttaaatattactcttggattgaccgatatgtggctttaaacagtggtggttcacatcatgcagcaatggttgtatatcaatctgtcagagacaaattagagtataaaagagaagcggttattgaacaactgagcataaattcaaacaccgttgaaatacttggccagaactactattcattcatattccagataaaacaccctagtaataagacagaaaattatacatcagaatatgaatttacagatgctttaaaagactttggacaaaacagacataccacacttaaacctgttaattacgtttctaacataaaattagcatttattccaaaagatgctttaaaaacaaacagcgagacattccgcaactggttttattctgcaattagctacggaaaaataatatcactccctgattatctgaaaaatccagcacattatcatacacatcattactcacatgaactggactcgataacacttggcaacccaagcagaaaatataaactgataggagattcttag

SEQ ID NO: 292708 - DNA, 357 bp, Morganella morganii; identical to SEQ ID NO: 14694

SEQ ID NO: 292709 - DNA, 447 bp, Morganella morganii
atggctaaaatctatcaattccctcagggggaagaacgtgctaaattcaggaaagaaatagccagggagcgtaagaaacgttttgcagtgaaaacagggagcacttttgttaagtggcttggctggggatggttttatcttcgtcttcttgtcgcgagtgttttacattttatctttgtttttgtgttagccattcttggtgcgtttaaatgggctgtattctggctgggtggtattttgtgtgtcatcacctggtatcatctcgatcaccagttatggacgccacaaaatctgactataccggtgattacggcaacctggattttgggactgctggctgagcctctgatggagctgctcaacaaaactatgccctggcacaagttacttgttcccgaacctgcggacgaaagcaccgagaacagtagcgagataagccagcaatga

SEQ ID NO: 292710 - DNA, 843 bp, Morganella morganii; identical to SEQ ID NO: 14695

SEQ ID NO: 292711 - DNA, 252 bp, Morganella morganii; identical to SEQ ID NO: 4288

SEQ ID NO: 292712 - DNA, 282 bp, Morganella morganii; identical to SEQ ID NO: 4289

SEQ ID NO: 292713 - DNA, 324 bp, Morganella morganii; identical to SEQ ID NO: 4290

SEQ ID NO: 292714 - DNA, 246 bp, Morganella morganii; identical to SEQ ID NO: 4291

SEQ ID NO: 292715 - DNA, 216 bp, Morganella morganii; identical to SEQ ID NO: 4292

SEQ ID NO: 292716 - DNA, 330 bp, Morganella morganii; identical to SEQ ID NO: 4293

SEQ ID NO: 292717 - DNA, 150 bp, Morganella morganii; identical to SEQ ID NO: 4295

SEQ ID NO: 292718 - DNA, 519 bp, Morganella morganii
atgaaaggacagaaacagttttacctgcttcagtgttctccgcattttcatcagtcggttctgttgcagttatcccggagcggtatcgcttactacaatccagttatacgcactttctataagaggcgtgactgtagtgcatacaggggacaaatcatgccaatgtttcccggttatgtattcgttcttctggattttgaggttgtacatccatcctgctttacccggatgaaaaatgtttatggactggtcagttttggtgaatatcctgctgaagttcctctaagtgtcataaatgaagtaaaagagcaggagaagattttttcgatgaatttaagcctgatgaataactcctgtctggcaaaaatacttctccttgcagacgcttcaaagcgtggacaagtctttgccgactatgtgtgtaacagaaaatacgacaggttaaaaaatgacagctataaaaggaaagcggaaaccgcaacgcaatgtactctaccttcctacagaagttcgtgttga

SEQ ID NO: 292719 - DNA, 435 bp, Morganella morganii
atgatgaataaatttagttatgtcaatcgtatgcttcggcaagtttttgtttttagttttatcacggccccatcaatatctttatttgttgtttttatgtttttttcgtttaataactcaattgctggttcatttttaaaagaggctagggggcttataaccgatactccttctgataaggttaacgtctgtcttttcgaaaagggcgtaccacaggatatggagttgacaaactccacaactgaacatgtattaaaaaataaatgtataacaacgttagttgatgctgctgactggcaggaatctgttgacggttctattcgatatttttattggtcgtcagttgttattggctttgtggtctggtttacctttaatttttgtgcactggaagaactattttatcgtagaaagagaaaaggagacgttgaatga

SEQ ID NO: 292720 - DNA, 537 bp, Morganella morganii
atgaggatttttttaagcgtggttttattcctgtttactgcttttcagtctgcaaatgcaggtggaatacctggtgctttagcaggaatactttctacattaaacctggaaatccaggggaaagttattcgtgttctcgatggcgacactatagaaattaaaacactacccgcaaaaattgttgtgtatgaagttccgatccgagtccgattgataaacatcgatgcccctgaaaagaaacaaccttttggacgctggtcaactagtcagcttaaaactctggttgcaggtaaacaggtgacagtctcttattcacataaagaccgctacggacgcattatcggtcatgtgttcacgacgaacggcacggatgccagccgctttatggttcagtctggcgctgcatgggtatatgaacgttacaacgtggatgagtcattaccggctctacaacgggaagctcaggaacaaaaacgcggtttgtgggccgatgcaaatccggttccaccgtgggagtggcgatacaaacataactaa

SEQ ID NO: 292721 - DNA, 405 bp, Morganella morganii
atggctttatcccccaaagaaaagaaagagttacaacaacgcttcgaaaagcaattactacctgaccttgatctgtcatttgaactaaatggcgaagtatataaatttaattttgataaaaataagtcaggtgactatatcgacagttttacacaagcagtatggggaggttatcaggatgccgaggaatggaaaaaatatggtaaacatcaggagatagaattacctgaatgccctgaaccagtcgagggttggtgcgactgtgataaatgtaagtcgatgatttttcataaagagaaaaatatttatgtttgcctctcctgccataaacaaacagagccatttcttccaattgactggaactcaaacgattacgattggctaccttatgaagatgaatactaa

SEQ ID NO: 292722 - DNA, 321 bp, Morganella morganii
atgaatatccatttattttcagaagtattgttctgcgtatgggttatagctttgattgtgattttatttatagttgttaaatattacaggcgtgtccattacagactcaattcactgtctgaaacgataaagcgcacacagggcggtgttaataagcgaatatctgaaaacagagaactgcttgaacttataaagaatcaacatcctgaaattctggatgaatatccgtgggtaagtggttggcttgattcacaggaaaagtttttggtcgctcttgctgataagtctggtatcgatatcaacaaatcaggacttatttga

SEQ ID NO: 292723 - DNA, 588 bp, Morganella morganii
atgtacttgcatattgtacctaaactttttcatcgaatggctaataaatgtagtcttaaatctatctccatacctgaatttaatttaactattgatgataaatcattatctgtggggagaccgtggcctaacaaatgtttatgggttggaatgcgaaaaggaagaaagtcagtcaatggcctcgttttgcaaacagataaaaaattaagatggtttactactatatacacctgggatattgaagatatgggattgatttatcatcgggtaaatacctatatagaagatgatgattttgatatggtatcacaggaaattctattaaatggttcttttgataagtggagtgacagggtacattcagcttatgaaaataatcctccagccagaatccagcccaaaatggagtccttattaaataagcctggtgaaaacagtcatgatatgtggaaagagttcgaatggggtgacttccttctgtccagagaagaaagccttttacttcacactattcagtctgaacgattgaatacagattgttctttattcaaaagacaaccgtctattgaaagtgcattagttatataa

SEQ ID NO: 292724 - DNA, 264 bp, Morganella morganii
atgagtaatacatcctacaaacaaattatccctgcgacagactggtatttccgtcacgataatgtctccggtgtggcaggaaagtcaacagtataccaactggctgcatgggcgcttaaagaaaatggtgaggtagttggtctggtgacggttcgtgatgataatgggcgtcctaaactggttactcctccccctgtccctggtgattatttgcataaagaacaactcaccgatgatgaaaaagagtgggcgaagagacgataa

SEQ ID NO: 292725 - DNA, 735 bp, Morganella morganii
atggatatatcttctgttgttaaaagtatggattggggattaacggtagcggttttatcgttggtgtttactggtatcgttagctttataactatcagatatacgaaaaaatcgttagattatacgaaagagtcagtacaaattgcagatgcttcattaaaagctgctagagaatcaattaatacttcagttgagatatatgaaaaacaaaagaaagatgatttaataaaaagagaaaaagaagatggtttgaagttattttcaataaaaaccatgattatggaggaaataaaagatgaatttttacattttgttagggttaataaaatattaaaagatattgttgattgtaatagtgactttaatgttaatgtactcaatatttctggtattactttagtggaatacgaaagtcctgatagtgagccatattctggaatatacaaagaaccaagttatgatatatgtaaaaattttttactggatacattaatccttgatcctattgtagctaaaaaaataattaatcttaatgaatcatcatatatatacaaatcgtccatgtcattaattatgagtgggttatcagataataaaaaaaatgaaattaaatatttattaagcaatattattgatagggtggctgattataagaaaagcatggaggaattatatgaatcatgctcagatgacactactaaagcactgtctctatacgaaaatagtgtgatttaa

SEQ ID NO: 292726 - DNA, 330 bp, Morganella morganii
atgaacaaatatcgtgacaaatcagactttgagattaataaggctgtggctattgctcttggtgcgtatgaagtagcaactgacatattcatcgataagaatagacggtacgagtttgacaaaccgaaaagccaattctttttcgacccctgcaacaacccagctgacgcaatgccgattattaatgagtatggtattagccttatatatcaagagagagagttccagtttgcaactaacgacggaaatatagagtgcagcattagcaatccattaaaagccgcaatgattattttcctgatgatgaaggatgcggagaatgaaaaatag

SEQ ID NO: 292727 - DNA, 366 bp, Morganella morganii
atgcctaataagacttcaaatgaatctcttaaagacttcatactaagagagactaaaaatgacaaaagtcagtctactggcttaatatctgcaaataatggaaatggcattgctttatctccgtcatcggttagctttatcacaagtaaattcagcgtattagggctcactaaactaatctctgaagataatgaaaaggaaaaatttatcactggcgtaaacactctgattggagaagagtcaacgctggatgaaattagttctgtcatagatcagccattaccagatgaaactgaggatgagttcgttaaacgggccaaatcactaatttccgatgttttattcaacctgatgagtaaaaagtaa

SEQ ID NO: 292728 - DNA, 177 bp, Morganella morganii
atgctttcgtctttatggaagttaattaacgcattctttactttgttcaacgctttatctgacgaacaaaaaaaagccctgatagatgccatatcagatgcttatgacgctattttaagagcattttacaaagattcgcagaatggagacactgatggaggtgtagttaatgcctaa

SEQ ID NO: 292729 - DNA, 306 bp, Morganella morganii
atgaatagtatctctatcgaagaacttcgccaacagtgtcgcatcgatactgtggaagaggacgaacttcttcttagttatttgggtgcggcaaaagaaaaagcagaaaattatctaaaccggaagttgtatgacagcgctgttcctgacagagatccggacggaatggatataacaccggttatccggctgacactcatgctggtggttggtttttggtatgacacccgggaactgaagaagctgccacagggtttttatgatctgctttgtgactatcgcctttcacccatgagggaaaaataa

SEQ ID NO: 292730 - DNA, 222 bp, Morganella morganii
atgacagagcatgcatatgttgtacaaagagttcagaaaaataacgactcaggatttgagtaccatgtcatcgtcaataaagaagtagaatatattggtgaaacacaagaagagtctgcagactgggcccttgctaagggttatgctactcatgtagcgagggttcgctataccggactcgaagaccctagcactccggctcactggagaaagtaccagtag

SEQ ID NO: 292731 - DNA, 1224 bp, Morganella morganii
atgagtgagctgagttatctggaaaagctgctggatggagttgaggttgagtggatgacgctaggcaatgaagacgttgttgaaattgctaatagtggacgaaagccagtaaaagcttcaatgcgtacaacaggtaaagttccctattacggtgcaaataatattcaggattatgttgatggttatactcatgatggagagttcgttctaatagcagaggacggttcggcgagtctggataattattctattcagtacgtaacgggaaagttttgggcaaacaaccacgtccatgtagtgcggggtaaggggagactcaactctcgctttctataccactatctcagtattgttaattttgttccatttttatccggcggaggacgtgccaaacttaccaaaggaaagttggttgaaatcccaattcccattccttgtcccggaaacccggaaaaatcccttgcgattcaatttgaaatcgtccggattctggatgcatttaccgcccttaccgctgagcttaccgctgagcttaccgctgagcttaccgcacgtaaaaaacagtacaactactatcgtgaccagttgctgaactttgatgatggtgaggtggaatatcttcctatgggagatgaaagagttggcgaatttatacgcggaggaacttttcagaaaaaagatttcactgattttggggttggctgtatacactacggtcaaatttatacctattatggaacctatacaaatacaacaaaaacatttatttctgaaagtctggcgagaaaatgccgtaaagctgagtcaggaaatttaattatagcgaccaccagtgaaaatgatgatgatgtttgtaaggctgttgcatggttaggatatgatgatattgcagttagtagtgatgcgtgcatttataaacataaactaaatccgaagtatgtttcttatttctttcagtccgaatgttttcaacgtcaaaaaaaacaatatattacgggtgcaaaagtccggcgtgtgaatgcatcaaatttggctcagattttgatacctgtgccatcaccagaagaacaagctcgtattgcagctattctcgataaattcgacatattgacctgctccatcaccgaaggcttaccccgtgaaatcgagttacgccaaaagcagtacgaatattaccgtgatttactgttcagctttccgaaaccggaatctgtgaacaactga

SEQ ID NO: 292732 - DNA, 564 bp, Morganella morganii; identical to SEQ ID NO: 62449

SEQ ID NO: 292733 - DNA, 210 bp, Morganella morganii; identical to SEQ ID NO: 67541

SEQ ID NO: 292734 - DNA, 612 bp, Morganella morganii; identical to SEQ ID NO: 67540

SEQ ID NO: 292735 - DNA, 534 bp, Morganella morganii; identical to SEQ ID NO: 270413

SEQ ID NO: 292736 - DNA, 1272 bp, Morganella morganii
atgaggcttaataaagatttagggttttacatacccgctttttttatgatgcaagttgatacaattaaaccgattgaaggaatcattggcactgttgatgaaagaacgttttctcatgaactaatacattttttacaggacattaccactacatatggtttaattaatatttcaagatgtattgattttattaaggttcaaaactctgtgttaaggaatacaaattcctctgtcaaattaccgctgcaaggaagtgagctaagtggtagtgttatgattaataatgaccttttttcattatatgtgggtgatagtgcagaaaaatttagagaattccctgatgattatattattaccgaagtaattgaagatgaaatggatattgacaacattccctatccaataaaatatatagagataaagtatggaaatagaacacagattataaataatccttttcattttggctcaatggctatttatgaaagcatggcgaatttgattgaaaatgaaatatatggagaaaataaagtactaagaagctttccgtatgactcagctttgatgattgctgaaaatttatgcccgctaatttaccataataaactggcaattgctgagctgtgtgaagcatcattaatgttttataatccagctgaagtatttattgatagcttgagaaaaatacagatgcaaaatttaatttttaagaaaccaaatgagtattacctgtacgtattggataatttcactttagatacaacccctcctacagttcagtttatgaaagactctaaattggcaatgtctcaattaaatgacttatttaccgtatcaccttttagagaggaaaaatgggctagtggtatggtttataaagcccaaaatctaagaaatagtggtatatctctatctgctgtattatggggaatagacaaagataaatccaagaaatcattaataaaattcattagtgatgtagggatgccgattatatttaatagtaattttgatgcttgggttagagattctgaagaaaacatgcagacaccattaatgcaccaagctatattctccttctatgaaatattacgtggtaaacaaataggctgttcattatataaatactgtatcaaaaataatgtttgtgatgaggcagaccataattgcatatcttcaccttggttacaacttaaacaagaaaaaatatgttatttttcaaatttatggaaaatgtggggacttgagggtgtacatatctcagtcaaatag

SEQ ID NO: 292737 - DNA, 1278 bp, Morganella morganii
atgagtaaattcatcacagtgaaactgaatgaactggctgctccgggtaggtctgttatatcagggccatttggtagtaatattggccaacgtttttttaaaactcatggtgtaccggttatcagaggcaataatctgacgacagattttaaaaaatttaatgatgatggattcgttttcttaacggaagaaaaagcagatgagctgaaagcagatgccatcaaaggcgatattttgtttacggcggcgggtacaattggtcaagtgggaatgattccacaatcggcgaagtatgatcgatatgtgatttcaaataaacaattaagattcagagttgatcctacaaaagcagatcctaactatgtatattattggttagcaagcccttggatatacaaaaccattattgatagaaatacagggagtacagttccgttaattaacttagggataatcaaatcgctacctgtttctttgccaaaagatatagttgagcaaaagaaaatatctagagtattagcaaacattgacgaaaaaatcgcgctcaacaaccacatcaatactgaactgcaagcgatggcgaagacgctgtacgactactggtttgtacagtttgatttccctgacgccaacggaaaaccgtataaaacatccggcgggaagatggagtataacgctacactgaaacgtgaaattccggcggggtggagatcattacgattgaatgaactattacagaattgtactaactctactgttactggtgcatttgatagtgatctaccgtatacaccaatagatgcattaccaatgaaaaaaatgagtttcggtgatgcttattcatctgatagagcaaatacaagccttataaagtataagaaaaatgatatacttattggtgctatgagagtctattttcaccgagtttgcattgcaccatttgatggtattaccagaacaactactcttgttttaagaccaaataaagaggagtttctcccttatatttatcaagtatgtaatgaagagaaaacaattggtatagcagcgaaaatatctgttggtacacaacaaccctatgttaattgggaaaattctctggagaatttagcaatagcataccctgaagatgattctttaatacaacgatactcttccgcaatggtagatcttgtcaaggaagtcatatctggtgaaaaagagaattctaaattgaaaaaactccgcgactggctcctccccttacttatgaacggacaggtcacagttaaaaaataa

SEQ ID NO: 292738 - DNA, 159 bp, Morganella morganii
atgaaatttgaagagttaccagcagatactcagattgtggcggcaaatacactggcggaagcaattaagcagaataacccaggaaaagagcaagccgaatcacttgctcagatggttgggcaggcattcattgctttgtataaatctgaattaatctaa

SEQ ID NO: 292739 - DNA, 177 bp, Morganella morganii
atgtctgatgttgttgacccaaaaataaatcctgagcaggcagctcagcaggtgattattgagatcatcagggcaggtaagtcaggtggattttttggtgccggaacaaaaccaagcaccgacgctttgttgacgatatttcagtctcttgttaatcattataaaaaattagattaa

SEQ ID NO: 292740 - DNA, 330 bp, Morganella morganii
atgaacaaatatcgcgggatgtcaaaatttgaaattaataaggccgtagcagaggctcgtaaattaaacaccatcgcgtatgaccgcacagagatagttttgtttgacgatctggacgcaaccccatttgacccttgcagttcatggtctgatgcgggtcctattattgctgaatatgggattagccttttgtctgactggaataaagttggtgtgtggggtgccgtgtaccagccgtgggtatattccgagaacgaagatccactccgggcagcaatggagtgctatttgttattaattaataaggatgaggatgatgacaataattaa

SEQ ID NO: 292741 - DNA, 687 bp, Morganella morganii
atgaaagagcgcggaataattttcaacacagagatggtacgcgccattctcgaaggccaaaagacgcagacgcggcagattgttaaagcagttccgactactcacgactttcacggctgggtaatgtccagtacatgtacgaaagatgaaggtaaagcctgctgggctatcggtaattcaccgttactcaaagacccgattcgccttaattgcccgctcggcaagattggcggccggctttgggtgcgtgaaacatggcaaggcccgctggtcgattatgaaaatgccaatagattatacaaagaccctgagccatttcagacgataaaaaactgcgtatacaaagctgatgccggtgcataccctgagtattttgatgctgacgataatctgaggtatggatggaaatcatcagcacaaatgccccgctgggcatctcgcatactgctggaaataaccggcgttcgtgttgagcgggtgcaggatatcagtgaagaagatgccgtagcagaaggcgttgcgcctctgtacggtggttactggaagcattatcagcctgactggactcagcaccagcttagtgcgagagggtctttcataacactctggaattcaattaacggtgttgatgcctggtataaaaacccgtgggtgtgggttatcgaattcaggcaggtaaagaaatga

SEQ ID NO: 292742 - DNA, 615 bp, Morganella morganii
atggctgagtggaaaggggttccgtatttttttgatgcaaccggtgagttgcagaaacaggtttctgtagttgtcggagaaatcccacaagtaatagtggaaacatccttttcttgggagactgtcatcagcgctttctttgccgcattaataccttcatttattgcttggtacgctttaaaacaaaactataaattatctgaatatcaaaactcattatcaagcactaaagaactatcaaaagaattaaggattactattgcatcatatttatccaatatagagataattttgcaattcttgactgttttctataatcaactaaaagagaatgatagcaaaggaatggaaaaaacagaaaatggtcttagtgaattatcaattaaaataagttttctttataataaatcgcgactttttcttgattgtaataataaacatcaaaaggaattgttggaacggattagattaatacataagcttctcacagagattataaaattgggtaagcatgggtctgttgatagtgaattactgaaaaaaactttatataaaaacatagatgaattagtgttagaaacacatgatgtattatcgaataacttatacacatag

SEQ ID NO: 292743 - DNA, 696 bp, Morganella morganii
atgcctagtctcgtgggctcggagatgtgtataagagacagcttatactcaatgaacaaaaagaataagtttatatcattgcccagaataaaagagttaaaatataccatctcaattgtgagagaggtttttttatctaaaacatcatcatatgcaatatatagttcaattccatttgttatcgcagtctgttacggaaataacgcctccgcattatatatcttaggtgagcgactaaagtcgatgtattcgacattatttcaacctgtaattcagtctctttatttatggtgttttcagaaaaaatcaaatttactattaaaaaagaaaataatatttcttttatcactaattaatgttttattatttacttcattgattgcgttatttacaactaatattccatatattttaattgaacgattgcaagatatcccatctataaatagctttattgttgcagccacactatctgtatttacagcaatcattctatattttcatgtattcccatctggattatataaactatttagaatttccacatatttccagctatctacctttttaattttatttatatttatgaaattcactgatagaattccgcctggctatattttggctatcggtgaaggtataattttattaagtgtcattgcgttgacaataaaacattataatggtgaaaaatga

SEQ ID NO: 292744 - DNA, 372 bp, Morganella morganii
atgaataaatatcgtgacaaatcagactttgagattaataaagaggtcgtgaaattaataaaaactaaaggcggctattcgtgcgttgatcacgatgaaattgtgaaggtatatgtatcacaaaataccgggatatataaagagttcgacccctgcaatgacccgtatgacgcaatgccgattgtttttgagaataagatttcattgcatgccccccgctttaatgaaggttggatggctgaatatacctgcagtgatgacgatgttaatgacgggtttcaggtggattattatgaatcacataacaaaaacccactacgcgccgctatggaagtattcctgatgatgaaggacgcggagaatgaaagctga

SEQ ID NO: 292745 - DNA, 1008 bp, Morganella morganii
atgttcggactcgacaataaatccggcattaacgtaatgccgccaatcgccccggctgacagtcagtccccgttgtggttcacagaagggggtgcgggtctgtctgccacctatccgggacaggactggtttaatcagattcaggctgaattgcttaatgtcctgaaagaagccggacttaccgccgataaatccaaacttaatcagttggcattagcgataaaagcgatagtggggaaatccgctgttacgattgttaactcccccggcacatcaacaaccagtgtgatgagtcagaaagcagtaactgatttagctgagacaaaacagccaaaaggagattatcagcctgccggtaattattatcgtttcagtgaaattaatgaaatgcccggcagaggatttaacggggtcttttccggcggtgtaggtgtgaaatatatcaaaggaatttctgtttcatccggggggcaggctgataccggtcagattttcgttgatttcaatgctgtcgtgacagcgcgttatttaaacagtaacggcagtatacgtgaaaaccgtattgtgggtgttccaatcggggcaactatcgaatggcagtcatctgcatccataccggaaggttttcttgaaaatgacggacgatccttcagcgcttctgatcaccctgaactcgcaaaaatattcccggggctgaaactccctgatgaccggggattgttcaaaagggggctggacagagggaaaaacattgaccccgggcgaacgctgggcagtgttcagggcgatgccatgcgtaatctgaccggccgctttggtaatccgacgattgagggcggagacttttctgagggggtattccggcactcagtcaattcgggtgggcgtgcagccggagctggcgggaactctatagcgtactcctttgatgcctcccgtcaggtaagtacagcaaatgaattcagaccggtgaacaaatcagttatttatattacgagggttatttaa

SEQ ID NO: 292746 - DNA, 618 bp, Morganella morganii
atggcagattacagcactgaaattcagtatgcggtatttgatgaaaacgggctggctacggcgcctggatgggcaaaaatctacagggcacacccgcttacccgggaatatacaggcactgctatggactacgttccgtttggtttttccgtagtcggtgatgcttacacagacgaaccggaattacccgcgccgggatttgctattgtccgcagtgaggacggtaaacgctggctgcatgtggaagaccatcgcggtaaaaccggctatgacaaaaccacaaaagaaaaaatccagataaacgttatcggtatactgccggataacctgacattacttgagccgcaaacaccttttgataaatgggacgggaaaaagtgggtgaccgataaagaagagcagcatgtacatgatgtgactgttgctgaaaaccaaaaacaggctttgatggctgaagctgagcaggaaattgctatacttgagcgtaaagtacgcctcggtatggctactgatgcagatcaggcaaaattgactgagtgggaaattttcagtgtgagagtaactgacacggatacatccctcgctcctgatattgaatggcctttaaaaccagtttaa

SEQ ID NO: 292747 - DNA, 219 bp, Morganella morganii
atgaaaatgactgtactccgggcattttatttcggacaccgtgtcgttgtggaaggtgaagaaattgaaacgacagaattacacggccgcgaactgatacaaaaaggttatgccggggagattacggataatattctgccagagccagagccagagccagagccagagccggaaaaaccagctgcacctgaatccaagcgtggtgctaaggggaaataa

SEQ ID NO: 292748 - DNA, 648 bp, Morganella morganii
atgtttggtgatgatgtgagcgataaccacaaaatacttattcatttgcttgctaacgatagagttactgctgattcagtagcaaattatcttaatattggtcaagatgcagctcaaaaaataattaatgaatgcattgaaaagaaattactcacaaatagtataaataacaatagagtgaatgaataccatgtcgtgatggataatgttgaagaatatttcattaaaaattcagatgaaaaagaaacagaaactaataacgttatgatgaatgatggcaaaggttcaggagagttgcttattggagttgtagcgttaatagctggaattgcatttttgtgtctgtttttgtattcatgtactggaagaaatagtgatggcgctaaacgtgattactgtgatgatgaagattacgcatatgtagcagctaaaaacctcataaaagaaaaattgaaatcccccggtagcgctaaattctcacacattactgagacgacagttactaaatataatggatgtatttttgaattctcaggttacgttgatgcacaaaatagttttggtgcaatgttaagagaagactataaaataaaagtaaaatatagtgaaaccaaagatacatattatttaattgatctaaaaatgtaa

SEQ ID NO: 292749 - DNA, 1053 bp, Morganella morganii
atggaaaaaattgattttgttcttccttgggttaatggaaatgacccaaaatggagaaatttaaaaaaatcatatttaccaaaaagagatggtgattcaaattctgatgctcggtttagagacttcgacactctaagattcgtgctacgctctatagaaaaaaattgtccctggtataataaaatatatcttataactgaaggccatattcctgaatggctaaatataaatcataaaaaaataaaacatattactcactctgaattatattttaacagctcagatcttcctgtatttaattcatcatctatagagatgaatttaccaaatattaaagaactatctgataaattcgtatatttaaatgatgattttattatcatgaataaattagatacagcaagatttttcaaaaatgatctacccgttgattttatttctcatggatggttagcaagaaaaaaactattccgcaaaataaaaaacacggacacttggataaattcactaaataacaacttagacttaattaatagaaatctatccccaaaaaaattagataattcatttctatttgataaaagttatccttttttgacgaaactttctaatttcctatgtaaatatatctataagcgctatttatggctagaacattggcatcatccccagccatataagaaaaaaacattgttggatgtctatagtaagttcaattctcatatggcattatgctcaaaaaacagattcagaaacaacaatgacttgactcaatatatatatcgatattggcatcttgctaacgggtgtttttatcctgaaaaaaataatgatgctattattgcgaatattgactcaataaaaacattaaaccgtttaattaaaaccttcaataaaaacaaaaataatattaattttatttgtttcaatgattcaatcaagatggatgatactgaatatgacaaagtcaaaataacgttatcttcttttttatatagtaattttccagatccagcatcttttgaaaaaacaaaggatagcccatgtgtctaa

SEQ ID NO: 292750 - DNA, 429 bp, Morganella morganii
atgagttacgttttgtattttcttagttcagtttctttttttgttatggccgtgattgcgtttagtttgattgcttctgatgcaatgaaaacgtatgcggaaatgaattcaaaaaaaatgaagctcctactggcattaattgtttttgtaaatgcattcggatttattggcactctggttatttccgtcaaaaacgtaggggatgcaactaaatatatagtagcaccaccagaaccaattcctttggctctcacagcagattgccagttacctgaaataccagatggtatgacatatggtgacgcagtcttgttattgaccgacgccatgaagtcgatagctgattgcaatcacgataagcgggcaatacggaagattgaagcggagaggcaaaaaaatagcccggaaccgatgggggaacgggcttaa

SEQ ID NO: 292751 - DNA, 630 bp, Morganella morganii
atggcagattacaatactgaaattcagtacgcggtatttgatgaaaatgggctggctacggttccgggatgggctgaggtgtattgctgccacccgctgacacgggaatataccgggaaaagcatggatgaggtaccgctgggattcagcctgaaagctgacgcctatccggataaaccggaattacccgcgccgggatttgccattgtccgcagtgaggacggtaaacgctggctgcatgtggaagattatcgcggtaaaaccggttatgacaaaaccacaaaagaaaaaatccagataaataccatcggtgcgttgccggatcatctgacattgcttgagccgcaaacgccttttgataagtgggacgggaaaaagtgggtgacagataaaacagaacagcacgcgtatgaggtcgctgttgccgaaagtcagaaacagtcgctgttggcagaagccgaacaggaaattgccatgctggagcgtaaaatacgcctcaacatggcaactgacacagaccgggcaaaactgacagaatgggaaatttacagtgtgaaagtcactgataccgacacatccgccggtgctggtactgaatggcctacacctccggcttcaccggccagataa

SEQ ID NO: 292752 - DNA, 249 bp, Morganella morganii
atgaacatgcgctcagaaagcaaagagatttacggcgtgagtgtgttcccggtgctggccgtcctgcatcagacccgccggtggtgggtactgcgtgacctgaaagaccactggaacagccgccataaggtaatccgcatttgccgcagtcgtggatgggatgaacatatccggtttcagaacatcgagcggcagtatttcatgacccgcgccacagttaaacgctaccagcgtgagggggttatctga

SEQ ID NO: 292753 - DNA, 351 bp, Morganella morganii
atgaacaaatatcgtgacaaatcagactttgagattaataaggctgtggctgaatgtaaatatggcattggatgtacagggaaaactcaagggggcgatgtcatagtattcactgacagttttactgctgtttttgacccctgcaacaacccgtctgacgccatgccgattgttattgagaatgggatttcattattcgcaccgggattgtctggtatgtggacggctgggtatgttgattatgaaaccgaccgcgaatatggtgttgataattacgaagctataaataaaaacccataccgcgccgctatggaagtatttctgatgatgaaggatacggagaatgaataa

SEQ ID NO: 292754 - DNA, 240 bp, Morganella morganii
atgaatgacattcaaaaattcaaggggcaattattacagcggttgaattttaatgctcaggatgtaggaatgatcaggctgcgtaataaggaaattggcgacccattacaagttacgtgtactgcattgtggatagaggtgtgcaatgctactgagatatcaaaaaacctccataagcggttggataaattccacgctgatgttgaattaatggcaaaacggacaggactatacaaatga

SEQ ID NO: 292755 - DNA, 300 bp, Morganella morganii
atgtcaatagagtacgggcacaaactacggcaaatcaggaaacatgagggattaacacagaaagccatgagcgacctaaccggaataactgtaagcgcaataaagggttatgaaactcaaggtataaaagttgggatcagtattattgagcgagtattaaatgttgaggaattccaaaaatacacaatgtggctcatgactgacaaaacaaatgaagtcgcagggcaaatcagcccgactctctcccctgatggtgcagagaaagatccgtcacaccactcagagcggaaaattggctag

SEQ ID NO: 292756 - DNA, 129 bp, Morganella morganii
gtgctggtactgcgtattgttcagctggaaaaactggaagagcaaatcgcccaggaattccgtgatctgctggctgataaattcgaagaaactgaaatccagacctatatcggtaaattcaaagcataa

SEQ ID NO: 292757 - DNA, 255 bp, Morganella morganii
atgccgttaacacgggcggcggatggctctctgggtgtccgggcgctcggcggaaatcagaacagcggttcagcggcaccacaggtgtttattaccatagacagtaacggcagcagccagacgcagtcgtcggctggttatgagcagtttggtaatgaaattgccgcattcgtcgatcagcgtttccgcgtactaatggacaaagacacccgccctggtggtgcagtctggaatatgactaaggggaaaagatga

SEQ ID NO: 292758 - DNA, 447 bp, Morganella morganii
atgttttacatatataatataaaatttaggtggctgaccgtgtcgatacatgacaccttttataataaaatgtgcatactaatgcgaaaaacaatatttcattgttttaaaagaggttttacagtgactaagaaaggtattttcattattttattacttatttcagtaatggttatggttgttttatatcaaactaaagaagtctccatagtttcccatgggagaaacgtttccagcataaaagaagatacaactgaacgaccaccatcatggtatatggataattccagtaacagattcggtgttgatcatgacaaaataaccccattaaatttagggatgacactcccaactgacttttcttttaatggttccgattgggagatagcaacgctaaatgcgctatttattgtgcaggaagcaggaagcaggaagcaggaagtataa

SEQ ID NO: 292759 - DNA, 396 bp, Morganella morganii
atgagcatttcttttacactgatttcatgtcagatggatttcatatttataatggtgataacaatgaacaaatatcacgacaaatcagactttgagattaataaggctgtgtttcatgccgccagaataaaacataaatggtttaaatttttaccgcatggcgtggttacttataatatcaaaggtgattgggtaatcttcgacccatgcagcaacccggcggacgcattccctctaattatcgatgtgaaattatcaattcatcctgatttttataacaactgtgagtcatggattgtaagaactgtgcatattccgcctgtaaaagataaaagtctgacaagggctatttgcattgcttatttaatgatgaaggatgcggagaatgaaagctga

SEQ ID NO: 292760 - DNA, 408 bp, Morganella morganii; identical to SEQ ID NO: 280885

SEQ ID NO: 292761 - DNA, 456 bp, Morganella morganii
atgtggaacaacaagcaacaaaatcaactggaaagaatactgaattacccaggccttagattcagaaaagccagcaaacatagatatctaatccagtacaaaggccgtcaatggtacttgtggcctcggtctgggcgatatcagaagatctcagcaagcggcgaagtatcagaaatcttcatgggtgaactatcagacttctatcaccgatacctaactgaggaacttgatttaccagaaaactttggcaagacctggtctaaagatgatgaagaggtgctgtacgacatgattgaactggcctgcacatgcaggcaaatggcccaggagctaaaacgccaccctgctagtgtcgcaacgagattggctaagtatctggatgatgagagccttcaaaaccgacttaatgaagatacgtacgatgtgcctgtaagagagctgactgactgggactaa

SEQ ID NO: 292762 - DNA, 213 bp, Morganella morganii
atgaaagatccacgtttagtcgcatttgggggacgagttcgccagataagaaaagagaaggggctgtcacaggaagccttggctgatctggcagggatcgaccggagttatatggggcatattgaacgcggtgatcagaacattacactcactaaaatctatcagatatctgaagctttaagggtgtcagtttcagatttgatttctgactaa

SEQ ID NO: 292763 - DNA, 777 bp, Morganella morganii
atgacatcggtaagttcgaacgaaggcaaactagaggaatacagcttcatctatggcgatgaagcggttacctatgaagtcgtgcgtaaacctcatcctgaaagcaagaagcgcagaatagcaatcaaggttcaccctaactgtgaagtggtagttaatgcccccgaagatgccaagcgcagtgatattcatgaagcagtaatgaaacgtgctaagtggatttatgacgctctgaaggaatttcgtggtcacttacagtatgttcagcccaaagactatgtcagcggtgagatgcagttctaccttggtcgtcgttatgtattgaaagtggttgaagatagagatgctatttctaacgtcaaaatggaacgtgggaagctgctggttacgttaaaccgctttaacgaagacaagcaagcattaaccaaagccttagtgtctggttggtatagtgtgcgtgccgaacggattttccatgaacgcttagccgcattgttgccacaagctacttgggtgacagacatccccagttttcgggttctgcccatgacgaaacaatggggaagttgttccactaagggcaatttgatgctcaatccgcatttggttaaagctcccaaagaatgtatcgactacgtgatcctgcatgagctttgccatatcgcagagcacaaccacagcgagaaattctggcgtttattaactagtgtgatgccgaattggaaagaagtaaaaagccgtttggatggcatggcggagtcgtatttgagtgagtga

SEQ ID NO: 292764 - DNA, 3264 bp, Morganella morganii
atgaacatattaaacttcaaagaagaatttagctccaaaatcccagcactgactttactcaccaaccttggttaccaatttattccgccaagtgattgcctagcgatgcgtggccgattgtcttcagttatcctgcccaatgtgttgcgcagtgtcctcaagcacaaaacccatacctttatgggtaaggattacccgctctctgattcggcaatcgataaaatcattcaggagctggcaacgcctgcaatgaatgcagggttaaaagcggccaatgaaaagctctacgatgcattaacttatggcatcagcgtgacggaatttatcgagggcaaaaaagccaatccaacgattcaaatcattgattgggaaacccctgagaataaccagttccacttcaccgaagagatggaaattgaaaacacccacggtacgggcaaacgcattcccgatgtggtctgttttgttaacggcctgccttgggtcgtgattgaagcgaagcgtcccgattcctctcatgaaggcaaaccaacggtttccgaaggcatttcgcaaaatatccgcaaccaaaagaacgacgaaatacctcatctgtttgcctacagccagttgctgctttccgtgaacggtaatgatggtttgtacgcaacgtgcggcacgcctgaaaaattctgggcaaaatggaaagaagaagaaatcaccgaagcgacctatcagcggctgaagaacacgccactggcgcaagataaactcgacttgttgtttaaccatcgccccgccaaagtgcgcgatgaatatctgtcactgattgcaggtggtgaactggtggtcaccgatcaagaccgtttattggtatcgctgctgcgccatgatcgactgttagaaatgacgcgcttatttacgctgtttgataaaaaagcgggcaagattgtggcccgttatcagcaggtatttggcattaaagccctgattgaacgtgttacctctttcgatgataaaggtgctcgtaatggtggtgtgatttggcataccacaggttcgggtaagtcgttcaccatggtgttcctctccaaagccttaatctggttagaagcgctgaaaaagtgtcgtgtggttgtcgtgaccgaccgcgtcgatttggaagaccaactggctcgtacttttgcttctggtggtgcgttgtctgataaagacaaaaaggatgcgatggcgaccacaggtaaacgccttgccgaacaaattggtaaaggtaacgaacggatcatattctctatcatcaataaattcggtaccgcagttgccctacctgagtgttataacgatagccccgatattattgttctagttgatgaaggccaccgcagtcaaaacggttcaaacaatatctttatgcagcaagccctgcccaaagcggcttatattgggtttacgggaacaccactactcaaagatgataagaccgaaaataaattcggcaaaatcatccactcctacaccatgcagcaagcggtggaagacaaaaccgtgacgccattgctgtatgaagagcgtattcctgagttatgtactaacgacaaagcgatcgatgcttggttcgaccgcatcaccgataagctttcggaaaagcagcgcactgacttaaagaaaaaattctcgcaaaaaggtcaaatttaccaatcagaagaccgtcttctgctgatcgctcatgacatttccgaccatttccagaacttcaaacgcgaaggactgaaaggtcagttagcgtgtgactcgaaagcttcagccattcgatacaagaagctgctggatgagattggtaaagtgacttctgtggttgctatgtcgccgcctgatactcgtgaagggcacgataccgtggatggcgaaagcaaagacttggtgcagaattggtggaaagacaacgtcggcagcatggacgagaaagcttacaccaagcagatcatcgaagcctttggtcgtgatgatggcccagatattatgattgtggttgataagctcctaacaggctttgatgagccgaaaaacaccgtgctttatatcgataagccgctcaaacaacataacctcattcaggcaattgctcgggttaaccgcttgcatcagaagaagcagtttggttacctgattgactatcgcggtatcctcaaagaattagatgcgactatcgccgactaccaagaattggccgaacgcacgcaaagcggatttgatattgatgacctgaaagggttatacgctcgcatggataccgaatacaaaaagctgccaggtctttacagtagcttatggtcgattttcgatggcgtgcagaataagcaggacggccaagccttgcgccaggctttagcaccgaaaattgatactattgacggccagcttaccgataccaatctgaaaaaacgtgaagacttctattcggcactgaccgaatttgccaactgcctgaaagtagccttacagtctgcaacctacttcgaagataagagttttgatgacaaacgtgatttgtacaaaaagaccctcaaatccatgtcggaactacgcaagcaagtgcgagaagatgccgaagaaaccgtgaactatgatgagtttgcggagagcattcgtgcgctgctggataagcatatcgcaggggttgaaattcaagaatcaaaaggcgcttatttggtcggtaatatgggtaaaaccccaaaacctgaagagatgagtgacgatgaagcacgtaataagaaagatgtgattacgggccgtgtgaccaagatgattgaacaagatctggcggatgatccttatgcgcaggaatacttctccaacctactgaaaaaagccatcgagcaagctaaagagatgtttgatgcgcctgttaagcaatatctgttgtttgccgattttgaagagcaagtcaaagagcggaaagtggaaggcatcccaacggatcgctttgctgagcttgatccgaaaatcaaacgccatgtgcaagcgtattacgggttatttatcaaacacctgcctatcaatccattatctgaacaagattgctttgattatgccattaagattgatgaaatcgtgacttctgcgatagcggaatactcaattaatccgtcggaaattgaaaatcaaatacgtctgaaactactaccgtttttagtccgtgatgcgggacttggattagataactctaagttagtgattcaggatgtcatccagagaacccgtatgggcgtggcaggtcatcattaa

SEQ ID NO: 292765 - DNA, 1536 bp, Morganella morganii
atgactcaatttgttactagagaagaagcattattagccgcagcagaaaaattagacatatcaccttccaaatataaacaggctattgagcgtttcaattcaataaaaactcacttagaacaaggtaactacccaggaactacaagagtacctgaagtctatttgcaagggtcgtttaaacttggaacagaaattcgaccatttaaaaatagcaaagatgctgactatgacatcgacttagtatgcaacctagctcattcaaaaaatgctacgcaacctagcactgttaaagagcaagttggagataggattaagaaaaacggaacttacgaaagattgctagatgacgaaggtaagcgttgttggactttgaattacgccgaagaagatggtatcggttttcatatggatgtgttgccttcagtttctgaaagtagcttactagcacaacgtgatgctattgcggcgacaaataaaagtgaacaaaaccaatatacttggactacaagtaatcccaagggcttcgcacaatggttttatgaaagaaatgggttctcatttgaacgagaaaagttaatccagaaaacacaggtatttaacaaccaaaggcagttgtataactcaataaatgatgttcctaatatccatgtaaaaacacctttgcaaagagctattcaactccttaagagacatcgtgacgttagattctctcaatctgaagtagaaagcttcaagcctatttccatgataattagtgtacttgcggcaaagtgctatcaaaatgagacaacaatttttgatactttacgaaatctaattatgcggttagagcagcaagccaaccagttaaatactcagttcatatataaccaagcctatgcaaactcactttattcattaattacgcgcacacaggacgggaaatggataatttctaatccaacaaatccaggagaaaactttgccgatagatggcatgaagatgatcatgcaagggccaaggcatttttccaatggatcggctggcttagagatgacctgataaatataaatcatatggttgaaagtgatttatttaccaagtcattagttaatgtatatagaccaactaatctacctgctttaaattttcaggtcgcacacaaagatacaggtaactggcctatactattaaacccttcttatagtgcatcgattaaaggaagctacaagacaaatgtattctggaaagggtttaagtctggtcagtcgcttcttaaaggcaaacaacttaaatttaaacttcaaaccaatgtacctagaccttttcaagtatattggcaagtagtcaatacaggtcaagaggcaagagatgcaaagcaacttcgaggtgaaatttcggagcatgtgaatacttcaagtgccgaaatttttagaactgagtctacctcgtacacaggcgatcactgggttgaaggttttataattaaagatggtaaatgcgttgctaaaactggagaatttatcgttagtgttagggatatatatacaagatga

SEQ ID NO: 292766 - DNA, 954 bp, Morganella morganii
atgacttttaagattctaagcattgatggtggaggtatacgtggtgtatatcccgctcacattctaaagtgtttcgaagaaaagctaggaattaatctcttagaatctttcgacatgattgcaggcactagcacaggatctattatagccgctggtgttgcttgtgatattcgagcaagcaaaatggttaatatgtataaagaacatggcgcggctattttcaaaaagaaaacttcaagaattccctttaaaaaacagagtacagcagctcagttgatgttagatagcatttacgacagtagaggtttatcaaatgttcttaaagaagtatttcatgatcgtactttaggagaaatctcaaaacctttaattttacctgccactgatattggtaacggtggggttcatgtatttaagtctgcttatgatcctttattccttcgcgacaaagcagtaagagtaagagatgctgttcttgcatcgtgctctgcccctacgttttttgatcctcataaagtgggtgaatatttgttgtcggacggtggactttgggcgaacaaccctgcacttgcagcggtaattgatgctcaaaagcgtcttgacatatcctatgaagacataaaggtaatctcaattgggactggccactcaaaagttgcttacggcctaaagcataaaggcggttgggggtttgcatcaggatggaaacacaaggcttttattaactttatgttatcacttcaaagtcagagcgctttgaactatctgaaacttcacttaaaacctgcgcaaatcttgagaattgattttgaatcggatactgaattgccgttagatgatgtctctgaaattgataatttaattagtatggcagatagggattttacatacagaactcaagagataaatgcctttattttggggggtaccagcgatgactcaatttgttactag

SEQ ID NO: 292767 - DNA, 1248 bp, Morganella morganii
atggtgcctaatggttgggaatctcgtcatcttgaagaactatcgactaaaatcagcgatggtatacataccactccaaagtatgctgattattcatcagtatactttgttaatggtaacaacctcaaaaatgggcaaattgtaattcaagaatcgaccaagtttgttgatgaaatagatgctgagaaacaccgaaaggaattgagtgatagaactattcttatgtccatcaatggcacgatcggtaacctagcttactatagaggtgagaatgtcgttctaggtaaaagtgcttgttttattaatgtcaaaaagaatgtagatgtagattttatctacaacgttttaaatagtgaaaaaacgcaggctttctatacctcggaactcacgggatcaacaattaaaaacctgtcgttaaagactatcaaactaactaaggttaatttccccccacttccagaacaacaaaaaatcgccaaaatcctctccacttgggataaagcgattgccactaccgagcgtttgattgcaaccagtcagcagcagaaaaaagccctgatgcagcagttgttgacggggaaaaagcgattggtcaatcctgaaacaggaatggtgtttgagggggattgggaagaggttaagttgggggacttagcgagtaaaattacgaaaggaacaaccccgtctacgaatggctttcagttctatgattcgggaattaatttcgtaaaagtagaatccgttatgaaatcaggcaaatttgatgcatctaaatttgcctacataaatgaaaaatgccattcagcatttaaacgctcacaactagaacaagatgacattttattttcaattgcaggagctttaggaagaactgcattagttacaatagatattcttcctgcgaatacgaatcaggctttatcaattgttcgattgaaaaaacgcttatcaaatgttgaattcgttctccactacttaaatagctcagcagttgcttcaattgttaaaggacttacagcacaggctgcacaaccaaatttgagtttgaaagatgtaggcaacttgccaataaaattaccaagtgcgttagaacaacaaaaaatcgcctcagtcctcaccgttgccgataaagaaatcgagctattggaagccaaacttgctcacctaaaagatgagaaaaaggcgttaatgcagcagttactgacgggtaagcgtagagtcaaagtggaagcaatggagatggcgtaa

SEQ ID NO: 292768 - DNA, 1515 bp, Morganella morganii
atgccacataccccaataaaccaaaacgaaatcaacaaagccgtgtggaacgcttgcgataccttccgtggtacagttgatccatcaatctacaaagactttatccttaccatgctgttcttaaagtacatctcggatgtgcatatggataaagtcgaagatctgaaaaaagagtttggcgatattcctgagctgatcgctgaaatgctggaaagccagtcgtttaaaatcccaacgggcagctcgttctgggatttgtacgaagcgcgttttgaagcaggtaacggcacacgtattgataccgcactgcacgcgattgaagaagcgaacaccaagctcaaaggcgtgttccaagacatcagctttaacaccgataaactgggtgatgaaaagcagaagaacgacattctgcgccatctgttagaagattttggtaagccgactctgagcttacgcccaagccgtgtgggttcactggatgtgattggtaacgcctacgaatacctgatcaaacactttgccgcaggcagcggtaaatcggcgggggaattctatactcctgcggaagtctctgatctgttgtcgattatccttgctccgcaagaaggggatacgatttgtgaccctgcttgtggttctggctcactattgatgaagtgtggcaaacaggtacagaagaactttaacggttcgaaaaaatacgccctgtatggtcaggaagcgattggctcaacttggtcactggcaaaaatgaacatgttcctgcacggtgaagataaccaccacattgaatggggtgataccattcgcaaccctaagcttcaggacgcgaatggcggcctgctgcactttgatgtggtaactgcgaacccgccatttagtttagataaatggggccatgaagatgccgagaacgatccctttggccgtttccgccgcggtgtgccgccaaaaaccaaaggcgactatgcgtttatttcgcatatgattgaaaccctaaaaccacaaactgggcgtatgggcgttgtcgttcctcacggtgtgctgtttcgcgcgtcttcagaaggcaaaattcgtcagcagctgatcgaagaaaacctgctggatgcggtgatcggtctgccagaaaaactcttcttcggcacagggattcctgcggcgattctgatctttaaaaagcataaagacgataacaaagtgctgtttatcgatgcctcgcgtgaatttaaatcaggcaaaaaccagaacgtactaactgaagagaatatccagaaaattgtcgatacctaccaagcccatgcaagcgtggataagtatgcttaccttgccacgttaaaagagattgcagagaacgattttaacctcaatattccgcgctatgtggatacctttgaggaagaggaagagatcgacttgatggcggtacgtaaagagcgtttggcactgcaaagtgaactggcggatctggaagcggaaatggctggttatcttgaggagttgggttatggtgcctaa

SEQ ID NO: 292769 - DNA, 615 bp, Morganella morganii
atgattgatgggattacctcatcaaaattaatgaccttagctgacctagtcaccatacaggcgggttacccgtttcgtggtgcgattcgctcgattcccagtggttcggtaaaagcggtgcaagccaaagatatctctgagttgggcgagttactgtacgacgatttgatcgtcactgatttaaccggtaagcgcgaacccgactggctcaagcaaggcgatgttttattcagtgctaaaggcgcaaaacatattgccagctatgtcgaccgtgatttagtacagaccacatgtgcgccgagtctgtttctgctgcatctgagaccagaatggcaagatgcggtgaacacccaatttttaacttggcagctgaaccaatcccctgcccaacaatattttaaacgtagtgcggaaggcagttttcaaattagtattcgtaagccagtactggccgcaacgccaattgccttgccagatatcacagcacaaaacaccatagccaagctttatgaagcaagcatcaaagaaaatgcactgcttcataagctgataaacaaccgtcagcagcaattaagtgctattgcttccgacttaatgaattcatcgaacaattaa

SEQ ID NO: 292770 - DNA, 1296 bp, Morganella morganii
atgcgcaaagtggcttaccaccgtgatcgggctgtggagaaattccctcgtctgcactctctgactcgggtagaagatgtgttggaaatgaaccttttcttagagcatcgttttagagggctgtttatgccacctaaacgtggtgggcaagccaacagtttgggcggtgtcagtctgctgacgttaaattccatcgcgtattcattgagtctctttttggactggcttgagcagcaccatgtggcttggcaggaggtgatggccgttgcagctaccgataaggcgaaatactggttacctgtctaccgttttcggaaacatttaattgatcgtgtgaaaagtaaagagatcgaccgtgatactgccaatttgtatatgaaccatattcgccagttttatgagtgggcactaaagcagcgccgtatcgagaaaattccatttgaatacaaaaccaagatcattaagaaaaaacgtaaagatggcgatctcgattttttatttatgggtcagtatcaacaagagcgaggcattccggtaacgactaccgatttactgatccccaaaaaatacaaacaaaaaaaattcaacgatgatgagcttgccccttacagccgtgaagaattagagcggctgtatggcagtcaggcattaacccaaccgagtgccagactttgggttgaattagcccacttatgtggattaagggccgatgaggtggcgaattttcctgctgatgttgtggttgacccatcactcacgtcgcagtctctgttttatgttgagatatgcggaaaatttagtaagcgtcgcagaattatggtgtctcgtatgttgatgggtagtctgtggacgtatttgaattcgccggagcgattacatcgtttgagtaaatggcagttacaacaaggtgatgtggctaatgcacccttgtttttaaatcgttctggcaatcctatcttggcaaaatcggtcggcaatattattgcaaaggttcgtgccgagttaggtgacaaaaggttagagcgcgacttccacgatttgcgctcgacctttgcgacgaatctagccagttttatgttgaagaagaatctgcctatgggttttattcaatacaaactaatgcacttattggggcatgccaatttttctaccactcagaaatacattaactttgctcgctccgagacgtttgacaaacaaatggccagttgggttgataagttatttggggagcatttattgagtttgcatgatgaactgattgcggtgcaaggtggtatgaatgagcagcaataa

SEQ ID NO: 292771 - DNA, 2304 bp, Morganella morganii
atgagcagcaataaaatccagcttccctctggcggattggcaaccattactgatcttgttagccatgcccctattctcgatgagcagttgcgttggttagtcaccacggctaatttcaatggttcaaactcaagttcgctcgagtctatctctgcacgttttcgcatggttatttgtgctcttcgatatgtaatcaagaatattgaaggagcctctttagttgataatgggctcgaagattttatctgcggcgattttactttgcttaaacgagcattaaagagtgacattcgtaaagagttatcccaagaactcatttatgctttgaaagtttacacaggccaagagatctctcgtgcaactttacagccagaactgtatatgaatttgccaagtggagaagcggaggtaagcgatctttataacttttctccagcattggttgatgatctacgtactgtattagcaagtgaccgttatcaaggacacaaaggtcacgttgtcagtgcgattaccgcccgattccgcacttttatcaccgcttgtcgctatgttgtatgtcatgtagcggggactgagtgtttgcaaaatggtctaatgggcttcttagtcgacgattgtcgactgcttaaattgacctttagcagtagcattcggaaacccctgtttaatgaattattaacaggattagaagagtttaaccgccaaccgcttttacgccatcaataccaagattatctattggcgttcttttttccacagaccgaaacttggcgacatattgactgccaagatttggcagactgtttgccaggtgtctttgctgaactacaggcttttcatcggcgggaaattgagctgttgccacagaaaaactacaatatcgagacgctccatactcgtttttctaaaactaaacgcttgctgctgaattatctctaccccaagtttgccgagtcattgcagaaatatggactcaaggcattaggtataaacaataatcaaattcaaaagcagttgtttcagacaatccaatcgcaagtccagtcgaaaaccatctcattaagaacgggcactggctactttgaagtcattcgttggttgatggaatgccatgcgcagcaggcaacagatgcctatcgtatttccatgcagcgccatcaacgtcatgcaaaacgagtaaaattagagaaaacctattccgatgatgagctgatcgagttggtgtttcatcttgaaaaggcattagcgatagccacagaaagtaaggctaaagtagctttgctgtacgccaaaattcagattaaaacctgttggaataagacacccttatgccatgttgaattatccgatatcaatgagattgaactgcctacggctaaaaaaaccatgctgattatggtgcaaaaggcacgcaaaaattacgatattgatacctacaagttagatggccgcacagtgaatagcgtgatgctggacttgcaagcggtcaaaacattcaccgagccatatcgtgtagatgtttcggcattttctcacttactgttcatttatgaagaatatggtgaaatctatccgctttcaccaacgaatgtcgtcagctacgttaattcacttcttaccgcgcaaggttgtcgagtgcgttataactctcaacgtattcgcacctctggagcgaatgatatttaccgccaagtagccaaagatttacgtagatacaaacaggcaatgcgtcactcgtttgcaacatttattcagcattaccagcaagttgttgaagcggatacacaaacaacgctgagtgaggcagtcggcaccatgcaagcgtattttaccggacgagaaataagctccgacatcattattttggagcgggatgacgtgatatgtcagcaaacgccaaccgggttatgtgcctcgctcggtggtgatatcgaggctttgcaataccataaagaacatcgtcttttacacagtaagaatgggcgggatgaatcatggtgtagtgattatcttgcatgtatctggtgtaagtattttcgaaccgtagccgacccagaacatgtatggcagttactcagctatcgggattacgtgttagaagatatggcggctagcatcactaaccttgatcaaaatgatcaacaaaccgagatcattcagattctgcgcgaacgcgttgaaactattgtagcgcaactacgcgcaagaaatcccagagcggtggaactcggtcttaacctgcaaaaacaaaatggtcttcatccatattgggcatttgcagtgacatcggtatcggtatag

SEQ ID NO: 292772 - DNA, 1995 bp, Morganella morganii
atgagtgaaatacacaacgtcctagaacaggttttacagattgatgggaatatccgtattctgccttttcagcagccagtgaacacgcagcttcagccagttatcttatggcaaactcaaagcaatgcaggtagacaaactacccgctatggtgatgaaagctggcttgcttcgggagagaaaaacgccatgacttttcatcatgctgtcgatgaattggggcatgaactcaaggcattggctctgggtatgctgacgcatggtgccggcgaaggtatggtgcctttaaagtggaataccacgcggcgaattgttcgttgtagtaaacgttttgggctttggctacaaaagcagaatatccgctcgctaaaagatatcgatacattgccactgctgcgtttacgtcatctgcttgaaaaatatctttccgagtacaatgcaatgaaacatgtccatgttgcccaagaggtttctagtgcgctttattggtggcatcaatatggattaataacatctgaagaaaggatgaggttgttttcagaaatactctctccttacatagcaaaaaaatcagagttacgtcagaaacacgctgttatccccactcgcgtcatgaaggttttattaaaagaatgtgagaataagttactgttggccgaacgtcattttgatcaatgggctaaaattcaaaattcattaaacgctcagatacctaatttgtctcaagcacactttaatcaaactacgtatatcggtaggctttcaaaagaagatgaaaaacaattaagctatcttcatccgtatttgagttcaataaggagctatgtatttgtccttgttttagcttattcaggtatgcgacacagtgaagttatggctctaaaggacggttcaacttttagccgagacagcaaattttatctcacctcctcattatccaaaacgaccgatggcgaacaagaattggtatgggtcgtgagtgaaaatgtctttagaggagtgatgttgttaaccaaaataaatcagatttatcgcgatagagcaaagctacttatcaagtattatagtgatattctgccgaagcgacgtgtatcggatatgaagtttgggtctctgagcaagggactgttccaagtacgttattgcctgaaatcggctcaatttagcaatctaaataaagtcgctaaagatagttttaataacatcaacaaattaatccgtattccacttgataaaagtgatatcgaccaattagagaagctaggctgcaacgttcaatcggtatctgcaagcagtaagaaattccgtaagccttatcaggttggtattccctttaattttacttcgcatcaatttcgtcataccttcgcttggttcatcgttgccaatcgtcttggggatttggatgatatcaaatatcaattcaagcatttagaaaccagtatgtccctggtttatagccaccgtggttatgattcaatggaagagttgctgcgtttaacgcagagctttgaagaatacctgactcagcaagcgatgaccgatatggttgtggccgcagagcaaggtcaccttgcaggacgaggcggtgaaaaatttatcgttcgtttaaagcacttgcttggtgacagtttcactagcggttcttcacctcattttgcgaatattcaggagctgctgacgtataccgcaaagcattcagccagttttcgtggtttatctcatggttattgtaccaaaggcacagggtgtcaaattcgaaatgccgccgatcccagccactgtattaattgcgattcctacatcgccacaccgaaacacttaccacattggaaagtcattaagcagaagtgtgaacaccagttagcaagctttgagcaatttccggaagagattaaaccacgctttgcctctttcaaaggagcgttgctcgacaatcttcacgcggcaaatagcattattaaccagttggaaatcagtattaaggaagcatga

SEQ ID NO: 292773 - DNA, 396 bp, Morganella morganii
atggaatctgatactaagcgtcaattagaagtgatcattgcacaaatgattgagtcgggagaaaaggtcaacgttagccgagtggcccagaaagcaggcgtatcaaatgcgttaatctataatcgttatccggagttgaaactccaaattcaacaggcaaagctcggccagacccaaaaggctaagcagattgaatcagcaacagaaatcgagaaattaaaagggatgttgaaaaaatccaagcaaaaacaggaagaagcggaaatcatggctcaatcgtttcaaaagcagaacagcgaactgtgggaacatattcaacaagtctactcgatgtacgatcagattctggctgaacggaatgaatttgcggaaaggttgaagtttgtggagaagtga

SEQ ID NO: 292774 - DNA, 258 bp, Morganella morganii
atgcccgggatcaagatcgggcatggagcggtgataggtagccgcgctttggttgccaaagacgtggaaccctacaccatagtggggggaaaccctgcaaagtcgattaggaagcgcttttctgaagaagaaatttctatgcttttagatatggcttggtgggattggccgctggaacaaatcaaggaagcaatgccttttctttgttcgtctggcattgccagcctgtatcgtcgctggcaaggcacaagcgcctaa

SEQ ID NO: 292775 - DNA, 822 bp, Morganella morganii
atgcttcagcagaaaatgatcgaacgcttcaaggaagcttgccatgaggatgcacgaataatcgcggcgctgatgttcggctcatttgctatcggagagggtgacgagttctctgatatcgaatttgcagtgttcatccaggatgatcattttgaaaatttcgatcagcgctcgtggcttaatgctgtaagtccggttgcagcttactttccggatgacttcggccaccacaccgcgctttttgaaaacggcattcgcggtgaattccatttcatgcgaaaatcggacataccggtcatttccacttggcaaggctacgggtggtttccctcgcttgaggaggctgttttgttggaccgatcaggagagttgtcaaggtacgcgagtgctctcgtgggcagtcccccgaaacgtgaaggcgcgccgctggtggaaggacttgtattgaacctcatcagcctgatgctctttggggcaaatcttttaaatcggggagagtatgctcgcgcctgggctttgctcagcaaagcacatgaaaacttactcaagttggttcgcctccatgaaggggcaacagaccactggccgacaccttcacgcgcgctcgaaaaggatgtctcggaggactcgtataatcgctacctggcatgcacaggcagcgcggaaccaaaagcactatgtgtagcctatcatgaaacgtggaagtggagtctcgaattgttcaggagtgtggctggacctctgaatatcgagcttccgagaattgtaattgcgcagacaaaaaggttgctaaatgaatctgcgacgccgcacaacaagtaa

SEQ ID NO: 292776 - DNA, 213 bp, Morganella morganii
atgaaagcaaagtgtgtagaaagcaaaaaaccatattggacggagggcaaaaattataatgctaaaatatgtctcaatgctaatgttagttacatttttattaatgacaatgatgaaaaagattgtatttggtacgcctgccgccatacacaaaacgattttttttatatttatggcataaacccaaaagtattatttatgctaataaattaa

SEQ ID NO: 292777 - DNA, 219 bp, Morganella morganii
atgtctgcacaagtgcttgatcgattaattgaattaacccgcaacactgacgatgaagttaaagctgctgctgcatatgctttaggtgagactggcggccgaacatcagacacaatagtaaatcgcttaattgatatgacaaaaagtaccagtcctgtagtaaaaattgcggcaacaaaagccttaggtagacttttccgcccacaaactaataaataa

SEQ ID NO: 292778 - DNA, 168 bp, Morganella morganii
atgatgacaaaagaaacgctgtggttacttaataaccttgaacacaattgcaaattgctggacaccatttatcagtccagcatgtcagtctactacaacactgacgtagtccatgatgccattgactcaattatcgctgagttaaggcgacgagggttccacctctga

SEQ ID NO: 292779 - DNA, 255 bp, Morganella morganii; identical to SEQ ID NO: 280887

SEQ ID NO: 292780 - DNA, 444 bp, Morganella morganii
atgtctgtaatcgatattatgcgagcaggacgcattttaccccgctattatcaattattagtacgtttattagaggcctgtgttgaggatggatattatatttaccaacagataaatcagcacaactactataaaaaaataaaatctatttctagtgataaattaccattattattccatcaattacaattagatagcgaaggtcttcaatctattcctgacaccgtcaagcgagcaggagagcaactctacgatatgatgacaggcgtgattgaacctgtttcagtgatctttcctgaaggtgcatctcaaggtgttgaagttctctatcaagattttagttttggtcgttattttaaccaaattgctgccgcggtacttaaaggattactttctcactaccagcccactgtggctaaaccagcaatagtcatatcatcataa

SEQ ID NO: 292781 - DNA, 5637 bp, Morganella morganii
atgcgcgaaataaccaaacaagctcgcttatttgattttgtttttggcccactggtgttacccctccatgatgaaaagatccgtaaaggaaaactatttttatcaccagaattatggcatcaacagtgtcgcttagcaggatttcaacatattcgctggttacctgatgcattaccagaaaccaaagatatgtgtgaacatattattctcgccagtgtttcgacagaaaacgatcactttgatcaagagttacctagtgacaccaagatacaacaaagttcacactaccaatggcaattaacaccttgtgtggaacaagatcttatcaagccaacattaatatttaaccatcaacaaacattgccttctgaaatcacagctattttatccgctattggatgtctttctgaacagggcgaaaatcaattaatcgttgccaaccttgcagatcctttaattatcgccgagcagatccgccaaatattactgtcatcgtctgatgggtttgttgttatcacgcaacaagcctgggcattaactgccatagaaacggttaatccagcacaacgtagtattcgaagtttattaaaaactattcaaaaagaatatagctcaaggttaattgccattgttgatttaggtataaatgcctcatggtctgaattagttcctgcttttatacaaatagaacaaggtaataatgaaattattgttcgtaaccattgctgctacttaccacaattaaccccactgccctcatcttctacgatcatagcgcagaacatcatggtatccccgcgctggcatattattactggtggttttggaggcttaggtcgaattacagcaagttggttagtaaggcaaggtgctaaacgtatcgctattttggcaccacgagctgatagcagcgcattagattggatgaataacttacagaaatctaaccagctagaaataaaatggctaacatgtgattgtcgtgataacgctcaatgtcatgcagcactcactcagcttgaaaatgaaggtggcattgaggggcttatacacagtgcaggtattttggatgatgcacttatgacacaactcacccctaagcgtatgtctgacgtattttctgttaaagcgatatctgccaagcaattttgtgatgctttagaaaaaacagatgccagttaccttattttatactcctctgccgctgcaactataggctctgaaggacaagcagctcattccctcgcttgtggatatttagatggattagctgaatatgcacgtcgcaatatcaagggattaaccgtcatttctatcgcttggggggcatggcaaagtgttggctttgtggcagaaaaacaactccatgataaattacaacacaaaggtatgagtacgcttactactgaggaaggactggcacatttagatgcttgtctgctagataatacctcttgtcgccttgcaatgcgcttagcgactccacctttaatgacacaaaaaacgcctttatttcatcagactaatcataatgatcattatgataaccatgaaattaatcacactcgccagctttgtgaaaccccaactcaaacggataaaacagagccggtaagccctaacagggttgattatcgcgttggtgataacttagaacagtggctaacagcatgtatcaaacaactgttgcgtcttggtgatgaacatattgatactcacattgaactattccaattaggactagattctctctctttcctcgatctcagtgcggaaattaagaaacagtttgcggtcaatattgacgctgaacaatcttatgatgatatgactattgctggtttagcctcagttattcgaaccgcagcacctgagaaatttactgtgacagaagcactccataatcaagacaacatttcccacacaatggagtcagaacgatatgccccatttccattaacaccaattcaacacgcctattggatcggacgtaaaaacctctttaactacggaggcgttgcttgccatgcaatttttgaatgggattgtcaacgccatatatgggagccggcctcacttgaaaaagcttggaataaagttattcagcgtcatgatatgttgagaatgatcatagatgatgatggacaacaacgtatcttaaaagaagttccttattttcattttattcaacatgacctaacaaatttaacccaacaagagcaacaagagagcctaacacagataagggaagccctttcttatcgggtattaccgactgagtcatggccattatttgaagttgaaatttcttggctaaataacgattgttacagattacatatcaatctagatttactgcagtttgataccatgagctttaaaattctgtttgatgatctatttaacgcctattcaggacaagaattaataccacaaacatttaccttccgcgactactgcttaaaaaatcaaacaaatcgtaacagtgatgagtggaaaatggcatggtgttactggcaggatctattatctgatttaccttctgccccatatttaccgataaagaattcatccattactgaacaacctcgttttacgactttccaacatcatgtttctatagcgcaatgggacaaattaaaacagaggtggaaaaagcatggtattacaccatcagcggggcttttaacactttttgctttagttttaggtcgctggacaaaatacccagcctttacactaaacttaactttctttaatcgtcaaccatggcacccagatgttactcaacttattggtgattttacctctgtactccctatagatatttatctagataacgactgtacattaaatgagtcaatggcaaaaatacagcgcagactttggcaacatttaagtaagtcccaagtaaatggtgtagagattttacgtgaatggggacgctataaaggggatagtagccaatctctgttacctattgtatttactagcatgttaggtatgacactagatggtgacaatattgatgaagcattaaatcagcttttcggccaacccgtatatagcttcgcgcaaacacctcaagtttggttagatcaccaagtaatggaaggaaaagaggggctaacattaaattggttctgcatggatgacatctttgctgacggtttattaacaatgatgttctctgattatcaaagcttgatcactcaattatgccaagatgaagataataatcaatcagttgataagattattgcgcaacttccttcatatcaacatttagcaatagataatcacctccaatcacgctatcaacaactcgagcaaacattggaaaatcatccgcaaatcaaacgtgctcatgctatggtaatggtaaaagacgatacgaaagtagagcctcctctacaattactgtttgaagcctcttctgatattccactatccgttattaaacagcccaattggttacctaatttactttcgccatcagcttcactcagtgacattattgaaaagagttggcaacgatttgaggaacgagcacggtatggcatatgtcacacactgtatcgaaatgctctttttaccgagctaaacacaccaatcaccctagctgaaatagtggctcgtttaaaagcaaagcctcagtatgagaggctacttagtcagtggctagatttattatgcctgcatcacttattaaccaaagagggtgatcagttttatgccacaacacagtttattaacttatgtttatctgccccagtatttcagcaacctgttaatgattgggaatatgtactttgggattaccttgaacaatcactaacccaacatgaattactctttagtggtaaggtttctcctctttcactactttttaattcagatgaaattaccacagcactatacgccaaacaccctgcactaaattatttaaatcaatgtgcaaaagatattgttagtgcaatggttggtgcaacatcttcactcaatattttagaaataggggcaggtacaggagctaccactcaaggtatagtcgcagtacttaagaatacgcattactcatacacctttactgatatatcacattacttccttgataaagcgcgaaaaaaattcactgctgtaggagaaatgcgctatcaactctttgatattaatgcaccaatacaattttctcatcatccagataatggctatgatctgatcattgcatctaatgtattacatgatgcatcacatatcggccacgcactaaaacggattagaagcctgttaaaacctcaaggctatttattatttatcgaagcaaccgagtgtcaaagtgctatgcaaatggcgactgttggctttattgagggattaagtgcatatcaagataagcgtatattgacgaataaagcgatgcttgatagtgaaagttggcatgatattttaatcaatactggttttgaaactattggtcaatggccccaaacagattcctcatctttgcgacaaacactctttttagcctctcccactcgtggaggaaaaccttatttaggtaaattacgtgattatttatctcattctcttgatcagaatatcgactcttttgagttgttccaatgtgaaaatattgaagcaacccttaatggcatagcaacatcatccgctcaagagctaaatgaacagatacaacctgttgcaatacctgatgtaccaaccaatatgattaatgaaatcattgcattatggtctgagttattaggtcgtgaggtcaatagtacaaatgatttcttccgttctggaggagatagtttgattgcaaccaaaatgatcagccaattacatcaacggggatatccagcaacattacaacagatttttacctatccatgcttagccgatttttgtgctcatttagagcaggaaaagcaatctcaacgagagtactcctctttgatacctctaagcgctgtatctgctccaaaaccttaccactactttatggtacatgcttctgatggtgatcccggtgtttacctacctcttgctgagtcgttaaataatacagtgtggggattaacagttacagatgcttcaaaactaactgatttggatacattgttatcattacatttatctagcataaaaacagcacaacagactggcccttatattcttattggttggtcatatggtgcttttattgccagttaccttgcagaacaactctcgcaacaaaatcattccgtattattagtattaatagatcccgtctatcgacatgattttattaaattttgtcatgatgactcagatagttcatcagatgaaaataagcagcttgcatgcactaaaagacttatgtcattcctacctgaaagtgacctaccattatctgatgatatcgcctgtttatggctagaagccaccaaccacccaacagaatggacatcacctgaaaaagagtggtaccaacgattaccgccacatacccaacatcactatttttcaggggagcactggtcaatactgcaagatcgcgctaccagcacacatctggccgaaatcattgatcagtgggtgcaacaaaaactttctaataacggatatccatccgaaggaggtaattaa

SEQ ID NO: 292782 - DNA, 357 bp, Morganella morganii; identical to SEQ ID NO: 27107

SEQ ID NO: 292783 - DNA, 1335 bp, Morganella morganii
gtgctgacctttgatccgcagaataaacaggatcgtacccagaatgcgcatctgctgttattcggtcccaccggggccggtaaatccgccaccttatgcgcacagttatcgcagctgatggcggtccgccgtccgcgtctgtttattgcggaggccggtaactcctttggtttactggcggactattacgccagtctggggctgagtgtcaataaggtcagtgtcaagcccggcagcggggtgcgtctgccgctgtttgcggatgcgcatcagctgctgatgatggatgaacagcgtctggcactgaatgtggatgaactgcccgagacggacagtgaatctgaggatgatgacgggcagcgtgacattctgggggaaatggaaatctccgcccgcatgatgatcaccggcggggatgtgcgggaagaagcggagctgaagcgggctgaccgggcgatgatccgccgggcgctgatggcgggggcccgggcgtcttatgccgccgaccggcagatgctgccggcggatttgcaggaggcgctgtatgccctctcccggggggaaggtgaagaggaagggcgggcgttaaatccgcagcgccgggcgaaagcggccgaaatggcggaatccctggggatgtttaccgaaccgggcagttttgagcatgagctgtttaatctgccgggggagctgtggccggaggcggatgtgaccctgattgatttggggcacctggcgcgggaagggtatgaggcccagatggcgctgacgatggtgagtcttatcaactccatcaacaatattgccgagcgggatcagtaccgggcccgggacattaattttgtggtggatgaggcgcatatcgtgacggtcaacccgctgttatccccctatgtaaccaaagtggtgaaaatgtggcggaaactgggggcctggctgtggctggcgacccagaacctcgatgactatccggactgtgccgagaaaatgctcaatatggcggagtggtgggtgtgtctgacgatgccgcagaaagaggtggaggcaatcgcccgctttaagacgctcagtgaggagcagaaacaggtgctgctgtccgcagccaaactctccggctgttacacggaaggggtggtgctggcgcggaaagtggaggcgctgttccgggtggtacagccgagcttatatctggcgctggggatgacggaaaaagaggagaagcagcaacggcgggtgctgatggagcaatacggatgcagtgagctggaagcggcgttcagggtggcagatgaacttgaccggaaacgggggttaccgccccgggcgccggggtga

SEQ ID NO: 292784 - DNA, 180 bp, Morganella morganii
atgattgaactcggaatatcgccggtatcggcggtcaaccgtctggtggataaataccatctggagaaactgaatgcatcctgttatctgccggcatccccgtatgtcagtgataccgatgccttacatgcacaggctcaactgagcggtgccattaacccggatgtcatgcccggataa

SEQ ID NO: 292785 - DNA, 255 bp, Morganella morganii; identical to SEQ ID NO: 280887

SEQ ID NO: 292786 - DNA, 234 bp, Morganella morganii
atgagcaaaggtaaaaatcaacatgtagtaaaacatcctgatggttgggctgtgaaaggtgaagggaatagcaaggcaacaaaagtcaccgacactcaaaagcaggcaattgaagcagcagaacagattgctaaaaatcagaaatcagataccaaaattcatggacgggatggcaaaatcagagcgggaaatagttacgggaatgatcctcatccaccaaaagataaaaaataa

SEQ ID NO: 292787 - DNA, 1002 bp, Morganella morganii
atgccaaactggtgctcaaaccgacttgacatcaccttacacaacgcggcggatatgccggcgcttaaacactggatatatgcggatgacgggatacccgcctggcagacggcgatagcacaaagtctgcatttgttgctggccggctgtgcggggatactgaaaccggtaaaaccgctgtcttttccgccgttaccggaactgacctcatacggggaaaccggccctgtttccccgggaaacaccgccttcacgcactgggttgagatgctgataaccgcaccggatttgacgccgtcatgttgtcagcaaatccatcagtggtatcagatgtggttatctgaaggtggggtgtaccattcctgggactcgctgacggcgatgcagaaagcgatactgtcaccgttgttatcggccggcagttttgactggctaaaccggtttaccggggaggatgagagccgggtggcgacagcctgggaggatattcagtatcttcgcggtacaggggaagccgtaccaatggatatgcggacattgttaccgaccagccttgcggctgaattacacggcttcaacggtcgtttatggaaaacaccggaagttatctggagacaggcgcgctggcaggcgtttgcccccggtaacagtacatatcacctttatcagtgtcgttatggtgtgaaatggccgaacggcagtggttttcgctgtattgatgacggggaggccaccacgctgtcagtgacgtttgatactccatggagtctgccgtcagcagaggtcttgtgtgctctgtctacgcgtttccgctgtcaggtccgtcatgtctatgccgaagaaggctgtggtttctgcggatacagcgagtatgaccatggccggttagccgaccatgaatctgatgagattgagtacagtgatgaagagaatgaggatggtttccgggatgtgacgggaccggactatattcttgattcattaccacattacggagggtga

SEQ ID NO: 292788 - DNA, 600 bp, Morganella morganii
atgagtaatagcaacttgtttatagataatgaggtgcatatctggattggtaatctacaaacgataccatgtttaagtaaagctaaatccagaatgcacatcttaaataacgatgaaatttcatcgttattcgactacccttttataaaacaacgaaatatttttttgctatcaagagtcatgttacgcgatattttatcattttatttaaaaatttcaccagaagatgtaagattttcaaaaaatgagtacgggaaaccatttattttaaacgaatcaaaggaaagcatttacttcaatttatcacattcaaataattgtgttgctctcgcgatgtggacattaaaagaagcctatattaaatcaagaggcattggattatcagaagaaatcattaagaatttagatttttatataaagagagatcaatttgataaattatattttatagaacagcattactctgctcatctttcatatattaccaaatcaatattagatagctataaaatatccataatcacatatcaccatccatttaactataaattcttaacatggggtgatataaaaagcaacctgccacatcatttattatag

SEQ ID NO: 292789 - DNA, 192 bp, Morganella morganii
atgacccgtagcgaagctgtcaaaatagtgaataagttacaaggtgaatttcctgggaacgatcttgaacattttttacgattccatgatattactgaacaagaattttgggaaaccgttgaaaaattcagaaataaagatatatgggaatatgtcaatggtgaatggaaactgaaatatatcctggcctaa

SEQ ID NO: 292790 - DNA, 699 bp, Morganella morganii; identical to SEQ ID NO: 277832

SEQ ID NO: 292791 - DNA, 438 bp, Morganella morganii; identical to SEQ ID NO: 14572

SEQ ID NO: 292792 - DNA, 333 bp, Morganella morganii; identical to SEQ ID NO: 14485

SEQ ID NO: 292793 - DNA, 543 bp, Morganella morganii
atgaaagggcggcgcggtattcagtctcccggactggatccgctgacgacactgggcattgaggcccggtcagatgaggagcgccgccggctggctgaaaagtgggtacagcaggaatttgcccgggcggaaaaagagctggcgtttcagcgggaagtggatgcggcctggaaacggctttatggccagatattaccggtcagtctgggaacagccggcggaaccgccgggatggtacagggaacagcacagcgccggcaggcgttgtttgtgcaggcggaaaattgtagtgcgtgtgatgtccgtctggccaccctgctggccggcaaacagccgtttgatatttatgtgctgggcacaaagggggatgataaccggctgcgagcctgggccagacaaaaaaatatcccggcagagcgcgtcagaaagcgggaaattacgttaaatcatgatggcggtctctcgcttcagtacggactgaccaccacaccggtggtgatgcaacagttaccggatgggcggtggcgtccgctcacaccttaa

SEQ ID NO: 292794 - DNA, 351 bp, Morganella morganii; identical to SEQ ID NO: 281138

SEQ ID NO: 292795 - DNA, 240 bp, Morganella morganii
gtgggggatgatccgttatcccgggcatggctcacacagcacgcagcccagctgaatgcaatgaatgcggccgggatggtggtgaatgtgaaatcggaaaccgggttacaggcgcttcaggcgctggctcagggaggactgctctccccggcatccggcaccgatttggctcaccgtcttcagttatcccattacccggttctgatcacggaaaccgggctgacccagcaggtgaagtaa

SEQ ID NO: 292796 - DNA, 273 bp, Morganella morganii
gtgcaggcggaaaattgtagcgcgtgtgatgcccgtctggctactctgctggccggcaaacagccgtttgatatttatgtgctggggacaaagggggatgataaccgcctgagggcttgggccagacaaaaaaatatcccggcagagcgcgtcagaaagcgggaaattacgttaaatcatgatggcggtctctcgcttcagtacggactgaccaccacaccggtggtgatgcaacagttaccggatgggcggtggcgtccgctcacaccttaa

SEQ ID NO: 292797 - DNA, 333 bp, Morganella morganii
atgtcacgatataaagtgttgaagaaatcctttatcaatggccgcctgctttatcccggtgaggaagttgagttcgccggtatggcgggaagtaatctgctgctgattgaaaccggtgagcgtgtagtggcgaatgaaggtgccaataccggcagcgataatcatgatggtgataacggcggttcaggtggtgaaggtggtggcgcagacgctgaattaaccgcattgcaggatcaataccagcagctgtttggtaagaaaccgcatcacaatgccggtgccgaaaaactccgcgcggatatcgacgcgaaacgcaaagagcttggggtttaa

SEQ ID NO: 292798 - DNA, 903 bp, Morganella morganii
atgagcaaagcaaaaagtaaaacaacagaacaaaacactgacttgattgaggaagtatctaaaccagatgcacctgaacaaaaaacttgctttattatcatgcctattgcagatcatcctagttatgaaaatgatcattttaatcgtgtatatgaatatttaataaaacctgcatgtgaaaatgctggttataaagcaataagagccgatgacagcaaagcatctcacatgattatgtttgatatactaaaaaaaatagtccagtgcgatatggcaatctgtgatttaagtactaaaaatgcaaatgttttctatgagcttggattaaggcaagcctttaataaaaaaacaattttgataacagatggaaaagaaaaagctccttttgatatagctggattcagatacgtccaatactcacccgcacttcgtgttgaccagtgtgttcaggatataaataaaataacagaaatgttaaatgaaacaacagtagcttctgaaaacgatgtaaattcaattgttaaactgttagaaatagatcctgcgactgtagatatgacacaattaaataatgaggattcattgatatttaaaatgataatgaatatcaatgatagattagataaattatctagcacccaaaaaaataactataaaaaaatacatccatctatatatatcaataacttaaaagaaaccgcccctcaatcatatataacaaatcttaatgatatcctaaaatcaccaaatctagattgtatggattatgagtataaacttggtgatgatatattaggtcagataatagaattaacaaatgaatatataacatttcttcatgatggtgctagtattcgtattcaccgaaatagtcctgcacttaaatcaataataatcatatag

SEQ ID NO: 292799 - DNA, 546 bp, Morganella morganii
atgaccacaattaattactattttgacgacaatcacccgctgcgcccatatttcggtgatgattacgcgaacaaagactctttttctcctgtcaatgcgttgcgcatcgcacctgaatttaaggttgggtttcatccgtgcgagcagaatggcgcctggataatggttccggatcaccgcggtacaaaagtttatgacatcaccaccgcgcaagagtcagagattaaagaactcggagaactgccggagggtgtgacgactgtcgcgccggatgtggagtttccgaagtggaacggcaaaaaatgggtgaccgataaagcggcgaaaaaggaaagtgatatcgcggcggcagaagctcaaaagcaatatctgattgccgaagttcacaccgaaactcagatactgcaaacaaaactcacacttggccgcatcaaagatgatgaaaaggcgcagttaatcgcctggctggattatctggacgaactggaggcagtggacgtatccaccgccccggatattatctggccggtgaaaccggtggtgtag

SEQ ID NO: 292800 - DNA, 408 bp, Morganella morganii
atgaaaaaattcacattaggtattttgtttgctctggtttcatttagtgcgctatcaaaagttgatgataatcaacgtcttcaacaggcgataacagcaagcgtggcggtttgtggtgagccacgtgaaaaaataattgaatatatcgataatacagttaaaacagctaacgaaaataattacttaaatattaatgaattggatgttgctgaaatgctatacacactacaaagtgaagcacaatctttcgatttaaagcaaaagtgcaaaaatttactcactgactatcaagtctttgccataaccgcacccaaaaatgaatacaccaatcatgcaaaaataatggggctaactttatatggtatatatgaaagggcagcgcgacagcaacgggcaggtaaccactga

SEQ ID NO: 292801 - DNA, 192 bp, Morganella morganii
atgtcaattcagattattgtaaatattaaagaaacagaagattgcacaatgagttacgaaattatcggaagccattctgacgctggggcgaccccaaatgaaatagagattgcaaagcgtttatcaggcggcattcgaaatgcacttttagctattaagacaactaacaaggataaaaacaatgcacactaa

SEQ ID NO: 292802 - DNA, 615 bp, Morganella morganii
atgtcagataattacaaagaaaaatccgatgaaaggtcaaaaatccgtgatcggattattagttctagttcaataatccgttttggtgaacgtttaaagcaggcaatgaatggcatgactaatgtagaattagccaaaagatcaggtatgtcagaagctacaataagaaagtatcttgcaggaaaaatatatccaacaattgatagcttagctgttgtagcggaagcgtgtgctgtatcgttctcttggttggcatttggagaagatactaacaatatcggttcgaatgatatcgacttaaaagacgacactgattctgaattattaacagcattcaatcggttatcactgagagaaaagcaactggtagtagactatatctacagagaaggtatcaataatctagtacgaatcgctgcaacaaatacccctgttatagataatgccacaatgatgccaattgttgatgctttgcctctgaggccaatgctaaagcaagctataaagataggcttaacaaataatggtgattacgacagagagattttatgccttcttgaggaaatcaagtccaaaggccaaagcgaaaatttagccaagaataaggtgggatga

SEQ ID NO: 292803 - DNA, 636 bp, Morganella morganii
atgaaaattttcgaaaaaaaaatatatataggctctgttattggtgttatcgccacaatcattgggattgtagccgttttcttccctagcatatttaacctagaaaagaaaaaatttgttgaatttgaacttgtattaaaaaataaaaatgatggcgaccgtttacaaaactttttaaacgaaagagctgaagataaaaaactttttaaacttaacgtctccatatgtaataacagtgaagataaaaaagataaaaaagagtttaatgaactcactgaaatgttaaacaatgatggtgagattatttatggatatccagtacgttacagttctactattgaagttcctgatgtaaaaacatcttacttccctcttatttatccagccacaacaaaacaagaacttttagacggttatgtaaatgggctagattattatttaattcccgttaatacagttgttacttatgattccattcggtcagggacagatcgcgtttgtgaggaaggtggtattgacatatatggatattatatttttgataaaaaagaaatatctagaagttacagtgctgatactatagctatatcctttgataatatccctgaaaaagatatcagcctacgcgattattaa

SEQ ID NO: 292804 - DNA, 369 bp, Morganella morganii
atggcaaagtacccaagtcagttacaggataaatttaatttacggctccccgatggaatgaaagatgctattgcagaaagagctgataagtacgggaggtctatgaattcagaaatcattcagatcttaagcgataaattgtcagggccggaatctttacaggtggatatagaattccataaattatttaaagaaataacagaaagtgaagcttgcgatgggtacaatgggttcacccatgatgattttaatgaaaaagatacaaaaatagatctacttatcgatatcttgatgaaaagaatggaaagcgataacaacaaaataaaagatttattaaatatgaagcgaggcctgctgctaaaaaagtag

SEQ ID NO: 292805 - DNA, 315 bp, Morganella morganii
atgatgcgtgtccgtgagacataccagaagagcgcgaaaactacggagtcgcagctgatcagcgacctgtgcgaagtagatttactggtgctggatgatgtcggcgtacagcgtaataacctgaacgaagagctgattatcttccaggtagtagaccgccggttatcgaacaaaaagccggtaggtgtgctgaccaatctcaattttgacgaactggctaaggcattgggtgatcgggttattgatcgcctgagaatggggtcgccgaccgttatcaatttcacctgggaaagcttccgcagacaggttaagtag

SEQ ID NO: 292806 - DNA, 315 bp, Morganella morganii
atgatgcgtgtccgtgagacataccagaagggcgcgaaaactacggagtcgcatctgatcagcgacctgtgcgaagtggatttactggtgctggatgatgtcggtgtgcagcgcaataacctgaacgaagagctgattatcttccaggtggtagaccgtcggttatcgaataaaaaaccggtaggcgtgctgaccaatctcaatttcgacgagctggcgaaggcgttgggtgatcgggttattgaccgcctgagaatgggatcgccgaccgttatcaatttcacatgggaaagtttccgcaggcaggttaagtag

SEQ ID NO: 292807 - DNA, 264 bp, Morganella morganii; identical to SEQ ID NO: 281626

SEQ ID NO: 292808 - DNA, 297 bp, Morganella morganii
atgaaagagtcaacagcattagattggcctaatggaacatggagcattgattctggatgcaaatggtgcggtcgagtgtttattggatacaaaaactcaacatcgtgtaaagcgtgtcaggacgaattaaatgcggtcgggagcctgatgcacaaaatcaaaaagaccagagacttaacaccaatggaaaaattggaagactacgacaggcaaataaacaccctccaaaataagattacgcggcttgaggatgggcgccgtgagcacatcaacagacacaacctaaacaggaagtga

SEQ ID NO: 292809 - DNA, 420 bp, Morganella morganii
atgaacgacgaacaattcaaagtatgcgttgacataatcagggcatgtcgcgatctggattctttcaccaatcacgaggccgggctgcacactgggaactcagctgagttcattaagtggttcaccaacaaaatgctgtatatcggatgtttgcgaaaagtcggcaccgtcagacacaaccgtcacatgaggccgttatttgcaatatcaccggatgctgtcaccaggctgtatcactatgcacgcgaatccagaggtgagttagtttcggatggcgggtcgggagagcggatgcgcattgaattttgcgggaaagtggtcagcaaggcgtacatcactccggattttggccggtcggagataaccagaattgacgcaatgctgcgggaggtgcgctgtggaatgccaactgtgcagtaa

SEQ ID NO: 292810 - DNA, 234 bp, Morganella morganii
atgaatttacattgttggaataagcctcacatcaggagggaatctggggtatgggtggcatggttcaagcgtgaggagagtgatgagtttgcctttcacagctatgcgctgtgcggatggggagcgacaccacaacaggcccttcgtgatttaagcagatttacagaggtatcacttggtaaacagactgcggttcctaacttccgcacccgcagagtaatgatcccagactaa

SEQ ID NO: 292811 - DNA, 180 bp, Morganella morganii
atgagtcacgcactgaaaaagacaagccgtctttgcataccgcctcgtgacaaaagcaatattgcatctccaagatcagctattggtcacgagtgctcacataaagctcaggtaaaaaatgctgttgatttcggattttctcggtacgaagcagcgatgaaagagttggctaaggtgtaa

SEQ ID NO: 292812 - DNA, 918 bp, Morganella morganii
atggataaatttgtaattattaaaataaatgcatctccagactcattagaacaattaggaacaaaagagaagttttggtttactcatcaaaataacaaacacttgtttaagtacacaaaaagcgagactggtgagcattggtctgaaaagtgcgcggaagagatctgtaaagtgcttggtattccgcacgctacatacgatatagggttatgtggagacaggtggggggtgatatcaccaaattttattcctcataatttcaggatggttatgggtaacgaagttcttcataatcataccccaggatacccaaaaccagtatctgatgttgaaaagcaagttaggataagagaacatacagtaactagagtattatcttgcttggaaaactcaatattaccgcctatatttcatggttatgatatttcagggctaacttctggtgatgttttttgtggttatttgatgcttgatgtgttaattagcaatcaagataggcaccatgaaaactgggcaattatgcaaaatgaccagtcgggtgaaagatacctttgcccaacatacgatcatgcagctagcctaggaagagaaatgacagatagagaaaaaaatgaacgacttaacactaaagatatgaaccgctctatatctaaatttgtaagaaaggctaggtctgagttatttagaacacaaaaagatactaaaagattacttaccattgaagcgttcgaagaggcagtaaaaacacgaaaagaggtaatgaacttttggatatcaaagctacataacctaaatgatgaatacctaaaagatatttttgccagattagatgaaagatgcatttctgaggtttctagaaaatttgcatttgagatggtgaaagaaaataaaaaaaggctgttaagtagtttttcttag

SEQ ID NO: 292813 - DNA, 738 bp, Morganella morganii
atgagtaactctgtatatgttgcgtggcaatgccctgaatctagagggtggcatgttgtaggaagactacaagaacatcaatcagggtatgcttttaattatactaaaggagtgaatgaagccaaaaatttcaatccctttagtggaatgctagagctagataagatttatatttcagaagagcttttccctttatttaagaatagattactatccagcagaaggccggaatatccattttttattaagtggttagggttgaataatgataatgcctcaccaatggaggttttggcaagaagcggcgggattagagctacagaccagctgcaagtgtttaaaaaaatcgatccagatgaaaatgggaaagtagaggtttatttttttgttcatggcatcaagcattttagtgaatcggcagaaaatcgagttaattccttaagaaaaggtgatgaattaagactattgccagatccacaaaataagcatgataactacgcaatcgcggtatcagctatgaatccaatggagctaattggttactgccctaggtttctgaataaagatatctcactgatgctaaacgacccgttaggagcaattaaagtaactgtagaacaattgagtgaggatgcgcctacaaactacaaattactatgcaaactaactggtgaagcaagtgatatcacattaaacgcaattaaaagcaacgcagcgtatatgccaattattgagtaa

SEQ ID NO: 292814 - DNA, 237 bp, Morganella morganii
atgacagataaaacaggtggctcggcgtttccagtccctgcaacagaatggcacggcgctgacgaaggtatgtcgctgagggattattttgcagcaaaagccatgcagggtgatttagctgcacaggatgagagtatgggctattccgaaaatagcactcctgatgaattcttgacagccagagctgaattttattaccgcatggcagacgcaatgctcagagcaagggagaaataa

SEQ ID NO: 292815 - DNA, 1749 bp, Morganella morganii
  misc_feature (807)..(816): n is a, c, g, or t
atgctgaattttgaaactttctatggtaatagtgaacctatagctgttattggtctttctggtcgcttccctgatgcacaaaatattgatcaattttggcataacataattaataaacacgatagctctcgtcttttttctgaagaagaactaaaagccgcaggtgtcgctgaacaaacttatcgttcacctgattttgttaatcgtggcgcgccgttagatgaagcggaatattttgacgctactctatttaattattcacgctcagaagctgaacttatcgatccccagcaaagaatttttttacaaggtgcttggcatgctttagagcacgctggatatgccccttgcaatataaccatcaaaacaggcgtttttgcttcagcaagaatgagcagctatcctgcccagcaagatttagcattgcacaatattggccatgtccgtggcatgcaaaaattattagggaatgataaagactatctcgcaacacgtattgcatataaattaaatttaactggtccagcattaactatacaaaccgcttgttctagctccttagttgccgtacatatggcttgtgaaagtttacgctctggtgaatgcagtatggctattgctggtggaattggtatcacatttccacaaaccggtggttatctatatcagaaaggcatgatcttctcaccagatggtatttgtcgtccttttgatgcagaggcaaacggtacttttgctggtaatggatttggtattgtagtgttacgtcgtcttgaagatgccttagtggatggaaacacaattatnnnnnnnnnngtattacgtggtagtgccattaataatgatggtcatcaaaaagcgggattcacagctccctccgtagcaggccaagtttcagttattagagaagcaatacaactggccgatattaaaaatgaagatattgaacttattgaagcacacgcaacagctacaccattaggtgatccaattgagtttagtgcattatgtcaggttttcgctgatcgctctcttactgcttctaaatgcgctattggctcagttaaaggcaatatcggacatctggatacagcagcaggtatcactggcctaattaaaacgatattagcggtaaataaagcacttattcctccatctatgcattttaatcacccaaatcctcaattacaaatagaaaatagcccgttctacattcctaaaagccctaaagcttggtctagcagaatacgaactgctggtgtttcttcatttggtattggtggaacaaactgtcatatcattgtgcaatcattgcctgactcattagtatcaatcaaacctgaacaagaggtagacaataattttgaatactcattattgcttagtgccgccacaaaaaagagtctaaaaaaacttgctggtgattatgcaccattaataaaaattaccccagcaaacattctggctcataatgcattacagcaaagacaactcaacttaccatggcgcttatctatccccttaacaagtgagagtgatatttcactgttagctttctctcaaggaagtgctgattctttaatacaatatggtcatacatcaacaaataagaaaatagcgtggctattttctggtatgggatcacaatatcctgctatgggtaaatataatatccatcctcaacacaggcctctaataaacgtactaataattgataatagcggggtaaaatgcgtcctgctcgcataa

SEQ ID NO: 292816 - DNA, 981 bp, Morganella morganii
atggaaagtcatgttaatggtgaaatgattgctgtatttgcaaaatatcaagatattcaaatcattgctaaacgatgtcatgttgaattagctgcaattaatggtcataacaacttatcattcgcggggcaacccgatgatatgcaaaaattcactcaaatattaaaagcaaagaatattcgatttagagaaatgaataacgtgtgtgctgctcatacctcttatattgacaatattcttgatcaattgatggaatttactgcgccattatcagccacacaaggaaaaatagccttagtctcaggctatacagggcaattaatttctcaaaaagaacttcaacatccatcatattgggctcagcaactacgcaatacagttatgtatcaagatgctatacaaacgttagtcaatcatggcgtcacccatgctatggaattaggaccaacttctgtattaagtgatcttggtgaacgtgaaggcattactgagattagttggataccaactgccagaatgggagttgatgaaattcagatgaaacaacaggctgcaacagccctatttattgcaggctatgatttatcatggcagtcactgtttaaaactcaaggaagttatataccattacctctctatccctttgaaaaacaatactattggtatgaaaaaaaggatagtgaaaaatatcaaccacaaaaaagcacatttgatttacctattagccaaggtcgtgaaacggcattaaaagcgcttacaacactcgatcttcctcgtttaaactcatttaattcaacacttaccactttgcataattattacgtcgataaaatgatatgctcgtgtttaggccatgagttgaatacccccatgtctgtaatcgatattatgcgagcaggacgcattttaccccgctattatcaattattagtacgtttattagaggcctgtgttgaggatggatattatatttacccatag

SEQ ID NO: 292817 - DNA, 414 bp, Morganella morganii
atgaaaggtaaaataacaatatccagaccatcatatggtgatggccgtgaagtcattaatattcaggtcagagatggtatgtctcggattaagtttcttgaagttgaaattgatttagctgactttagcaaggtattaacgggcctatcagaaactgactgcacgctctctgttaaagggcttgataaagtcggtaaggtgaaggttgtcgaggtgcgctcagcgatatgcccaggtggattgagaaggaaagaagacctggaacaatggctaaaagaaaacaagcaagaggaaggatggatacttgattcttaccttggtaataaatcatctgtcgaatatacagaaaatggttcactgctaagatatcaagtaataaaatatattgaggctgacaatgaacaaatgtcgtga

SEQ ID NO: 292818 - DNA, 351 bp, Morganella morganii
atgaacaaatgtcgtgacaaatcagactttgagattaataaagctgtagctgagcgacttaaatcaatggactatattgataactgcatatctcataatggcgctgtttgcatcgctgattcatgtggaacatcggtaacattcgacccctgcaacaacccggcggacgcaatgccgattgttattgagaatcgcatcagtatagaaagccgcttcaacggccattacgatgagtggtatgccagtctacagacccacaaaatactcatagatgccactggcacaaattattacagaacagccatggaattatttttgctgatgaaggacgcggagaatgagaaaatatga

SEQ ID NO: 292819 - DNA, 468 bp, Morganella morganii
atgaataatggattatcaggaaaaatttatagcgatactaaattgctagcaaaaaaggcaataaagataatagcaatacttgtggctattttaattgctgcgtttgcgataaattttgcttacaatgagtacaaattaaataaaaaagaaagtgcaatactagaaaaagccataccattcacacaaaaatctaaaccgcttgaatttattagaagtgattttggatcatcatcatctctttatctgtggtttatcccagacactgacaggcatgtggtcatacgtgttggcgaaaaatattccgtattttcttcgggaagagtgtcaaatggttctttaacattacatcgacgggctggggatgcgtgcgattattattcaagtctagctttagatgaaaaaggcaatgttatttctgtctcatgtgataacacagagtattatgatggcccttggcgttttcattaa

SEQ ID NO: 292820 - DNA, 354 bp, Morganella morganii
atgtttaaaaagatattattatctattacatctgtttctctgctttccgcgtgcgttcatactacccctatgcctgttcagaaatctcagcctggtgatgcaatgatgtcatgccaatccatagtttctgaaatggaagaaatgagtaatctggtaaaggaaaaagatggcgaattaaatggtcagatagcaaaaaactcagcacttggcgtcacaggggtattcttgctggttcctttgttttttatggatactagtgatgcaaagactgtagagggtaaggcagcaaaagaaagatttaataagttacagcaactctacgctgataaaaaatgtgaagaaacaaagcagtga

SEQ ID NO: 292821 - DNA, 333 bp, Morganella morganii
atgagcgaaaaaacagaatttgcacgaatcgtcccgttatggattcaggacaaggtcactgatttggttgtcagtaccatacagaaagatgtggaagaaatcttgtgcgaaggtggagtagatgctgcaaatgaggcataccggatagctgctttcaggggacgggtaatgaacattgcaatgaccgctctgtttgctgatgcgcagaatgaagtcaccatagagctagcatcgcctgattccaatgcgccgcaatgtcgtgctggtaatgatatcagcgatcagaaaaaagcccctgacttccgtccccgcagaatgccgcttatagattaa

SEQ ID NO: 292822 - DNA, 204 bp, Morganella morganii
atggcgacagtagtcaaatattttaaagtgacgatacacataggtgaaacctcagtcgtggggtactcagcaacgccggatatttataaagaaggtgacaagtttatcacggtactcacatcaccaagtggaatagagacgtacagcatttgtgttgatttggttcaatcattcgcagtcaccccggtattcgacgaaatataa

SEQ ID NO: 292823 - DNA, 150 bp, Morganella morganii
atgtcacaacagagtaaaccgcagggcgacaacaaacctcagccgcctgcagaacaaaaaccaacaccgtctcaggggtcgtctgatttcacaaccagacgcgtaatggtcggagattctgccgaaaatatcaggaaaaaaagtaagtaa

SEQ ID NO: 292824 - DNA, 582 bp, Morganella morganii
atgggcgccgaaatgaaaaatttgccagatgactattttttggatgcggatgatgatctcgttgatttcctagaaaagcagggcgaggactgcatccgtgaaatttatcagtcaaattcggttaacagagaaaatggctacaaactcctgagtatactgatagtcggcatcggctcatcatttttatttttaacacaaagacaacaccctgattttctgagttttggtattatcgtatttaccctgtactggtcgatatgcgctatgtgcctggtgctgggagtgttatcagtccgagtgcgcgggcttatttcagctacgccggattgcctttatactgaaagttataaaaatattaatgacgacaactttaaatactttacagataaaggatactcagggaaaaaagagatattacccatcatgaggagatacagactgcgggatttatgcattacagcagaggagcttgttactgcgaatgtcaggataagaaccaacctgaaaagagtgagaatcgcgacaatcctcactccggtatgtgctatttttatttcagcaattacttactttttttcctga

SEQ ID NO: 292825 - DNA, 267 bp, Morganella morganii; identical to SEQ ID NO: 279145

SEQ ID NO: 292826 - DNA, 405 bp, Morganella morganii
atgtcaggacatccacatgctgaccttatggctaaggcagcagagatagcgaagacggataaagagtggtggaagcactttgagcagtttgtttatgtagcgcctgaaacacaaaaatgggtcgaaacaggcggtgcatttgttttcaatatgaactcagaataccgacttaaaccccgctatatcgacattaacggccatcaggttccggagccggtgcgggaatcaccagaggatggggatgagttatatattgctgacatgacatcctgcagtggagcgctgaggctgatgtggacaaaccacgaagcagacagaagggggcttgcgcgaggcatccttcacctaaccaaagaagcagcagaagcccacatagccgccctgctctctttcacacagaagtaa

SEQ ID NO: 292827 - DNA, 354 bp, Morganella morganii
atgaacaaatatcgtgacaaatcagactttgagattaataaagctgcggctattgaaatgtttgggttgaatagagttatcgagaaaggtgattcaatttacatcgatgaatgtgattgcggtgccatgttcagtttcgacccatgcaacaacccagcggacgcaatgccgattgttattgagaatgggatatccctaatttttgacactgggtgtaaggcatgggtagcaggaattgcttattgggtagatggttgcgagtggcaaataagttacgaggtggaaagaatgaatcaataccgcgcagctatggaattatttttgctgatgaaggatgcggagaatgaaaaatag

SEQ ID NO: 292828 - DNA, 573 bp, Morganella morganii
atgaacaattacgccaccatgacacatttaaaactttgttttcaaaaagaagttattaaatccgatataaaaaaattttcatggctacgattgttacgacgcgcatacaaacacccagaaaggcgattttatttttggtggcgcatagccaattacctataccacaagaacaaatataccgcaattgcgaattatattaatagaaaactgcaatcaaaatattgctgtgacataggaatcggagcaaagataggacatggactatccatcagtcattatgttggattagtaatcgcttacgaatctataataggcacaaatttccatgccagacaaaatacaactattggcatagtgtcatctgatcaaaaaggtcatatatatataggcgacaatgtaacagtaggtgctaattcttgtatcattggtgacaacttaaaaatcggaaataacgtaatgattggtgcaatgagctttataaataaagatatccctgataattgcgtagtattcacacctaaaagcagaaataacattagaatttctttttctaataacaaaaccatacgataa

SEQ ID NO: 292829 - DNA, 1227 bp, Morganella morganii
atgacgcatatttttaaagtacctttcgccattcagggcgataaaaaatctataccggtcgaagtacaggcggacggttcactgtcttacactcagggctatggctacgattatgaacgtgaccaggcaacggacccggcggccaaagatattgaacgcgagaagatgaacggcattttttacgatttgtcttccgcactcggagaagttcagatctttggttacgctaaatggtcggaagacggtgctccttacccgatacgcagtgtcgtgtatcacaataaaaaagcctggcagtcaaagattgaaaataacaagacagaaccggctgccggtaccgcatggacggaactgaaagcagatatgaccgccggggatgtcggagcctacaccaaaggtgaggctgatcagaaatttcagccgctgggtaactatctgtctgccggttacagctactcaaaagctgaatctgacaccaatttccagccgaaaggcaactatgctccggcgggtaattacgccatgaaaggtgacagttacaccaaagaagagggggatggacgttatcaggcgaaggggaactatgcgccggcaggggattacgccgtaaaaggcgaaagttataccaaatcagaatctgataataaatatcaaccgaaaggaagttatcaggcggcaggttacagttattcgaaagctgaatctgacagtaattttcagccgaaaggcaactacgccccggcgggaaactacgcggtaaaaggcgagagttacaccaaagctgagggggatctgcggtatcaaccaaaggggagctatcaggcggcaggttacagctattcaaaagccgaatctgataataaatatcaaccgaaaggaagttatcaggcgtcgggttacagttattcaaaagccgaaagtgacggtcgttatgcactgaaatcaggtaataacatacagtacctaaaagggccgtttgatgttggaagtactttaacaataaatgctgatctgagagggctggtactgacattagtacgtaggtcaggttatgaatgcaggcagcaaacattatgctgtccattggtgtcgggcgaaacggaacaagtcttggcgggtgggaatcaatatattaaaatgcgatttacttactctggtcaacaaaccagtatctatatactctccgggtataatgccaatttagatggtgtctattatagatattaa

SEQ ID NO: 292830 - DNA, 1221 bp, Morganella morganii
gtgtctggggatatactgcgagaacttgtaagcttagttgattggtttatggtgctcgctggtgctagcgatatcttgcacaatgatatagatgttggtggaattgagatagacgactcatatcttcctgaagtgttttattcggtcgaccgggaacaacaagacaagaaatttgctcagatagaggctgagtctcgattggggttaggagcaaaagacaacgatgttgttgagggcgcgtctgaggcgctattgtcttcagtagacctaaaagaagcatttatgactgatttgggatttagtttatccaatatgctcaccactttggttatcttatctcaagcacaaagatacggttttggtgattcccttgctctttcttatatctcatctaaaagtcgaataattcaagtcttgaacgaaaatatagaagagctggaataccaagaagctgagaaaattgtctcgtttcttactctatgtggcaagagtattcgccggttggccggtcggcatgttgaagagcctgatgttccttactgggagcacaataagcgaattcatcgatatgcaattcgtccattggtaatgaatggaacagaactaatttggggagcagaaacagctagtcgtgctcttaatatttggatgtcggcagtaagggatggttatttacctgcagattttaattggcctcacgtcgaaaaaatcattagaaatattaagcaaggtattgaaaagcagcttgaagtccggactaaagaaatatttcttaggtatacaacttatgttgaaagcggcattgattttttcaggaaatttcgcagtgaacgattcgaagatgttggtgattttgatgcctttgcatactggccggagaagaatctattaataacagtagagtgtaagtacaaccaaccaccatacaccgtcaaagattcgagaagactcagagataaaatttttggaaaatcagaaaatgataagaatggacagataagccgaattgttcggcgacgaaagtttgtcgaggataatttcttaagattattagagcttctgaattggccagagccggcaggaaatgtgtatcaacatattgagctatatgtaagtagggacgtgtactattggatggttatccctccttatccaattcaaactgagtttgttgcagtaaatatgcttgacagttggcttaattctaaattgactacgtaa

SEQ ID NO: 292831 - DNA, 171 bp, Morganella morganii
atgaataagagcaagacaattaatccaatgcagctgcgcatgccagatgagttaaaggactacatctcgaagtcagcagataaatgtttaaggactctgcatagtgaggttttgtataggctaatgttgctgagggaaatggaggagaaaggtgaagtcagaatccaataa

SEQ ID NO: 292832 - DNA, 702 bp, Morganella morganii
atgagtgacaatgaagatggctttgctcaacgtctattctctgagagatcaaggctgaacttaactcagcaggagttagccaataaagttgggatatcacaaagacaaatagctgcttatgaagctggtgaatccaaaccaagaataggaaccttaatgaagttagcaaaagctctcgatgtaagcttcatatggttggcaagcaatacaatagacataggcgatgtcaaaattgtcagtatgtcggataaatctgctgatagagatgctactcacatcccattaatcgaaatagataatgtgattccatggctaaaaaacgagctatatagagtaggtgttaatgactatatcgcagtcagtggagatgtgtccgccaattcattcgccataatccagaatgacccagcaatgaacgacataagccgagagggggtttcattccccaccggggctattgttgtgttcgacccaagcaagaagcccattaaagatggtgattttattcttgctattatcgaacacaagacggctatttttaggcaaatcttcatgggtgcaactgaatgtaacctcataccgctggactcacgttatcccactgaaaagatatcaattgatagtatcgataattgtcaaaacttagttattgccgctgttcaggttatcttcagtttgcctgctataaagcgaacttcatga

SEQ ID NO: 292833 - DNA, 189 bp, Morganella morganii
atgacgtgtagcaacaagcactgcgatgacggcattgtatttatcacatgttgcggcggctgggagtgcggctgtatgggtcaaccggtagcggcaacaaactgcaaagagtgtaacgaagagaacagaccgccgacagataagtatgttcttgagttgctgaattacgtcgagtggcttggcgactga

SEQ ID NO: 292834 - DNA, 1515 bp, Morganella morganii
ttgcataactttcctgtcccatatccagatgagttaatttatagcttagttgcgagagctggcattcgctgtgccattatcagctctaaacaattactcgatgaagtgtttggtgaccggaaagtgattgcaacaattgatttgcctagtcatttggcagcgatatctagtcagttgattggtacagggaggtttgatgttcaacagctaatttatgaccatacaatgtttcctgtttacgccccctttattgatgaaagtatcagagttcgagctatgggtagaatggcaaattgctccaagggcgctgtacatcttatgcttggcgcttctgcctccattgttaaaacgtcagatatattccgtatttgtccgatatgtattgcagagcaagagaaaaaatatggagaaagctattggtctagattgtggtatcttccatccttaccctactgccccgagcatgggccattaaaccaatcaagtctctcctaccatgataataggcatacatttcacgcgtgtagccgaactcaatctcgttccgctcaatacaacgataacagaaagacagaacaattattctatttagctaaaaaagctcaagagctattgctcttgcccaaccagcaatccccaaccaagcatcagtggagccttttctacaatcatttagcgcacgattttggctgtggaaaaggcaggaaacaagtagatcacgagaagattgcggatttagttacaaacaaggtcgccatttctcaattagccatcgatcttggaagagatactaattggttacgcacaatatttcgttgtcaccgtaaagcttttagttacttgcagcatttaaccgtgtggtcagctttcattccaggtatgagtgttagtgaaatcattaaagaagttaaaacaaaagagaaaactagtgtaattgcccctaaaagctatgttcaggtgggggcgaaattgtgcgaagaaaagcggaagagatggaagatccttataagcacaatgccgataaagacagcacgctcgttttcaggtggcggtgctctgtatgcttggctataccgaaatgacaggaactggttattggcgttcaatcgagtaaatcactcgcaactagttgtgagaaagaagaaagttgactggagagcacgagatcgtgtcttaaccaagcagctcctgagtgttattgaacgattagattctgtcattgaaggcccccgaagatcccaaaattttttgctgaagcagctagaggattacggaacagtgagtaaaaaattgaatttattgcctttgttgtcctgtactttgaatcgatatcaagaaagtatttttgagttccaagctcgtcggcttgccactactgtaatcaaaacaaaacagacaggtgaaggaatgaatcgctggcaactgatgagatctgcgagtctctcaaaagaacgaatattgccgattgtagacagccttcttgattgggctgtttcgggatcaaaattaaaataa

SEQ ID NO: 292835 - DNA, 699 bp, Morganella morganii
atgacaagtttagaaagagaaatagtttccaaaaataataagctaggtgtctggattaaaaaggagtcggaaatattaaatgagttgtctaatttaggttctttaagtgacttgcagttattacaaaaagatataaataaactatacgaaagcaaaggtagttttgaaaattcattaaatcaaatagaagaatatgaatcaaaaattaatactctcagtattaaacttcaagatatttccttaaaaatagataaatatataaatcagtttgatagtaaccttaaaatattcaataaatatttttcaaagtacactcgccaactttacaatgaagaatttatactcagttatgaatataagtctgatctatttcaatttactattgatcctattggaaatacacaatcacaaggtaatttaggtgatgggaagaaaaaagcacaagtttctgcttttgatcttgcatatctttcccttcaagaggaaatatcatctaggtttatacgctttgttgcacatgatggaattgaagcaatacatcagaatcaaattaaaactctttttgatatcgctgctaagattgacggacaatatataatagctatattaaaggataaattagctagcattgatgggaaaacgatggctgaaagtactattttagaactaagtgaaaacgataagttctttaaatgctag

SEQ ID NO: 292836 - DNA, 240 bp, Morganella morganii
atgattatttccaatagcattaaaccacagaatactatttattacttaggtgcaaagttgattcaatgtattcagtctcagtcatctaaaatattggatagcataattttatttgagaaatttcaagagatagttccctcgaaagtaagtttcgtacaatatatgtatgctttaaactggcttttccttctcgaccttttagatattaatgataaaggagatattgtcatatgtttttga

SEQ ID NO: 292837 - DNA, 600 bp, Morganella morganii
atgaataatattcaacaaaaaggtggaatgggttcaacaaatatacagaataattatttaacatcaccaatagatattgtgcgatctccttctattttcatgaatcttgttgaaataattgcgtcaatggataattatcaagatcttagtccacaagatgatttttccacctatgatattgagggtaaaattgattttaatgacgttataaaatacagaagtagaatagaagatttttatctatacaataatatgattgaaaagtcttaccaagctctaaatgaaaagatgccaacagctagagaaaagtcgttaaacagaataaaccaatattatcgtgactgtgttggtgatcttaaaatagaaaataaagcatatctgaaaaatatagaatgcaaaatagaaaaaaataaggcttccttgcaaataataaaagataactcagataaaataatcagctatgttattgaaaatgtaaagaaaacatgtgttggtgctttaaattctacagcggtttcgattgaagaaattgaaatgcacgctgcatgtatagttttccatgcttttgtggaatgcaaagtactggaaaaaccattatga

SEQ ID NO: 292838 - DNA, 249 bp, Morganella morganii
atgattaagttagtcattcgatttttgaccttgataggctcgattatagccttcgtagcagctatttcattgaatagtaataatttgtattttacgtctctgagcttgtttattggttttttaggtaccctaattaagactaaaaaagaagcaaccacccaaaacactgtaaaacaaaagggtggcgctttttcacaaaatactcaaaataattatttctccggaacaaatggagataacaaaaaatga

SEQ ID NO: 292839 - DNA, 618 bp, Morganella morganii
atgcttaagcacattcaagacttgtatcgcgggagccgtattcgtgaagcaacgttgcaaagtgtggtggatgaatacagtgatttcgcatctgcctatcgcgacattgaaaaactgaaaagcacgcttggcgggtcttttgataccttctggcagtattttgaagacaacttagaagccttgttaacctggcaagtgccgaatgtgtttactatcgagtatcacggcaaagcactggcgcaccactcgttggggcaaagggcatcggcgttgatgctgtttgtgttaagtcagcaagaaaacgacgtggtgatcattgatcagccagaagatgatttggacaaccaaactatctatgacgatgtcatcaagttgattagagagcttaagccttctacccagtttatcttcgcaacacacaacgccaatattccggtactgggtgatgcggaacaggtgattgcctgtgagtatcaagatgaccatatcgcattagttaacggcagcattgactgtgctgacgttcagcaacgcattgtaaatattatggaaggtggtgccgaagccttcgagaaacgtaagcaggtatatgaagcatggaaaccgaagaactcttag

SEQ ID NO: 292840 - DNA, 651 bp, Morganella morganii
ttgcgtatgccaaataatgccgccttcccgccttgcgatatggcgttttgccgcttcaataccaaagaattgattgtggcgacaggtcttttttatacccgcatcgaaaacaataaaatcatggataatttgcagcaagcgcgctttgttacacacgcgactcaggtgaaaatcgagtttatgttcgtatgggttggtgcaatcttccttccactcaaggtagtgcttttctggtgtctcaatcgtgccgtaacgcaagccttgcgtatcgctacccgccatcaccagttgcatggtggtaaagaagttacggataaaatctttcttctgattatcgaggttctggcgaatcccttcagagacagacaccgaagagcgtttcagctcaatcacgcccagagcaataccgttaacatacagcactatgtctgggcgttttttgttctcgcccttaatggacacttcttcggcaatggcaaaatcgtttgcttctgggtttttccagtcaatcagccacacggcgtaacgcagcaggcgataaacctctttgttggcgtaatagagctttttgccttcgcccagtgccgctgccgtatccaattggcgaatagcacgattgatcaacgcctcgctgacaccgcgtttttttag

SEQ ID NO: 292841 - DNA, 1623 bp, Morganella morganii
  misc_feature (1449)..(1477): n is a, c, g, or t
atggggaagaaatctagagagaagcgagagcgaaggcttaaacaaaaagaagcgcattcgttaataggagagatacaaaaaaataatcctctcttctataagtcaaaaaaaaatttgtcaggtagatctacagaatttaataagtctctagatgcaacaagagcttttcttcttcagtacaattccattgatatagctctcgctttaaatgtttctgagctatggccgtcaaacttaggtagcccagtaaagcatatttttgcatggcgtgttctgttagaacttccaattgataacctacccaaaagatcaattgccaactatcaagattttgaagcatttcttaagaggctctatcaaatttggccagagtttccaatgcttgaagactactgccctgaggctgattggggccaagtcaaagtcaaactagaaaacacgtttgttccaatgttctatggtagttgtattgaacgcactcccgactttatagaagcatttcgaatcacttatttagatgaccctatagcttctacgaatatggatatttgcttatctttgcaagcgcgaataatcgaatctatagattgcgtaagttatagcgcagaggcagctgcacgcgctcaggtggaaattcctaccgaggaattttggcttcaatgtgtagcatcaataaaacagatagcttctactacatggagtagaaatttagcagaaggactggtgacacgagtaggtggttttaactcaccgctgaccggtagcacttttggtgaagaggtgatgcagggggaagctttaccttatgttgcaatagaaattgatgatgttttaatacctttatctatcagaagtggaccgagtgttgtcattgatttctgggcaaaaaaggacagtgttactccaaatacccattctcatagacagcttgctaaatatgtatgtgatcggtttccgagaacactttctgggcctattactctttatgtaggcaacattgcagaagaaaatcttcctattagttgtatttttccaacttcgtcaacatcgtacttcgtttgtatgtgtaaccacactgaatatcaacaagtcgaaaaggcagcccaaaatacatacacgagggtaaaacaaggagctacactgaaatttcgtttggcaaatggcagcggttttatgttgtcaaaagacggggaaaacggcccaaatgctgatgaaatccaaataatcatagtgctgactcaagataatacagccttggggtttattgatgcgcctcaaaagccaacacgtttattgcctttgactgacttcgtaactatcttcgatagtttagatgagccaaacgaattggatcagtattggcagttcgtggatgcaaatcgtaacaggcttagccctctatcttctggcgccgcagatttatttggatcttttaaagacactcacggnnnnnnnnnnnnnnnnnnnnnnnnnnnnnatcatggggaacttcttggcgttttaaaactctctctgacttttggtctcttgctccaaaatatttcccagatggttcttctttatggaaattggcagaaagcacaacgggagtcgttactcttcaatcacgaaacaaaaaactag

SEQ ID NO: 292842 - DNA, 357 bp, Morganella morganii
  misc_feature (336)..(345): n is a, c, g, or t
atggccattaagaaaaacgaactatactcctcactatgggccagttgcgacgaattacgcggtgggatggatgccagccagtacaaagactatgtactgaccatgctgtttatgaagtatgtatctgataagtataaaggcgacccatacggtatgattgtcgtgccacaaggtgccagttttgacgatatggttgcgcttaaaggcgataaagaaatcggcgataaaataaacaaaatcatcagtgcgttagccgaagaaaacgatctcaaaagtgtcatcgatgtcgccgattttaacgacgaagataaactaggaaaaggcaaagagatgatnnnnnnnnnntttccaagctga

SEQ ID NO: 292843 - DNA, 1128 bp, Morganella morganii
  misc_feature (531)..(540): n is a, c, g, or t
atggctgatcacaacctgtttcaggccatttgccgcgtgaaccgcttggatggcgatgataaagaatacggttacatcattgattacaaagatctgttccgctcgttggataaagcgatttctgattatactcaaggcgcatttgatggttatgacaaggaagacgttgcagggctgctgaaagatcgtttagagcaagctaagctcgatttggataatgcgctggaaatggtgcgcgccttgtgtgagccggtaaaagcgccacgcaatacggaagactacatttattatttttgtggtaagtcaggtctgaaccaagacgagctcaccgagaaagaagcactgcgtttaacgctttatcagaacgttgccaaactgctgcgtgcgttcgccaatatcgccaatgaaatgcctgatacaggctattctgcgcaagatgtagacttgataagagcagaagttgctcattttgaaaaagtccgtgacgaagtaaaactggccagtggcgatttggtagaaatgaaacgcttnnnnnnnnnncgccatttgttagatatgtatattcgtgcggatgacagcgaagtactgatggattttgaagagctagggctaattgagctcattgtcgaaaaaggtgctgatgccgtagaggctttgcctgaaagtattcgtaagaatcaggaagccatggccgaaaccatcgaaaataacgttcgaaaaattattgtcgatgaaaatccggttaaccctaaatactatgaacagatgtcagtattactgaatgaactgatcgaacttcgtcgacaaaaagccattgaatatcaagattacctcgagaaaattcgcgaactcgctgctaaagtggtacgtcctgaacaaatagcatctaattaccctgcatcaatggatactaatcccaaacgtgctttttatgataactttggcaaagatgaatggcttgccaccaaaattgatagtgcaattcgttatacgaagaaggccgactgggttggagatcgttttaaagaacgggaaattgccaatgccattcgagaggaaacagctgattatgaattggatattcaggctgtaatggaactcgctaaagctcaaaaagagtatcaatga

SEQ ID NO: 292844 - DNA, 354 bp, Morganella morganii
gtgcctgttgtgatcggcagcaaacgcgggggattgctgcaggttattttcggggcggtgatggtggcagctgcgttctggaccggcggtgcgtcagtggcagcatggggagcgctgcataccgggctggccatgaccggtgtatccatgatgctgggcggtattatccagatgttgtctccgcagccgggcggtcttgccgtgaaagaccagggcgaaaataagccatcatatgcattcggtgcgccggtgaacaccgtttctcagggctatccggtaccgatcggttacggtaaacgccgcatcggcggcgcggttatctcagccggaatttacgtcgaagatcagcagtaa

SEQ ID NO: 292845 - DNA, 231 bp, Morganella morganii
atgaatacaaatatctcaaactcagaattacgttcaaaacttcttaaactccatggagaatcttctgatcgcttagttcgtgaaaaagagcgaaaaataatcacatcgatatcccgcacaaccacatggaaactggaacgggaaggtaaattccctaaacgtaagcagcttggccctaaatcctgtgcctggttgttaagtgatttactgatatggattaatgaaaagtaa

SEQ ID NO: 292846 - DNA, 363 bp, Morganella morganii
atgtcaaatatcagagaattgagttttgatgaaattgcattagtcagtggtggcaacgcaaacagtaattatgaaggaggcggaagtcgtagtcgtaacaccggagcccgtaactcactgggacgaaatgcaccgacacacatttacagtgacccgagcacagttaaatgtgctaatgctgtctttagtggaatggttggtggtgccattaaaggtggtcctgtaggaatgaccagaggaactattggtggggcagttatcggccagtgtctctccggtggaggaaatggtaacggaggcggaaacagagctggttccagtaattgttcaggaagtaacgtcggtggtacctgtagtcgataa

SEQ ID NO: 292847 - DNA, 462 bp, Morganella morganii
atggatgaacgttcgagccagtttagatatagtaaatacagcgctattatttttcttgcagtggttattatatcaactattgtaacattatcgccaacctttacactgcgttatgttggactggatattgcatttttcattgtgttcattacagagattctaatttcaactcttgtttacttattttacctaaaggaatttcctgagtgtagaataaaaataagaacagactcagctacagttaaattttcagccctgtcattccttataattattctgatacagttagctgtttactgctacagagactatttatatcattacgaaccatcacagataaactggataacagttttagtgatgacactggtcgtaccctactatgaggagatcgtatacagagcctgtgcctttggatttctgcgttcaattttcggtaatggtgccaacttactgatttag

SEQ ID NO: 292848 - DNA, 267 bp, Morganella morganii
gtggcttccatctccatcagttgtccctcctgctcagctactgaaggcgtggtgcgtaacggtaaaagtactgccggacatcagcgctatctctgctctcactgccgtaaaacatggcaactgcagttcacttacaccgcttctcaacccggtacacaccagaaaatcattgatatggccatgaatggtgttggggtcagtttggagatcggaaatttttgtacgttaagcacattatttaaccaattaggatacgtaagtgattga

SEQ ID NO: 292849 - DNA, 765 bp, Morganella morganii
atgatacggcgaccaccgagatctacactagatcgctcgtcggcagcgtcagatgtgtataagagacaggtcattggtaaaatacaagagaaactactttctattgaaaaaataagtaataacaatcatataagtgagcaaataaaagaaataaacaaagaattgatgccgctgagaaaatattttgaaaataaaaattttgatagtgatgaacacattacctatctagcaatcaataatttgatagaaaaatatgcagataagtttagccttaaacgtagtggagaagttaaatttgataaaaaagaattaactctgagtttctttcaccctaatttaaggaaatttgaatatctctgggaaataggtagtggcgccaattggatggggtatcatatatctacatttttagcattccacgaatatttttctaaagaaaaaaatcaaaaattgccaccgtttagttttttagttatagatcaacctagtcaagtgtattttccaagtgctgaatctggagacaatattctagatgatgttaataaaatgaaaaccataaagaatactagagaaaatgatattagtgccacaaaaaaaatatttgaagtactagctcatgctattcaggaaaataactataattttcaaattattgttctggaacatgctgatagaaccatatggggagatgtaaaaaacatccatgaatcagcacactggaaatatgagaatgatggattaattccattagaatgggttaaatga

SEQ ID NO: 292850 - DNA, 825 bp, Morganella morganii
atggaaacgggcgtttatttagggcttagcaacgaggactatcacaaggatgaagcgataggttctacgtcaataaaggcgatcagcgtcagccctgcaaatctgtatttcaatccatttaaaggaagtaaatcggcacagattggcacagcaattcacgcagcattgctggagccgcaggtatttgaaagggatttcattttactgccagacgtcaaggatcggcgatcggcagaatacaaggacgcattaaaacagacggatgctgaaaagatactggtgaacggtgaggttgaaacaatacaaaggatgattgaatcggccagcctgaacaacgatttcactgattacatggcaacccccggacaatctgaaacatctatgttctccacctgcccggaaacaggactgaaattaaagtgccggtttgacaggatgtcagactcatacccttacccgcttgatgtaaaaagttgcatggacgcaacagaacgcggtttcagtcaggctttcgggaaatatcactatcatgtgcaggctgcattttatttgtatgtgctgagattagtcacaggaagggacttaaatcagttctgttttttcgccattcagaataagccgccgtacaccaactgcatgtattacatcggcgaggactcgctggagctgggaagaaaggtaatgttcgaatctctgcacacaataaaacagtgcattgatggcgacataccgaaaaccgaaggaatggttttgccatccagcgaaataaacgtgccatcttatcttttcgatgatgaatatcttgatgacgaggtatatctctaa

SEQ ID NO: 292851 - DNA, 582 bp, Morganella morganii
atggatttatcaaaaacaattatcccgaaatcggatcagcttaatttcgaagatgtacaaagccagccaattactgcggtaattaaatctgtccgtgaaggatctaaagatcagccggtgtttattgaccttgttgggtatgacggcaggccttataagccgtcaaaatcaatgcgccgcattcttattggcggctggggaaacaacggtcacgaatgggttggaaagtcgttaacgcttgttggagacccatctgttaagttcggcggcgttgctgttggcggaataaaggttcatgccatgagtgatgttgaggctgatttttcaatgatgctgtcagtatctcgcggcaagcgcgtagaacatcgggtgaaaaaactggaagttaatccgcccgaaaaaatgcaaaaatcaaattacgaattgctgtcagatttcactgccaaggtcggcgaaatggagtctgaacaattcgaaagatcatatcaatggctgaaaaataaatttactggtgatgcagaaaacacggaaaagttggatgtcgtgtaccagagtcacaaggctgatatgcaaagccaataa

SEQ ID NO: 292852 - DNA, 321 bp, Morganella morganii
atgaacaaatatcgtgacaaatcagactttgagattaataaggctgtggctgttaatattaatggcactgacgatgttttagaaaagttcggtagaatatatatcagtgatggcgatagaggtgcgatggtgagcttctccccctgcaacaacccagcggacgcaatgccgattattattgagaataaaatcgacctaactcatctcgtcggtgacatggtgtgcgcaaagcacaaagaatattggtgtattcgtaaaaatccataccgcgcaggttgtgaggttttcctgatgatgaaggatgcggagaatgaaagctga

SEQ ID NO: 292853 - DNA, 801 bp, Morganella morganii
atgaaaagaaccatcctgaaatgggcaggttcaaaagtcggcatcatggagcagttacgcccttacctgcctaaaacaaaacgcctggtcgaacctttcgccggtttctgtgccgtgatgatgaatactgattatgaacagtatttaattgctgatgtaaatcatgatttgattacgatgtatcagcaaatagcctcagataatattggtacggttttatgcatggcccgcaacctgtttgaaatggaaatatttcagaacggatattatctggaaagagaattttttaataattccaggcatgtattacaaccggaatttatcgcagcctattttatttatctgaatcgtcactgttataacggattatgccgctacaacaggaaaggcggatttaatgttccctgcggacattacaaaaagccgtattttccggaagcagagatccgcacatttgcggccaaagccgaaaaagccagcattcagcacctcgcatggcaggacactttatctctggtcgattttgaggacggcgtgtactgcgatccgccatacatgggaaccagtttcacgcagtatcacagcggcggtttcacggatgcagacaatgaagaactggcctttgccctgaaagatttgaatgacatgcaggggactccggttacggtttccaactcgccggccgcaacagaactgtacgccgatttaggcttcaccatccatgaaacagaagccgcacgctcaattgcagcgaacgggaatcgtaaaaaagcacgtgaaattatcgcggttctgaattaa

SEQ ID NO: 292854 - DNA, 684 bp, Morganella morganii
atgaccattaaaattgaagtgacaaccgatttaattatgagtctgtatgagcagctgaatacgttatttccgtggcaaaaacgctggtatgagcaacgttttcagcgtgcccgtgatttacataaaggccgtgagattggtgcggactattattttgcacttgaagccgtgcttgatgcctgtcttaccgggagaaataaaatatttatagagtataaatcaccagatcctgaagatgattttatttcaaatattgctcagtatatcggcctgtttttagggtgcaaaatagcattaggaaccggaataattatgctgagcaatggagctgagatcaggtttttaccagatgataataaaacatgggctggtttatgtggtgatacgtatttatcagagtgggcttatttttctgatccgtggaatgcaatccatgcagcatacggggtgacggcaaatgagaaatggcggttaacgttttattcgtcaattgatgaatttgcctccggaaaagatattcatttcagcggtaatagctggtatcacgattcagtaccatttttgccgcatgagtgttcatcgcatcactgtagaaaaattgacgatctgcgcccctattattcggatagttattttcggcaggcgtatttgtgtcagttaccggaatggagtaagccactatga

SEQ ID NO: 292855 - DNA, 237 bp, Morganella morganii
gtgacagataaagcagaacagcaggcgagtgaggttgctgctgccgaaagtcagaaacagtcattactggcagaagctgaacaggaaattgccatgctggagcgtaaaatacgcctcaacatggcgactgacacagaccgggcaaaactgaatgagtgggaaattttcagtgtgaacgttgctgataccgacaccaccaccgcaccggatatcgactggccgcaaaagccgcagtaa

SEQ ID NO: 292856 - DNA, 204 bp, Morganella morganii
atgaattttactgacttaccagaaaaggcaagagaacaggcttatatcgctctgactgaaaggctggggaaagcaaaaaatggacatgggtttgcttgcgcaaaaaaagacgcatctgttgtcgctagcgcctttattgagttgtaccgttatagcggtgagggcattgccggaagatttggtagtagcgttactggtcagtaa

SEQ ID NO: 292857 - DNA, 294 bp, Morganella morganii
atgaagaaaattcttgctcgtatcgagttatacggcgcagatgaagctgattatgagtcgttacatgaaaaaatgcatgcgcttggatttgctcgtaaaataccgcatggtgatggcacctatgacagattaccagatggtacatatgtagcagaaaaagattatgacctattcgctatcagggggaaaatttcagggatagcggatcagctcagcagaaaacacaatgcttctgttttcgtctgttcatttacggatagcacgtggtacctgtacctggcaagagattactga

SEQ ID NO: 292858 - DNA, 408 bp, Morganella morganii
atgaaagacgatataacctgtgaaatactggcgctgtcacaaacctataataacggtacggagattaccgatgacacaacagaccgtgagctattccggttgatagcgttacacaccactgcattaattaaaagaaagagtcagtctttaccttttagtgcgtactgttttggtgaaaaattacaaataaaggccactaaaaccggtcagttgttttatgaattaatacaaaacattatttcactttcccgtgttaccggcaaccgtcgtaaattacatccggttattccgctgattgtttctctggctgagaaatatcacattcgttatgttccgatgctgtcggaatactatcctgactcagaggaggatattaaacagctaaggaaggtgcgaacaagtccctga

SEQ ID NO: 292859 - DNA, 699 bp, Morganella morganii
atgagtttgttcgacaagttagtattcccaacaataccagaacctttgtatacctttggttttacttacaacctaatgtgtgcatttattaatcatactgaagaagctattgatgccagcattgcagcctataaggagacaggtccatccgtcgataaaatagagatttgtcctaaagaagggatttatcaatacgcatatcattatcagggactttatgagcacattgatgatgtaatcttggatgatgtagcagaaaattatttcccaagtcttcagagacgctctgctttgctgacactaattgcaacttatgagcatgaactagaaaagttttgttctttttattccaaagaacataacacacctgtgaaactaaacgacttgaaaggtagtggtttagagcgcatccacctctttacgacaaaattaattggtttaaaaaactctcaagcatttccaatgattaaaaagctcattaagttaagaaatagctgcgctcataatgatgcaaaggtcattgaaaatgatggtcaaccgataaaagcgatcaaatatcttatcgaagatcattcaatgaaaatacgtcaagatggtcaacatgttcttatcgagaaagaatttttatctgatgttttagaagtgctgaactcttatgttgcagagattcagaaagaaattgagaaaggtaaatcgtag

SEQ ID NO: 292860 - DNA, 1164 bp, Morganella morganii
atggtgcctaatggttgggaaaataaaacgttagaaacattatgtgaacctactgctcctatcacttatggtgtattaaagccaggagactatgttgatggtggtactccgttactacaaattaaagatttgctaaatgacttaagtgacattgattccttacatcgaatttcacctgaattagatttggagtacagacgatcaagaattgcaacgaatgatattttaatttcattagtcggaacagttggacgcataggtctagtacctgaagagcttaatggtgccaatattcatagaaatttaggtcgtattagaacaaaaaattataagtttttagttcattatctgaattcagatatagctaaaaataagattggtttatcttcatctgggagttctcaatcagcactaaacttatctgttcttagagctttgaaggtacctgtcccaccactcccagaacaacacaaaatcgcccaaatcctttctacatgggatcgcgggattgtaatcacagaaaagctgattgatgccagcaaacagcagaaaaaagccctaatgcagcagttgttgacgggtaagaagcgtttggttgatcctgaaacgggtaaagcgtttgagggggaatgggaagattctactttaagcaacgtttgcaagattattaaaggtaagcagcttaatcgctcaacattaaatacgacaggtaaataccctgtaatcaatggtggtatcactccttcaggttatacagattcatctaataatgttcgaaataccataacgattagtgaaggtggaaactcatgtggatatattgactaccaaaaagcagatttttggtgtggaggtcattgctatagcctatctaaagtaaccattgataccaaatatctgtaccagtaccttaagcacaatgaacaaagagtcatgtcacttcgggtaggctctggtttaccaaatattcaaaagaaagcaattgaaagcgtgccagttttgtatccatccgagcgcgaacaacaaaaaatcgcttcagtgcttactgctgccgacaaagaaatcgagttgttagaagccaagcttgcacacttcaagcaagagaaaaaggcgttgatgcagcagctcttaacaggcaagcgtcgcgtctccctgtcatcttag

SEQ ID NO: 292861 - DNA, 627 bp, Morganella morganii
atggttgtaagcaatgaccagtcagcgtcttctgaacaagagcgaacagtaacaatcgcacttgcagaatgcgtcacaatacaagctggctacccatttcgaggggcgataagagatatcccaagtggaagcgttagagcggttcaggcgaaagatatttcaccgttaggtgagctacaaaccaatgatttgattgtgactgacctaacaggtaagcgtgatgcggattggttacagcaaggtgatatcttgtttagtgccaaaggcagcaagcacattgcgtgttatgtgcatgaagcactagagaggacaacctgtgcgccaagtctgtttttgctcagagtgaaatctgagtggaaagagaaagtgaaccctcagttcctcacttggcaacttaacctgattcctgctcaaacatactttaaacgaagtgctgaaggcagcttccaaataagcatccgtaagcctgtgcttgcggcaacgcctatcgcgctgccaacgctttgtaaacagaacaccattgccaagctctatgaagccagcatcaaagaaaatgccttacttaataagcttataaacaaccgtcagcagcaactcaatgctattgctactgatctgcttaaataa

SEQ ID NO: 292862 - DNA, 450 bp, Morganella morganii
atgaaaagaagtctgacactgcttggttgtttactgctgtccgccccggtttttgcactacgcatgcccggtgaggtacagcctgaccgttacacttattacctgaccccggaatacgggcagcagctgaaaatgcagaacgacggcaaaggccggaaatctgcgtttcagccacttcctgccggagagctgaggagtgagaccagagcggatttgtccaaaggctatccggctccggtggccatgacctgtatcagcagtatttactataacaccggtgcccgggccaactggctgaaggtgggctgtatcgacaataacggtctggagtatgaggcaaaccagaagtggccaccgaaatccgtcgcggagcgggtctgtaaagccggagagggagactgtgagtccttcctgcagatggatactgacagctggtccggcccgcagtaa

SEQ ID NO: 292863 - DNA, 213 bp, Morganella morganii
atgtctgtttttaaattaatggccaccacgctcggtgtggcggcagtggctgctgccacctattgtgcctggaagacggcggcggaggcggtggataatgaggatgccacggccgcagaaaagctggcggccggactcagtgcggcactggcctgctcagccgtgctgggcggtacccttgaccgtctgctggggcggctctttccccgctga

SEQ ID NO: 292864 - DNA, 126 bp, Morganella morganii
atgttattcattgtttttttaacgataaattactgtgcttttgagtttgtggtgattaaaggagaatgcggggaatccgatagtataaaacagggattatataatgagcccattgtatatccctga

SEQ ID NO: 292865 - DNA, 444 bp, Morganella morganii
atgaataaatcagtgactgatatagtggcacgatgccgtcataactgggcggcggtgatggccatactggatattcccctgccaccggatggcagacacggcccctgtcctgcctgtggcggaaaagatcgtttccggtttgatgacaaagccggtcgcggtacctggttctgtaatcagtgcggccacggtgacgggctggatctggtggcactggtaaaacagtgcagtttgtccgaagcggcgcaactggcagaaaaccaggtgttggcagtgtcaacaccgcccgccagggaaaaaaacccatcaccgccgggtgccgcaggagagaatcagccagctcctcagccacagcgaaatgcgcgaaaatccttatctcacggagaaaggactctctgcccggttgccctgcctgaccgtgcagcaaaccctgcaaatcagtga

SEQ ID NO: 292866 - DNA, 1731 bp, Morganella morganii
atgaactttcaagctgagccagtgacgataaatgcactattgtcagtgagtaaacaatacttcattcctagataccaaagagagttttcttggacaaaagagaacattgatgagttatggtctgatttagttaactctgtaagctcgacggagtcaggttatgattgtgaagaatactttatcggtacgttggttttggccggacgcgatgacaactttgagattgaagttgtagatggccaacaaagattgaccgtaatcacaatgttcatttctgctttgtgtagggcgttaaatagtgcaggtgaagttcgtgctgctcaatcaacatttgaaacatatataaagggcatagaccgaagaggtaatgagtttgcaaaattagacaagcgttctacgacaaattttttccagttattagttcaagacctagaaccacatcaatgcgaaccgcaatctgaagaagatagtcttgttaaaaatgcttttgatcaaatcactaggcttgtagggaagccatcgttaaaaaatatatttagtttgactggcagagttagtaacgaaaagtatatagaagttcttaacgtgcttatagatttgattgttgatcacttgaaagtcattcgagtaaatgttctgaacagtgatgatgcctataccattttcgaaatactcaatgctcgtggaattaacctaagcccagtagatcttataaaaaacaaagtattgcaagaatggggaacaacctatcctattgattttgccaaaaatagatggaatggcatcgttgctacattatcctccagagaggtatcagtaggtttagaggagtatacaattcaccattggacgaccaaatttgcttacactagtaagagaaatttatacaaggcgttcaaaaaacaatgggatgcaggtaatttaattgctgaggattatctgcaagaactgcatgacgacagcctaacttatataaaaattgtttctcctttagcgacagattggccacaagcggaccaaagggaaatttttaattctctgagcgccttaagagtgttcaacattagcataatgcggtcgtttcttttgtcactctttaaggcacgtcagaggagatttgtaagacaagctcagcttattgaaactttagggaaaattgaaaaatttcacttcatgtttaatgcaatttgtagcttgagaccatctggtattgaagggctatacgcgaagtctgcacgaaacctttcgagcgcagtaaatacgagagaggcaagaaaagttattgatgagcttttaacaactttagaacagaaaaagccgactcaagaaaacttcgtagataaatttgctaagttacagtttgttaacaggaacacgtcacataaaaaactgattcaatatatctttattaaatttgagcggtctctgaggaatagtaacgagtttgaacctagtgatttatcgttggaacacattttaagccaatctacacctaatgttgatgaaacaataataggatctataggaaacttattgcccttaggtcagagtttgaatggtcaagcgaacgtcggtaatttttctgctaaaaagcaaatttatcagcaatccgattttcgaattgtacaagagttcttggcttcagagacacaaagtgattgggttgttgataatataattgatcgaacaaatacactggctcagcgagcatataacgatgtatggaattag

SEQ ID NO: 292867 - DNA, 366 bp, Morganella morganii
atgaacaaatatcgtgacaaatcagactttgagattaattgccaagttctggaaaaatttgaaccagatattaaacacatgtgcttaagccatgatgaaaagtcattttatcactgtggctttgatggtaatggattctatgaaactatcattccagactattgcaataacccagcggacgcaatgcagattattaaagataacctaatatcactcgaacatgacggagtggcatggcaggttagctgtgtgcgccatcctgaaataagcgtttgggatggatgcgaaaactacaatgataatttttaccgcaaggctatggaattatttctgatgatgaaggatgcggagaatgaaaaaatatga

SEQ ID NO: 292868 - DNA, 366 bp, Morganella morganii
atgagacaaattaaaataagctctggcgcgtggcaaaaagatttagaaatggttgtcactgttatcgatgaggataaatttaaaactcagtgtgagcaagttaataaattttatggtgatgcagagtatagagctaagagacacggaagccatgaaaaagcgggtttcgccatgttctgcgctgagtgttttcaacaaatggcattcaataattttaaagacgaagaatggctgactgagcaattcgactggtctaaagataaaggaattgaaggttatccttcgttggacgatatgggtattcgaatcgatgaaattgagtcatggtttattgattataacgaaattgaaattacagggtggtaa

SEQ ID NO: 292869 - DNA, 405 bp, Morganella morganii
atggaagtgtggggccttagcttaaagtcattttacatgacaaacaagaaaaagataaatttcataaaaaaagaaatgctctcaatatacgaatataatcctgacttggtgttagacgaaaaaattatagataattattgcaatcacccaagcctcaagctagatggtgttatttatgaacttggatttgatatatataaatttgtttacaatattacaaatatcatagcagataaatgcagaataattaatgatctagcttgtctacctgtaattaaagatcttgatcatacttatactgaaagtaataatatagaaaaaaaagatatgtcatcactagttggaattacaccaatactaacaacaaaaggatatatctacgccaaaaaaatatctatggcgtag

SEQ ID NO: 292870 - DNA, 135 bp, Morganella morganii
atgaaaaaagatgaaaaaatcataaatccttatggtcagggaaatagtagtgctaaggcaattcatatgatcaaatcaatagataacactacatataaatcattctatgacttaacttttgaaaaagaagactga

SEQ ID NO: 292871 - DNA, 165 bp, Morganella morganii
atgtctgctattcttggatgcatctatatcaatgactacaatctcatcgacgtcccagttaacaaaaaaatcaatcgcggttttaacattgccaattggaaggtattttttgaaaccaaaactttgaacaacaagttcattttttgtgataatacatggtattag

SEQ ID NO: 292872 - DNA, 438 bp, Morganella morganii
atggatgcagtagagttaatattctgtaaatcaattaattactttgattatacttcagttaacccaaagaaaaccaattacatattaatatcgccaagtgacgataattttaatgactttgggaaaatcacctcggttttaatacgtgcacaatttgaatatgataaggttgagttccgtacaaaactagcaattctcgacgtaaaagaaagcaatcaagagcttactctagtagagtattttaataaaacaaataataatgatagtctaatatatccaaatgatgatatactttatttttcgcaatgccagtccctagagacttacagatatttgcatcgatgtattggaaaagaaaagtcagacatcattctgactaaaattaatgatctgagcactatacggaataagaaaaagtatctaaataaatttaggtag

SEQ ID NO: 292873 - DNA, 435 bp, Morganella morganii
atggcaagaaggcgaaataggtttagcgggaaaataccaaaacccgccaatgaaatatctggtcgcgtcgggttaagtcactcaaaaaagagtgattctccagaaaataacccaccagtattttcattaagatacctacaaaaagggtattgcctaaattgctgtcaaaaggatgaaaaagcagctttagccgataagctatttacgttaagcaagctatcctggtctgaaattaaagggttgccaaggcacggtcttgggtttgagaaaataaagagcagtagcataaaagcccccataccagcacacattacagatgatgttgatttaatagcctttagattttgcgggctgagcccaatggttggttacaggaacgaatcaacttttttcattgtatggctagataggtcatttacgctatacgaccactga

SEQ ID NO: 292874 - DNA, 444 bp, Morganella morganii
atgcttacttgctttgatgtggccgattatttcttgtcgcgctgcgatgatgaaagcggcgatctcatttctaatttaaaactacaaaaactggtttattacgcccaggggttctcattagccctccttggtgagccgttgtttgaagaaaaaatagaggcgtggatgcatggccccgtagttgccaagctgtatggaaagtacaaaaagtacgggaaagacccactgccgtttgaaggttttgacgaaagtaaatttacagaagatcagcttgaccttttagatgaagtttatgacgtttacggtcagttttcagcttggaagctcagaaatatgactcatgaggaggaaccttggagtgacacctacattgatggtgctggaccaataagcattccgaatgagaaaatggagagcttctttaaaacgcttgttgtgcaataa

SEQ ID NO: 292875 - DNA, 183 bp, Morganella morganii
atgagtaaaaagtttaaggctggagatattgtaagattgaaatctggaggccctgatatgactatcaaggcattcacattaactcaaggtgaagcatatatttgccaatggtttgctggtaaaaagctggagcaaggattcttcaaggaggattctattgagttagtttccccaaagccataa

SEQ ID NO: 292876 - DNA, 192 bp, Morganella morganii
atgaaattcacagaagcagaaacaaacccaatgggtgacaaaattcaatccgtaaccatcggagatatcactatctcacaatttggagatggtcagttgtggcttgaggattctgtcgctgatgactccggctcattccaggaaaaagacgtcgccgacgctctcaaaaagttttaccaaagcaacttttag

SEQ ID NO: 292877 - DNA, 369 bp, Morganella morganii
atgaaaatattgaaaaacaaatccatatatatttatttcttgatatatttactaccacatagcggctattcctttacaagtaaagagatggttgataactttgataaatcagcattttgtgatctaaatcagcgacttgatgataaacatgaatgtaatggcaaaaatatccctaaaactgccattgaggttactggtgtcaatagtgcattaactgttgttcaaaacagcagagatatcagtacgattccaatgctttttaagcacatcgaaagctttatacatatacccgctaactcacaaacaaaaaaagcagagagtgcgatagatagcaccaaggaaaacaatactgatgatagcgcgaagtaa

SEQ ID NO: 292878 - DNA, 624 bp, Morganella morganii
atggtggataaaattccgcagattgtcgttgaatcttcattttcatgggatgtcgctttatctggttttctggccggatgcgttcctgcttttatcgcatgggtcgcgctgaggaacagcaaaaaagataatgaaaaaaatcggatggcaacacttgatgcaacaaaaaaaacggtatatgcgcaaacgcaatctgagcgcataagaaaaaatactgataccgtggcaacgcttgtcgcacactttatgggatactgcacaaatattttgttattagttaaatctaaatatagttcgccaaaatatgcagagattagacttgaattagttcttattcgaaataaattatcaatatttctattgccaaaaaaaacaatttacaagagtgagtatactaaagaggaattaatgaatatagtctctgatagccgtgtgaaattactgtctcagatagagcggttattagatataacagaggattatgacccaatagatggtatgtgtagtgataagtttgacaaaataaccagagatgaaattgaaaatgaaataaatgtcctggttgtattatcaacgcagtatattgatgaaaaaatgacagaattagaagacgttttgctctaa

SEQ ID NO: 292879 - DNA, 1551 bp, Morganella morganii
atgatttacaccgacggcaccatagccattaatgccggttcaccgattgtgaccggcactggtacgcagtggaaaaagaacattcacggtgtggccccgggccagcttatcagcatcgagaacggtatagcaccggtcagcatgatgatccgcgcggtaaacagtgataccgaactggtgttgtcattcaatgccccggtaacgctcagtggtgcgaaatactccattgccaccacagtcccggataccatttcggatgcagcccgcaccatgtcagccaatcagggctatatcgtttactttctccaggcaatgcagcagtggatgacagacaccggccaggtggaaattgagttgccgaacgggcagaaggtgacactggaggatgtaaaagggctggcttcgagggaatgggtcggggagatgctgtataagccaaattctgctgttacccgcgtacaaagtccgaacaaaaggaatgttgttcagctggaagacgggggaacagtcggttttaaagacaccgtcacagacagatatcgttttgcgttgatttcggatggctccacccgctgctttagtgacggagaatatacaggactggatttagtaaagatcgatggccgctatgtgcgactggagacaaatcctcatgcgggtacagcatcaatgcttagcattgtgtatcggcaagctaacggcgaaaaccagcacattgtgacgataccatatgacaccggcgtagttgcgactcgctcctggattcagcaggcaaccggatgggggtcagtatacgcggactatcctccgtatatgacaaatttcactaataccaatttgcctaatggtatgtatagatttaaccagaacagtcaaaatcccccttctgtcataggagacagatttggaagcgttataacaactaggtattccggggatattggacaaaggatagtccttcccaactacggcgcgacgcacatggcgatacatcggtatactggttctgcatgggaatcggtaagggtgttgacatccaatatgtatatcgtagacggcagtggatattataaaaaatcgtcgccaatcgttcagatttaccctgatggccattacgacaccaacgacgaatccgaaggtgctgaagtcagccgcaccggcaccggccaatatcacattaccggcattcttggttataactcagatggtgcctggggtgtaaacggtggtatatcagtaccgaaagacaataacggccttgagttggtttatgtcgatgacagggtgcagagtgacggcagcctgattattgaaacctgtcaccgtcagcatgcgcatttgccggaacgtttccagaactggcggctgaaagacgtcaccccggaaggtgagcgcatcttttatcaggacggtgaactgtgtgacctgccggaatccacccgtctcgatgtacgtgttgaaatgccgcagggctctgtgtggaatgtgaaacagcgcgaactggctgaacagatggagcgggaggcacaggaaatagcggaggagagataa

SEQ ID NO: 292880 - DNA, 441 bp, Morganella morganii
atgacgttatcagcacttctgacgcaggagcccgcaaccatcaaaagcaatctggttcatccccggggcagagacacattctggcggttttatttcggcagcgtgccgggctggcagcacctggaaaacgatatttttaagatgatggataatctgtgtgacatttatcacggtgccttctgggaattcagcatgctcaccaacggtggtgcatttatctggcctgacatgattgaaacgtcactcccgatggttaacccgcataacggcaataatgcggaactgagccctgaagcagccggtatcgctgtctgcttaatgacgttcagtatctggtcatttaacactgagagtcctgtgctggtggagtatttttatcagttgcgggactacgccctgcagcatgaggaatgtgccgctattttccgtcttattgattaa

SEQ ID NO: 292881 - DNA, 285 bp, Morganella morganii; identical to SEQ ID NO: 70433

SEQ ID NO: 292882 - DNA, 171 bp, Morganella morganii
atgatgaagctccgaatgcggagcctcgtcaaagaaaaaacaatcgtcaacggaatagaccgcccagcggtcttttttattaccttcgagccgccgatctcctctgccacattagccacgacctgtgccactcctcacagcgagcgtgtgggcatccagaataatcggtaa

SEQ ID NO: 292883 - DNA, 420 bp, Morganella morganii
atgaaaaaaatattttgggtcattgttcttatttttattatttatgtctctaaccatcgagacaaaaaatctgaaacaactcaacaatcagcagattacgattacgccaaaagcgaactaagagaaaactgtcgcaacgccattagcgcagaaatatacatggctaaggcaatggtttataaaaataacgggtcaaccgttgcgtatcataatgcattgcaaaaggctaaggagtatggggcggaggtcggatatcctgatgccgctgtagaggtgagagtaatgagtaatgctccgcaagcaggactcgcagatctggatgattctgggatcgttatagcaccgcttgttgaggactgtctcattaaacccgggacttatatcatcaactacaaatcggcaccgcctacaaagagctaa

SEQ ID NO: 292884 - DNA, 633 bp, Morganella morganii
atgaaagagcgcggaataattttcagctcagagatggtacgcgccattctcgatggacggaagatgcagacgcggcagattgttaaatcagttccgactactcacgacttccacggctggataatgtccagcacatgcgcgaaagatgaaggtaaagccgtctggtctatcggggattcgcctctacttaaagacccaattcgccttaactgcccacttggaaaaattggcgatcggctgttggtgcgtgaaacatggcaatgtgggttatgcacagagtcaacttttgcgtacaaagctacacataaacccactgatcttgaggagggatggaacgaaaaaattaagtggcgcccatcatcacaaatgccacgctgggcttctcgcatactgctggaaataaccgacgttcgtgttgagcggttgcaggatatcagcgaagaagatgctgtagcggagggcgttgcacctctgcgtggtggttactggaagcattatcagcctgactggactcagcatcagcttggcgcgagagggtctttcgtaacactctggaattcagtttacggtgttgatgcctggtataaaaccccgtgggtatgggttatcgaatttaagcagattcaggaatga

SEQ ID NO: 292885 - DNA, 270 bp, Morganella morganii
atgaaaagtgaaacaaccgaattcagcattaacatacctccagagcttaatgaaaatacacggaatcttgttattgcattcgcagagaaaatggcagccaagctgtgtaaatcagagaaaaaatatgggtactctgataactggatgcagaatgactggagcgatgaatgcaggtctgaacttatcaggcacttacagaaaggcgacccggtagatgtagccaattactgcgcatttatggctcaccatggatggagcacgtcagaatga

SEQ ID NO: 292886 - DNA, 210 bp, Morganella morganii
atgaataaattaactccattattgaatgatatttcaagaatactcgacaattcagatagaccagaatttaccttattgcaacattatgaaatagcgactgaggcacagaaaggaaatgtagtggttgccctgataggaaaactgatagagcagcaccggatgcttaaggtaatacatgataagcccgtcatgcaggagttgacgaaatga

SEQ ID NO: 292887 - DNA, 885 bp, Morganella morganii
atgaaaaacgcagatgcacacagtttacctacgctaattgccgccattctctccaccaaaggtggcgtggcgaaaaccaccgacacggctaaccttggcggctacctggccgatcaagggctgaaagtcctgatgattgacgccgatatccgccagccgacgctcagcagctattaccctcttgataacgaagcccccggcggtatctacgagcttatcgcgcagaacgagctggatccagccatcatcatctcacacaccgccattcccggactggatatcatcatctccaacgatccgcgcggcgaactgatgagcctgcttcaggctgcgcccgacggagtaatccgtctgcgccatctggtacgccagataaccggctatgatgtcatcctgatcgataccattggcgcacgcactatcgcactggaaatggtgctgttagccagcgatcttattatctccccggtactaccggaaatactctccgctcgcgagttcctgcgcggcacgctgcaaatgtaccgggatctccagcccttcactcgctatggtatcccgctgccgccgctgaaggcggtgatcaacaaactcgaccacaccaacgacgctcgcgaaattcaccataacctgcttcaggttctccagcacaaacaaaaagagcaggagctactggtacccaccgagatcctgatgacgccggtttatgccagcgtggcctatcgccgggcggcatctctgggaataccggtgcatcgtctggatacctctcgcgccagaggccgggcaacaccctgcgccgctgaaactatgcggatgctggccgaagagctgttcccacaagttctcgccctgccccatcagccggtggagggcatcgcatga

SEQ ID NO: 292888 - DNA, 375 bp, Morganella morganii
atgaaacggaaaatctggcgagcattttgctcttattacgcccagtatcccttcgagaaagacgatgaagtgatcgtgttctttgaagctgccgatcgtgaagaagcgcgggaaacgctaccggtattaatgtcgctactctggcatatcccaccggaaaaggtggactgctacaacctggaagatgagaacgagctacgggatacgtccggttcgctgaccgcgcccagagactggccgctgtttgaaatcggctggtctaacagtaagccgctctactccagcgatttaccactattacttctgcctccacatcaacaaacccggctgtgggaagcttttctggcctgtcaggagggtaatcgagatgagtaa

SEQ ID NO: 292889 - DNA, 1356 bp, Morganella morganii
atgagtaagcgcaagcggccacaaccgccccactctgtcgaggcggaacaatcagtactcggcgggctgatgctggataacgatcgctgggatgacgttaccacgcagatttccgcgcaggacttcttcatctctgcgcaccggacgatttattcccatatgcaggccctggtcgaacagggaaaccccatcgatctgatcacgctaagtgaatcgctggaacagcaggagcagctcgaacaggtgggcggtttcgcctacttggcagtactgtccaaaaacacgcccagcgccgccaacatcattccctacgcgcaatacattgccagctacggcgagctgcgccagcttctgttattaggcaatgaattgagcgatatggcaggccagccacgtagcaatgtggccgatgtactgacctttgccgaacaaaagctgtttgccattgcgcagtcgcatcaggatggcggcctgaccgatatcagtacctgctttgacaacgtactggaaagcatcgctcagcgctacgaggctgaacgtggcagcctcagcggcacaccttccgggctggaacagctcgatgccctgacctgcggattccagcctgccgacctgattatcgccgccgctcgcccctccgtcggcaaaactgcctttgccctgacgctgtgcgtgaatgcgctaatgctacgccccacgcagccggtgcaaatctacagcatggaaatgtcggcggaacagctgttgctgcggttcgtatctctgattgggcacgtctcacaaacccggctacgtagcggcgatctcagtgatgatgactggcaacagattggcctcagcgccaacacccttatggctgaatggaaaggtcgtctgctgctcgatgattccgggatcctcaccccatctattttacgcagtcgggccagacgctcgctgcgccagtacgggtctccttcgctgatcgtggttgattatctacaactgatgcgcagcggcggcgcggaaaatcgcaatcaggagatctcgacgatctcccgctcgctaaaagcgctggcgaaggaactaaattgcccggtgctggcgctgtcacagcttaatcgggcgctggaatcgcgccttaacaagcgcccctgcaatgccgatctgcgcgattccggttctatcgagcaggatgcggatgtcatcttatttctctaccgagacgagctgtacgatcccaacacgctggatcgcggcattgccgaagtgattgtcagcaagcagcgcaacggcccgataggcacggtgcgaacccggtttatcagcgatcaaacccgcttcgaatcgctcagccagcagggagtcgggtcatga

SEQ ID NO: 292890 - DNA, 1485 bp, Morganella morganii
atgaacaacaagctgacttcgacggaactccagtcccgcctgctacagggcaattttgatcggggaagatcgcccgatgaacggttcgcggatccgctgacagaaacctcgatgatcgtcacgctggagcaacttcgcccttacgatctcaatccgcgactgatgcgtaaccccagctatgacgacatcaaggcatcgatccgccatcgcgggctggacacgccgccgccaatcacccgtcgccccgatcaggagtggttcatcatcgccaacggcggcaatacgcgcctgtcgatcctcaacgaactgtggcgcgaaacgcatgacgagcggttctggcgcatccagtgtctgtacaagccatgggccggtacatccgatcaacccatgctgggcgaactgcgctgcctgatcggccatctggcggaaaacgatatgcatggaaaactcagcttcattgagcgtgcgctggggataaacaaggcgcgggagctgtaccagcaggtggaagagtgtcagctttcgcaacgagagctggcagagcatctgaagaacgacggctatccgatcaaccagtcacacatcagccgaatggaacaggcgctggagtacctactgccctgtatccccgaggtgctgtacgcggggatgggccgctcgcaggtggaaaaactgctgtcattgcgggcggcatcattacatctctggctgcgccatgaggctgaagataccggttcctttgataatctcttttcctccgcgctgtcgctgttcaacgaccagcctgaagacttcgccatcgagcgggtacaggatgagctgctggggctgatgagtcaggagctgaacgttgactacaacctgctgttgctagacgtcgatccttccgagcaaaaacgtcaggccgtgctcggccccacacctgaaccaccgccttatgttccaccggaagaacccgagccgcgaccggcaacgcgcaggcgtaaacctgaagcagaggaagaggacattggcacgccagaccctctgcctgagccagaagaagcgccatcgctattgtgtgaagggaccgaacccgttacggatatctggcgcatcccacaactgtgggataccacggagtccttacgatcggccagcgatcgcctggcgtgggatctggctgaacattacgccatcaatgatcgggtgatttctgacgccaacataaatggcattggcttccaggtgatgccattcgcatcagagcaccccatgttcacccggccacagtcccgcgcctgctgggcgctgctggcggcactcaacgagatcccgctaacggaagatctagcttctgcactgacgcctgggctcttttttcaacgtgacgcaggcggtttcttcttcagcgatgaatttcttattaaagcattccggctgatccgtattgtccgccggatcaaagagttccagcaggaggcacaacatgctgccgacgattaa

SEQ ID NO: 292891 - DNA, 540 bp, Morganella morganii
atgctgccgacgattaatcaggccgttttgtcacaggtgatacaggccctgaaggacggcaatgtgcgctattgcgaagcgctgggctttgaccgcgaggagctgaacgaactgaacgccctgacctttgaagagctaatgcacatgggcaacacctcggcgcagttcctgaaaatcaccatcaaccatgacgtgctgcgcaaaatgctggttcaggtgcgtcaggagcagaaattccagcaactggtcggccaggcggtacagcttggcggttcaatagcgttaatcagccactacttcgggatatcgactgctgaaatcagcgcccgccgtcggctgatggggatccacgttcgtcaggggcgcaaccaggttcccggcgaagaagaggaagccgcgctctggaaccgttggcaggagatcaaagtcgataacatcgactccatcccagcgctggaagccatgatgctgttggcacaggaacgttcgctctcactaaccgtggtctggaatctgatccggcagtgggaaaaaagctga

SEQ ID NO: 292892 - DNA, 1134 bp, Morganella morganii
atgacaccgtatatccaggcgctgatcaacatgaccggcgataaactccagcaacggatacagaaggatccgacatctgcttccgatagcctgctgtttatgggcaatcagcatgacacggtaccgcgtcgcctgttgcaggatccactgctatcgcccagagataaatttgcctggcaggtgatccgaatgcaggcgcaggacaacggtggcgcggtgttcccctcttacagcgaattgcaggtgcagctctctaaccgcccgcaggatgaaaaagcctcgcgcagtaccgtcagccgggcattgctgatgctgcgcctgacacgctggctcagcctgtgccataaggcgcgggatcggatatccgggcgcatccttgggaatatctatgcgctacacgatgaaccgctgagtgtgctggatgccgtgcgtttcgatgccagctatcttcatttgctggagcagtgctcgcgacatgaaaacaaatccatccgcaccactgcacaaggtattctgtacgacattcgccaggacaccagcctgcgttatttatcgtcgcgtatagaactgctggaagaacgcgcccgctggcagcaacgccagtctcctgaggagactaagccagaaacgtccggtctcaatacggtaccaggtaaaatttcacctggtaccgaaacgagactaagccggaaaccggggcctgacggcttagtctcaaatcgggaccaggcttatgtacgtactgtatctacagatatttgtaatagtactaccgcgcacgcgaacagctcgccgccgaactggccgccggaaattccgttaactcatccggaaaaacagcttgtcttgcaggccatgcaaaacctgccgcccccgctgtgccaggacgtgcttgatgacgcagctcaacgcgttgcccgtggcggcatacaaaacccgctcgcctatctgctggcgacactgcgcaaggcgcagggcggtgagtttaatcagtatcggcgcggcaaagcagcagtgccggagtttgtaccgcctgtggtttcagagccggaaataccggctgagccgcgtaaaaaacgggatatcagtaagttggttgcggagattcgggcgcagtgtttggggagtggctga

SEQ ID NO: 292893 - DNA, 642 bp, Morganella morganii
atgaatacacagttagttgaaagagaaagaaaaaaaccggcgtcctcatttaatcctaacgaaatcatagcgaaccgggtcgggcacatcgtttcttcagtgtttgcagattttgatgataaatctctggcgtccgaaatcctggtgctggaggatctggatttgctggtatatgtcgtgggtgcttatctgcaaaagaaaacgcggatgagcgaacgtgagatggatatgttcaaagccaggatccagtcaacagtcaggttctatcagaagctggataaactgggcggtacgattaaggccaaagaggttagtgagttactgggagtaacccgccagaccgttaacaatcaggttaacaaaggcaggctcatcgcgttgcgtcgtggcggagactatctgttcccgagctttcagtttaaaggggctggaatgcttcctcacctagaagatatcctgcaatgcctgccacaggaaactgatgcgattacaagagtttctttcctgaccagtcctgttcgcatagatgacaaaggtacagcaaaaacaccacttgaaatcctgcaaaaggatccatcggatcaggaattgatgatcttacgccgtgaagcaaatctttttgctcatcacatggcttcataa

SEQ ID NO: 292894 - DNA, 684 bp, Morganella morganii
atgggaagtatctctgatgaaaaacacaacgtagttttagaaaaactggctcgaatctgcctcgatggaaagttacctgtatttggttttgaccttgatgtgaaacgttttcaagggaaatattacgcttcggcggaacattacgggaaaccaacgaaaccagaagaaatggggcgttataacgacctgtctggtaaaaccggggtttgttactttgcagagaatagcctgacagcgctggctgaaagctatggcagaatgtaccaccacgccaatggagatttcgcaatatctgggcatgtattggatattgcacatatgtatacgctgcacccgaaatccccattgatactggttgatatggcaacacttgcgtcaatgttgcatttaacagcggatcaactaacaggtgttgattactcgctgacgcaagccattactggttacctggcaaattatccagggcgcaattttcagggtatctactatgcgagccggcattatctcacgggaatgtgtcttgctgtgttcgaaccagaggaaggggagttgtttgaaactctggcatccgaaccactcagtaaatataccgagcatcaatcactgcctgttggctggccctataaggacattacagcagaagaaatgcttgtgaagatactgcacttcgacgtgacgctttaa

SEQ ID NO: 292895 - DNA, 2313 bp, Morganella morganii
atgaaaatcgcaccttacctgataacactgacgctgccgtttatctcgttatctgccgaagcggattaccacacccaaattaacgccggaaataccgtttctggcgatattgttgatggctcaaagggtaatcagcatgtctatggcacgctgacagactccacgatcactggtccctatgcctatagctacgttggcgatggcggacaaaccaatcacatcaccgttaccgatcacggtgagctatttctggaaccgggcggtagcgcttatgacacccagataacagccgatggtgatctacaggtgaacggttatgctgaaaacacctatgttgatagtggcggacagatttacgttaacgctggaaataatggcgttgaagatccagaacaaggcggccagattgtgaataccacggttggtgcaggcggcctggtcgttaatcgatatggcattgacacaaatacgatcgttgaagctggcggtgaactggataccggctggaattacgcttatgaaacccgtaatacagctatttcccgaaatgccgttattcaaaacggtggcattcagcaggtcagcaacggtggaacaagcgaaaatagccgggtagacgatggcggcacattaatcgtcaccggcacatggcactacgatgtcgtcaccgacagccagccttcggcctggtatcgcggcaccgcagatgacactttggtttacggcgtgatgcaaaatcagggcggactcgatgaaaacactacggtgcagtccggcgggcaatacacgctgagcggttatggcctctcccaccagctcaccattgcccaaggcggcagtgcccaaataaatgatggtgctctggatagcttctggctttatgggctgatgaacgtcagcagccaggctacgctaacaggtactggcacagtgggtagcagtggcaaactgatacttaacgaaggcgcaaaaacatccgggctgaccttagcgctggatggcgtactttccctacaaaacggcagtgatgctgatccgcaccattatcagattgcaggtctggagatgaatggcggtacggtgctgtttgacccaacctccttcgccacactgagtatggaaacgctctctggcagcggcaatttctggatgaataccaatatcgccgcacaacagggcgatatgattaatgtctccggggaagccaacggcgattttggggtctggataaacgacactggcgaatcccccgctgatccacagtcgctacaggtcgtacaaaccggaggtggagacgcgcagtttacgctgttgaacccaaaccagcaggtagatatcggcacctgggaatatggcctcactcccgacggtcagggcaactggtcgctgacgccgcaggcaacacccacgccatcaactgaagccgttctggcgatggcaaacgtcgctcccaccatttttcaggctgaagccagtgcgctgcaaacccacctggacgttactcgttcccgtccgcatcagggagagctatgggtgcaggcgctaagtaatcgctttgacgttaaccgcacaggcaatgcagcttatcgccagcggctcggtgggctgatgatgggctatgacagaagtcttcctcaccaggctggcctgcttacactcggtattgcaggcggctacagccgttccgatcttgatctcgccaacaacagcgacggctcagtagacagttacagcgccgcgttatacgccagctattatgatcaaagtcgtttctggctggacggaatgctgaaaggcaatctatttaaccagcaccttaatgcccgcatgagttccggcggccataccgacggcagttacaccatccccggtctgggtggtagcctggttgccgggtatgacgccagattcgccaggctcaccctctccccctttgtcggtttcactggtttcatttcgcaaagcgataattactggctatcgaacggtatgcaggcacatcccggcacggctaaatccgcgctggggcaagccgggttccggctgcgtcaaaatatgacgattcgtcatggtatacagctcgttccgtggctgaaagtcgcgctggagcaggagtttgtgcataacaacccggtcagggttaatgatgacaatttcaataacgatatcgccggaacacgaggaagctaccaggctggcatcagcgccactctcacgccgcacacgcatatttacgccagtatcaattacgagaaaggcgatgggatggaatcgccatggaccgggaatgcgggtttcagctaccgcttttaa

SEQ ID NO: 292896 - DNA, 531 bp, Morganella morganii
atggcaaaaccttcagatcactggttcccgtggctaaaatgtgaagctgaaaaacagaatattgacgttattattcctgagcttccctcccctgaatcccctgtgctatcggagtggcttgctgttttgcgggattccgtaggcaagatagataacaaaacatggttcgtcgcccacagcctgggatgtgtgacaatacttcggttgttagcacaactaacggtaaatgagatgccagcgggtattattcttgtttccgggttcaatgagacactcccgatatggcgacaacacggtctttcagaaatggatgcattcatctatcctccgctagaaatggggcaaatagttaacggagtaaaacaccgctatgtcattggctcattaaatgacaccatcgtgccgacggaactaacgcttaaactaagtcagcaactcaatgcccccttctatgcccttcccgattcaggtcattttttaggtgacgatggtatcaacgaattaccactggttttgcaactattaacatag

SEQ ID NO: 292897 - DNA, 1299 bp, Morganella morganii
atgccaatcaaaagaccaccgccacttattccgttttcccagctcaccggggcggatctggaaacccaccagcattatagtcgcgtgacggacgataaaggccgctatcttccgtttgacgaattttgccgtcgcacagccaaaggagaaaatgtctctatcgcctggacgcttacacggcgcgcgcgtgactcagcccttcaacggatcaattatcgcaacgaagcaggtgagcaagcgggttttgtcctgacgcctaatattatgtcagtatgtgagctggtagataaacacgccacaaggctggcactcaaagagcttaccacccggctcaggggcgcaggtaaagagttaacggcactaagcctggaagagccaattacctcatcgcaactggaaggtgctaacacaaccacgcttgtggcgcgggacatgctggaaagtgaccgccccccccgcaccgaagatgaacacatgatcgctggcaatgcgcggttgatggccgagataccggaacttatccaggagccattaacgcctgacttgattcgccgcttccatgccgttggcatgggtggaattaacgacgaaaaataccgtcccggcgaattccgcgataccgatgatgtggtgatcgccgactatgacggtaacattgttcatcagccctcagccgctgccagcctagcggaacgcctgcaaatggtgtgcgatttcgtaaacgacactgaacactacgtccacccactggtaaaggcctgtattcttcacttcatgagtgctcacgaacaccccttcagagatggtaatgggcgtaccagtcgtgggctgttttactggtacatgctgaaatcagagtacgacgtgtttaagtacgtatccatcagccagctcctacatgccgcaccagctaaatacgcccacagttaccagtacactgaaacggatggcatggatctgacgtactaccttgaacatcagaccagtattattcatcgggcaatgacaagactcttacagcatgtagacgatctggtttcccgcgctgcacgaattgaccattttttgtataaatcagggagcttatcgcggttgagcgggcgacaagtcacactactcaacatcattctggcagagccagataagaaatactccgcagcaggcgtcgctgaggcgctgggtgtgtcggataacactgcgcgtaatgacctgcggactctggtgcgtgaaaatctcttaaccgagatatcagaaaacgaccagaaaacagtttatagggtatcccaggatctgagctaa

SEQ ID NO: 292898 - DNA, 699 bp, Morganella morganii
atgtcggactacaccttcaacatgggtcccctgcgtagtgcgatccatattcagcttcacacccataacgccacccgactgtggactggacggcgggcgaccgagaacggccctgcgccaatcatcggaatgccgcgctttatcgaaatcctcaaccaaatgcgcattgccgcagaacataacgatccttacgccgatctgtggatgctgcgcatagaagagaaactggtgcagtcacgtaagttgatgcaagtgatgctggatcaggcgaaagccatgttcagcgaattgccagaaggcatcgatattgaaacctgcttcaatgttcagcctgcccgctttccgctgtttatcaacgccccgctggcctatcagggtgtgtatctgctgacagacttcgaccagctcgcacgccagcttctactggcctcccatatcgccgtcatctcccgcagggaaatgcacaaccggttaaataatggcgcaacggttattcgcagcgccttcggtctggcgcagaaatatcacggctccgggctgacccgtcaggactttatcgacgatacaccgcaggccagagccgccattgaacgtttaggcccgctaccggaagcgatactgagaggcaagctgcgctcatcgttttcatcaccattgcctggcaaggccgaaaatcccggagttgccgatgatgaataa

SEQ ID NO: 292899 - DNA, 495 bp, Morganella morganii
atgatgaataaccccataaccggctatcagtcgctggctgatgaagactataaaatgctggcttacgtctcctcgctaaaaggccttttaaagccttttaagagtaagggggagctggagcagctggagagcaacgcccgaagcgtgcgcgagatgatggagccattgatgcagcgtctaatccagagcgccagacgctaccccgtgcgccagcttccgctgatatttaccatcggcccggcaccgtccggtgcaaacttcttgcgctggcggaaccagcaaaacaacaaatccggcaccccggcattctgcaacctgattggcgatcccaaaatcccgcaacgcgccagagatgccttactggaaatcgagcgggatcgcatcgtgttcaatatgcagatgtcggtactgaccttcattatccgccaggcgagggagtgtcaggaaaagatggaacaggcagaaatgctgtatcaggggcggcaaaatagctga

SEQ ID NO: 292900 - DNA, 417 bp, Morganella morganii
atgaacgagaaaacttacttcaatctgtacaccagcggtctgggttacgttaaccgtgtccgcaccgtcaccccaaaacgcggcgagccttttttatgctgtgacattgccgcattgagcggggctgccgatgacgtggattatgtccgctttgactgcaaagtcaccggtagcgaagcgcgtaagctgattgcccgctgcgagcaggcggtcaatgaaaagcgcaaggtgctgatccacttccggttgggcgacttatacgtcgatatgttcaactacagcaaaggcgagcgtaaaggcgaaacgggcgtcagcctgaaagcccggctgctctatattggccttgtcaaaatcgacggagaagtcgtctggcaggcaggaaatcaggaagcagaggcggaagctgatgcagcctga

SEQ ID NO: 292901 - DNA, 585 bp, Morganella morganii
atgacagtagaaagtgcacttgaggtagtaaaaaaatattctatacagtcccttatagttattgtcatatgcatacctattgcaatctttttcatcaatgaatacaaatcacttcaaacgttaaaagatgctcataataaagaggtctatgccttttatgaaaaaatcacagcaaaagaaaatgaaataacacaaaaacagggagagaattataaaaaagaaatttaccttgaacaaatgaaaaaagaatatgaaagcaagcttgctgagttagaaaacatcagaaaaaatataaatagtgaatatacagcacttgcagccaaagaaaaggaatttactgattccaatcagaaacgtcttgccagtgaaaagcttcaggtaatgatgtctgagttttcaagttttggcgttgatttgggccattcgccaaagtgtgatgataatgaagaaaaatggaaaagatacaacatggcaaatgctaagttacgagaagctgaagcctatgctcgcgcgaatggcttatatgacgcgtataagggatttttcacttcgaatgcaccatttttaatctcgtcatgtggttaa

SEQ ID NO: 292902 - DNA, 465 bp, Morganella morganii
atggcgcgaacaacgggaatggttatcacactgctgatgctgggcggctgcaactcgccgcaacagcccgctgtgcctgcgtcaaaaccaacaccaccgcccgcgcctgaagtggtgcgctatgaccgttacctgctgatcaacacccgccctgacgaagcccagcgcaacccgctgcgccaaatcgtcaatatcaacctgccgctgaacctgaagctcaccgttggcgacgcctttacctggctgctgaaaccgagcggctacagcctgtgcgtcgatgaccatcccacgcagtttctggcaggcaaaccgctgccgctttcgcaataccggctcggcccgatgcggctggaagaggcgctgaaaacgctggccgggccgggctggctgatgcagaccgatgtactgaatcgcgaagtctgttttcacctgaacacgccgggaacgggagaccatcatgcttaa

SEQ ID NO: 292903 - DNA, 609 bp, Morganella morganii
atgcttaaacgtctggctcacctgactaccggcgctgctctcctgctgctggcggcggcggtgttctggtgtttcaaccgcctgaacaccctgacgctgacgcagcaacagacacaacgccaaataacacagtggcgcgaccagccgcagccggacaatgattatcacgagctgaaggttgccgtaaaaaacatcaccgatcgcacggaagcccttgccagaaagcttaacgatgccgccagcgctcagaccgaacaacttcaacccattaacgaacagatcaaggtgctggaggaacaaatccagaccctcaacgccagttatcaacacctgcaacaacagaccgccacgcgcagccgcgccacggcaaaacgtcccgtcccctctccgctttgggccgcaaaggcccctttttctcttatcagcagcgagttccgcgccgggcggcagttcgccgtcatcgcgccatccggctatcactcgctctcacagcttcagcttgtggcccccggcgacagcgtgcagggctggcaactgctgcaactggacggcagtcacgccactttccgtaaaggcggacagcggttgacgctgaacgccggaggataa

SEQ ID NO: 292904 - DNA, 651 bp, Morganella morganii
atgcgcagatacctgttgctgtgccttctgctactgccgctgtttgccagcccgcagcaaacccgcattgaagagcaagccattacccacacgcaggcgcagcagtggggattaaccgacagcgaatggcagcactaccagcaactgcgacagggcgagcgcggtatctggtcgccgggactcgatcccctcactaccctcggcgtggaagccaacagcgacgccgaacgccagcgcttcgccgagctgctggcccgtaaagagcatcaacgggtggagaaagagctggcgttccagcgtgcctacgaccaggcgtggaagcggctttacccgacgctgacgcccatccgcagtgtcgtccagccacgtctggcgctgttcgtcagtgaaaaatgcccggcctgcgagacgctggcgcagaagcttatcaacgacgaccgtccgctggatatctggctggtcaacagccgtaacgacgatgccagcctgcaacgctgggcgcagcgccagcatattgatatgcgcaaagtcgaacgcgggcagataacgcttaatcacgataacgggcgctggcaacacctcggcggcggaaaactgccgttattgctggaacaacagggggagcaatggcgtcccgtctctgcgccctga

SEQ ID NO: 292905 - DNA, 534 bp, Morganella morganii
atggcgtcccgtctctgcgccctgacagtcggcctgcttatcagcgctcacgcctgcgccgtgccgccgctgtatgcgcaaatcgcccgccagcaacaggttccggctgaactgctctacgcggtggcccgcgctgaaagcggcacccggctggcgcaagagctgcatccatggccgtggacgctgaatattgccggaaccggctaccgttaccccagccgttcttcagcctgtcgggcactgctcgccttcgcccgtacccgcagcctgaaacgcatcgatgccgggctgggacagattaacctcggctggaacgggcaatggtttccctccctgtgcgccagcttcgacccagagggaaatctcaccgtcaccgccctgctgctgcgtcagcactacaatgcctcccccggaagctggctggacgctgccgcccactaccaccatccagccggaggcaagccagccgccgtctaccgccagaaaatcagccagcaaatccgactgctctccgcatcagggacgtcgccatga

SEQ ID NO: 292906 - DNA, 408 bp, Morganella morganii
atgaaacacgttattccagccatgctgctgatcgctacagccgctattgccgggccaaccgttcccatgcaggcgctggatgaagcccggttgctgccggtcgtcacccgcaatctgcatcccggtcagcaaccccgtctggcactcagcctgccggggatgacgccgttgtttttaatcggcgacgatccgctgtcgacagaatggctgcgccagcaccgggacgcattaaaaaccctgcacgcccccgggctggtcgtgaacgtcaccacgctggcgcggttgaatgccctgcggactatcgccccagcgttaacgctgctgcccgtcagtgccgacgatatggcaaaacacctgcccatcagcgcctatccggtgctgatcaccgacaagggactggaacagtga

SEQ ID NO: 292907 - DNA, 2034 bp, Morganella morganii
gtgaggctcgattttatactgcgcccggcggtggagctttacagcgccagcgcggccctgctggcggcagtatggtgcgttatcgcaccgcagacgttcctgcttactcccctttcaggctggctgctggcgctggcattgcttgcactgtctaccctgcggctaaagcaggggcttcgcatcctgcgctttcgtcgccgcatgcgtcatctgccgctctggacgctctctgccagtcgtatcccgttgttacccgacgccctgtttctcgggcgcggctttcgctggctacccacgcatacccaacggctgtatctgtgccgtctgccacagtgtgaacactggctacggacagaccgcccttccgccagcggcggcgatccactcctgcacggcgtggagctgcgcgaaggccacgtcacgttacctctgcgcgatcgaccgggacacacgctggtgctcggcaccacccgcgtcggcaaaacccggctggcagaactgctgattgctcaggatatccgccgtggcgacacggtgattgttttcgaccccaagggtgacgccgacctgctgcgtcgagtctgggcggaggcgcaccgtgctggacgggaaagcgtcttctggctgtttcatctgggatggccggagatctccgcgcgctataacgccgtcggacgctttggtcgcatctcggaagttgccagccgcatcgccgggcagctttccacggaagggaactccgccgcctttcgcgagttcgcgtggcgcttcgtcaacataataacccgcgccctggtggcgctgggccagcgcccggattatgcccgtatcgcccgtcacgttatcaatatcgacgaactgtttatcgattacgcccgcgtcttcctgcccagtcacgaccgacaggcatgggacaacgtggtgcggattgccggtggcattaccgataaaaacacgccacgtaatcttcagggacgggacagctacgtcgtcgcgctggagcagtacctttccaccacccggctacatgacccgatcctcgacggcctgcgctcagccgttcgctacgacaaaacctatttcgacaagatcgtcgcctcgctgctgccgctactggaaaaactgactaccgggaaaatcgcgcaactgctggccccggactacggcaaccttaacgacccgcgcccggtgttcgactggcagcaggcgattcgccagcgggcgattgtgtatgtcggtctggatgcgctgtccgacgcggagattgccgccgctgtcggcaactcaatgtttgccgatctggtcagcgtcgccgggcatatctacaagcacggcgtgatggatggcctgccacaaacggaagaaaaagcggcaatcaacctacactgcgatgagttcagtgagctgatgggcgacgaatttattccgctgatcaacaaaggcggcggcgcaggtgtacaggtcacggcctacacccagacgctctccgatatcgaagcccgcatcggcgatcgcgccaaagcgggccaggtggtcggcaacttcaacagtctgatcatgatgcgggtgcgtgagaccgccaccgccgaactgctgaccagacaactgccgcaggtagacgtgctcagcaacagcgtcagttccggcgtcaccgacagcgccgacgctcagggcggcattagtttttccagcaacacccaggatcgcgtgagcagcgtacaggtgccactactggaacccgcttcactggtgcaactccccaaggggcaggcgttcgctctgctggaaggcggccagctctggaaattacgtatcccgttaccgaacgcagcgcacgatccgctgatgccggaaaacatcgcgcaaatctcccgttatatggaaaaacaatacgacagcgcgcccgtatggtggaaccgcccggaggcagttgtaacggcgaaaaacgaccctattttatggctgaacgacagcgaaaccacggagaaactgaccgatgacaccccggacacatcgccatctcgtaagcgttga

SEQ ID NO: 292908 - DNA, 267 bp, Morganella morganii
atgacaccccggacacatcgccatctcgtaagcgttgaagttatatggcccgcacaaacgctacctcttcccttgcaacaggcggtagatgcgttgacgcagggagaaacgcccgaccagattatcgcccgcatgaatttgcagggctttcaggcatggcgcgaagctacatcatcgcaggatgaacacgatatttttcaggtacggctcgatgaggctcacgaggcgcgattcctttgccgctacgtcacgctgccgctgcactga

SEQ ID NO: 292909 - DNA, 684 bp, Morganella morganii
atgtccgaccatgcgccaccaggaccagtacgccgccccggactgctcggctggatagcattacttcccggcgtgctggtcggtttttgcctcggcgcgtggatgctggcgatagcgctggagtggctggacgatgcatggttctggcggaatgcctgcgccagccatagcgaacaggtattgcaggcaacatggcagtggtggcggggttccgctagcgcaccagtatggttagtagaagatctggcgcttgtcagcggtacgttgcagcaagggatcgcagcgctgattgcttcacttaacgggcagagcgggttgttctggacagagacggtcactacggtgatccgctgtgcgttactgtctgcgggcaatatcaccctcacctttctgctgcggctggcgattttgttgcaggctatgccgctgtttgcgctgattatcgtcgtcgggcttattgacgggctggtaagacgcgacttacggcgattcggcgcaggccacgagtccgggtttgtttatcaccacgccagacgtatgatcggctccagcctggtggcaacggggttagtgtggctggcattgccggttttttcagtaccagagtatgtgtttataccagcggcaacagggattgggctggcagtatccatgacgggcggatctttcaaaaaatacgtctga

SEQ ID NO: 292910 - DNA, 774 bp, Morganella morganii
atgacatcaaaaataaactggctgttgcaaaacaccgctccgggaagcctggttttgcaatcctggctaacccggaacaacatatcgccttctctggcctttaaatacgcgcaaaatggctggttaataaaactgcgagctggcgtttatgcgcgcgcaggacgagaaccagactggagtgatgcgctatggtgtctgcaaagccagcttgaagcgccggtgcatctggccggactgagcagtctctcctggcagggccgttcccattacctacaacttaagcagaatcaatgctggcttagcgttgaaaacaaagcgatattgcccaaatggtttaaagaatttcctggcgttgagtggttggtggtatcggctctgaaactccctgaattggatgaaaaataccgaactgagcttgaggttaaagggaaaagaataaccgccagtacgccagaactggcagcctacgagctattaagcgcagtaccccaagaaatctcatttgagcacgctgccgagctttttcaggggttggtcaatctcaacccacgtaaagtggaaaagctgcttacgctcagccagtccgtacaaaccaagcgcctgtatctgtttttcgccagtttctatgaacatgcatggttcaaacgtgtagataccagcaaaatcgacctgggatcgggcaaccgacaagtcgttgttaatggcaagctgaacacgcaataccagataactgtgcccgaaaactttactaagaagggaataagccatggataa

SEQ ID NO: 292911 - DNA, 918 bp, Morganella morganii
atggataaaacctccccctactaccgccaggtcgccctgctggtgcgagcattaccctatgtcgctaacgagccctgttttgcgctgaaaggcggaacggctatcaacttattcatccgtgattttccccgattgtccgttgatatcgatctggcctacatcccgctggaaagcagagaggtcgcgttgcccaacgtgcgagaagcactcacccgcatcgcggctgaactggaaacacaagccgggctcagcgcagtgctgcaaaccaataatcccgatgagatgcgcatcattgtcaccactgacgacgcgcaaattaaaattgaagtctcgccagttgcccggggaacgttgtatccaccacaagaacgcgacgtcgtcgaagccgtggaggaggaatttggctttgccgcgatcccagtggtctcactgcccgatttatacggtggcaagctatgtgctgcgttagatcgccagcatcccagagatttttacgacgtcaaaatgctccttgatacacaaggaatcgaccgcgctattttcaatggttttatcgcttacttgctcagccataatcgccccttgtccgaagtgcttagcccacgctggaaggatattactgaaccatttcaaaatgaattcagcggtatgacttttgaggaggtatcactggaagagctaagagaggtcccggaaagaatgctcagcgcgttgaaagcgcatttcactcaacaagatttcgacttcctgatgtcatttaaacgcggagagcctgactggaatttagcaccagagccccacattcagaatttgccagccgttcaatggaagctgcgcaatattggccggatgtcggaggaaaagcgcgcgcagtccctggagaaactggaaaaggtaatgacagaatggctaagttag

SEQ ID NO: 292912 - DNA, 1371 bp, Morganella morganii
atggaaatccaaacaataaagcaatcaagattcaatgcccttgctgcttatgcccgaaacccaactattaagtttattagtgaggaggttagttggtatcaaacagatgacttactcattgttgcctgcatgatatttgattatacagatagtgagtatgccggttgcataatggcaagagatgaaactgaacgatatcgtaatgtaaggatgtcaggtttttacgaagatcttgaactcgcagaaaactctttatttagaaaaattgaagcatgccatgcaaatattaacaccattcgtttacagtatgcagatggggaaatcccacctactccagttgatttttttacgcctttgagcagaacgagcaacaggttagactcattatttgatgcacttatcaacaacacaattcactcttcagcaaaaaatatcattgagccaatgatgcgatggtatgaagatgccgacggtaatttcatcgaacagtttcaaaccacgggttttaaacaaagaatttgggagctttatctatttgctatgctcaccgaaaatgacataatgctaaatccaagagaagccattcctgattttatatgtaatagcttctatggggatttttgtgtagaggcaactacagtaaatccaacagtaacaaatggaatcgtagagactgttccaactccatcatccctggctgaactcgaaaatattcagctaaactattatcccattaagtatgggagtgccttattttccaaactgagaaaacagtattggttaaaggaagcatgtgttgggaaacctttaattttagcgattaccgattgcctaagtcccgaatcagggaaaatatccaaaaactcattagcctattatctttatggttattatcatgactggcaacatgatgaaaatggtgaattacaaatcgcgccaagattaattggtgaacatcgatggggcgataaaacaattccttcaggtttcttcaatcttgaaaactctgagcatataagcgctgtaatatttacgaatgatgcatcattcggaaagttcaatcgaatgggcttaatgaatggatttgctccagagggaacccaaatgagaagagtggggacacggcttaatccagatccaaatgcgacagagcctttaccatttgttttaaacgttaatgatgagagttaccaagagtcatggattgaaggtctggatgtttatcataatccgaatgccctcattccattatcaccattaatattcgagaacgcagcgcaacactatttgttgcctgatggaaatgttcgctccaactatccagcatttcagccacaaggttctattactcaaataagaatccctgattga

SEQ ID NO: 292913 - DNA, 321 bp, Morganella morganii
atgaaggcccaatgctcattatcaacaatcatcattatgatttttagtaatacagcagcctttgccgcccccctcaccgaacgtgaagagctaaccctgtccctcaaccagcttagccaaatcgaagcctcgctccatcgcgcccagcagagtgccagaaccggtatcaacgagcgctactacttcgactatctgcgcatccacggtgatatcgccaccctgcgcagcgggattgaacattacctcacccccacccgagcccaaccgcgagatacggcgacgctcgtcgggcgataccgtgaggagaaaaccacgccatga

SEQ ID NO: 292914 - DNA, 234 bp, Morganella morganii
atgactcccgaacaaatcagcgccttccaggccgcgagtctggtcaagcccgatgccgtcagcctggtgatgctcggcctgttcagcgcttttctgctgctgtgggtggtctgggtgctgaatgacgcctaccggggcgtggcaaccgcgcgggtgagttggcgggcactgggcagcatcggcgggcgaaccatcttactgctgctggtcagcttctggctggtactgagttag

SEQ ID NO: 292915 - DNA, 327 bp, Morganella morganii
atgaaaaaacgcatcttcaaatggctgctatggttcccggccctgcctgcatatgccgatctaccagagatggaagatccctcacgcggtcagggcgacggcatcatggagacgttgcagaactacggctatgacattgtgatcctgatgacgctgggcatctgcgcagtgggttttctggtggtcgccaacaactgcatcgccacctactccgaaatccagggcgggcgcaagcagtggaaagatttaggcgcaatggcgggcgtcggcgcggttctgctggtgatcaccatctggttgctcaaccaggcctcggacatcctgtga

SEQ ID NO: 292916 - DNA, 354 bp, Morganella morganii
atgagcaccattccctttctcccggaacggttgaatcgcgagcctgcggtgtttcgcggcctgacggtcagcgagctgctgatagcgctgcttgccgggctggctgctggcgcagtcgctggagcctttccggcgatattgtggcgcaactggagccttatccccggcagcgccctgcccggcgcgacactggcgatcctctgcggcggacgctggctggctcggctgaagcgcggacgcccggagagctggctgtaccgggcgctggaactgaagctggcccgtttcggcactggcacacaacgtttcgttttgcacgatggcgtctgggctattcgccggagccgacgatga

SEQ ID NO: 292917 - DNA, 627 bp, Morganella morganii
atgagcacctttaagcacgcgctggccgcgcgggatgcgcatatccgcactctgcatattgcgctggtcgcgttattcctgctggcatcaggcatgggatacggctggtacagcgccccacaccagctcacggtgtacctgccgccggatctgcgcgcagccagtcagcgtccgtggtgggaagtgccgccagccacggtgtacgccttcgcgttttcggtgtttcagcagattaaccgctggccgaccaacggcgaggtcgattatccccgtaacctcagcgccctgagggcctatcttacccccggctgctacaaccagattgaccgggaatttcgccagcgcctgcaaaacggcgaactgcgcgaccgggtacgcggcgtgtatgaagtccccggtcggggattcagcgacaagcaggtgcagatcctcgaccgcgacaactggattgtgacgctggatctgaccgtcgatgagtatttccagtctgaacccgtcaagcgggcgatggtccgttaccccattaaagtgctgcgctacaacatcgaccagcagaaaaatccgtgggggctggcgctggactgcttctcatcgccgccgcagaaactgggggcggctaaaccatga

SEQ ID NO: 292918 - DNA, 789 bp, Morganella morganii
atgaatacccgcccactgctgatcctgctggttgccctgcccctgcacgccgtcgagctggtgaagtgggaacgcatcccgctaccggtggcgctgaacaccgggcaggagcggatcgtctttgtggaccgcaatgtccgggtgggctatcccaccgcgctcgaaggcaagctgcgcatccagagcagcaatggcacgttatatttactcgccagccagccgtttgccgccacccggctacagcttcaggacacagagaacggcgagctgattttgctggacgtctcagccagcaagggtgagcacatccgggaaccgatgcgtattgtccgcgaagagaaaaaagcgactgacgcgaagcctgatgcagttccagaacccttaccctccacgccccttccggtcgcgctcacccgctatgctgcgcagatgctgtatgccccgttacgcaccgtggaacctttgccgggcgttcagcccgaaggcgtgcggctggcaaaaaccatcaccaccctgctgcccgcgttacccgtcaacgctataccgatcggtggctggcggctcgatccttaccatctggcggcgatccggcttcagaataaaagcaccacccggctggaactcgatccacgccagcttcaggggcggttttacgccgcctcctttcagcatcgctggctggggcctgcgggcagcgccgaagacaccaccgtactttatctcattacccgcaatcagcgtcctgaacaggcgatcctgccggagcctgcaccggagaagaaaaaatga

SEQ ID NO: 292919 - DNA, 1338 bp, Morganella morganii
atgaagcttcaggccaatatactgctgcgggttctgacgccgctcatcctgctggcgggcagcgtcctgctgtttcatgcctgtcaggatcgtaaaaccacaccgtcaaaatcctctgcgcctgcaacgcccctcagccacgacgagctgaaagcgctggggattgagggcgatacacccgccgataccgtcgccacgctggtcggccagatgaaactctggcgcaaggaactggaaacggtaaaggccagtaacgccgcactggtgcaggaaaatcagcgcctgcgtgagcgcgagcaaaataccgacagtcgcatcaacgacgccattaaccgccagcagaccagcgcctcacagcagcaaaacgaattactcagctcgttacagacgcagatccaacaactaaagggcaacagaacaacggaggactcgctggccgagctggggattgatgaaccggaagtggcctccggcgagccactgcgctggatagcccccgccgatgccctgccaacggataaaaacggtcgtccgctgcaacctgcgctggcctttccttctgcgatgcagaacatcgcgccacaaccagaagcaccgccgcccgccgccgtcaaaccggtctacaccctgccgcagaacagtacattaattggctcggtggcgatgaccgcattgctggggcgcatcccgcttaacggcagcgtcaccgatccttacccattcaaggtgctgattggccgcgataacctcaccgccaacggcatcgagttgcccgatattgaaggcgcggtgatctccggcagcgccactggcgactggacgctctcctgcgtgcgcggcagcttgacgtcaatcacctttgtctttcgcgacggtacggtacgcacgctccccgccgcaagtgataaaaccggaaacggcacagaaggcaatattggctggctgtccgaccctcacggcctaccctgcatccccggcgaacgtaaatccaatgctgccgaatatatcggctcacaattcctgctggccggatcgtccgccgctgcgcaggcgctggcgaacaaccagaccacctccaccgtggaggatggctccatcaccaccgcgctgacgggcgacagcgggcagtacgtgcttggccaggcgctgggcggcggcctgaaggagagcgccgactggtttaaacaacgctacggccagatgttcgacgccatctacgtaccgcccggccaggccgttgccatccatatcacccgccatctcgccatcgactacgatcccaacggacggcgggtgaactaccgcacggcaggcgatcgcactggagacctggactga

SEQ ID NO: 292920 - DNA, 390 bp, Morganella morganii
atgcgtaccctgatactgctgttttccctgcttctgagcgcctgtagcaccgaccagaaaacgctgctgccggtggatgaaaacaccaccatgctgaatatctggggcagacaaaataacgatgcgcaagcgctgtacgacgcgcgatcggttctgcgtcgcccgctggatgacgccacgctgaccgcacaacagcagcaggccacacgcagcgacgacaatgccatgaaggcgctgttccggcggctgccgaacccggatctggagatgtatatcttccctcatctggcaggcagcgaaggtgtcccggtgccgggatataccaccgtcttccccttctataaccgggtgcagtacgctctgcccggcgagcggaccgatccgctgtga

SEQ ID NO: 292921 - DNA, 2655 bp, Morganella morganii
atgatgcgcagcggcaccctgaccgaacaaacagtggacagcctgtaccagaaaggcgcgtcgttcgtcgattttctgccgtgggtggagtaccagccggaaagcaagacgttactgctggatgacgggcgctcggtcggcgcggtgtatgacatcacaccgtttggcaccgaaggccgctccccggcacggctggaagagttacgcgatatcctgaaggacgcacttcaggacagcttcacggaatacgaccgccatccgtgggtggtgcagttttactgccaggacgaagacgacaccgcaaactggctggccgcactgcatgactacgccgtacctgaagcgaaggactctgattttacccgtgcctggctgcacgagatggagcgccatctgcacgcagtttcccgcccggaaggctacttcctggacgatgccgtcagccatacccgctggcgtgctcagcagcgtcacacccgaatggtggtctatcgctggctacccaataaatcccacgatccgctggaagattccccggaagaggcgctgaacaccgtttgtgagcgaatggtttccgcgctggcgggcgcgggtattcacgcccacaggctggaatgtgaggccattcgccactggctactgcgctggtttaatcctgcctcgcagatgggcgattcaccacagcagttctggcagcagatggcacagcaggttgacacgccggaactgcacgactttgccgagagcctgatgtgtagtgaacctcgctcgctggccgcgcaaggggcatggctgttcgaccagcttccgcataaggtcatcgtgctggacagactgcgcaaaccgcccacaatcggccatatgaccggagaatccgcacgcggcgatggcattaacgcgctgttcgacctgctgccggaaggggtgattatggccctgaccatcgtcgtctggccgcaggaccggctggaggagcatttaagtcgcctcagcgaccgcgccatcggcgagaacgtcgaatcggagtacaccaaaaaagactgtcaggaagtgcgccactggctgaaggacggccacaaactctaccgcagcgcgctggcgttttatctttccgccccagataacggcgaactgacccgacgcgtgcgcagcctgaacagcctgctgctgaatgcaggtatggtgccggtgcaggagaatgacgaactcgccccgctcagttcgtggctgcgctggctgccgatgtgtttcgacccggctcgggataagcgccagctctacacccgcttcagctttgtgcagcacctcgccaacctgctgccgttgtttggccgcgagagcggcaccgggcatccgggcgtcagctactttaaccggggcggcgggatgctgtgctgggatccgctcaaccgcgaggaccgcgcccagaacggccacctgctgctgctcggcccgaccggtgcgggcaaatccgccaccctgaacgccaaaatcgcgcaactgatggcgctgcaccgcccgcgtctgtttatcgtcgaggcgggcaactcgttcgggctgatggccgattacgctcgcgagcatggcctgacggtgaataaaatcagcctgaagcccggctccggcatcacgctgccgctgtttgccgatgcgtggaagctggcggaaagcgatgcaccttcagcagaaccggatgatgacgatcccgaagagaccgacaatgagcagcgcgatctgctgggcgaaatggagattacggcccggctgatgatcaccggtggcgagctgaaagaggatgcccgcctcacccgttctgaccgggcattaattcgcgaagcgattctgcatgcggcccggctcacagctcgcgagaaaagacaaacgctgacacaggatatccgcgatgccctgttcacactggcacaggatgcagcgctaccggaatcccgccgtaaccggctgtgggagatgggcgaagcgatgaatatgttctgttccgggtttgaaggggaattgttcaaccgcgagggtgaggcgtggccggaagcggatatcaccctggtggatctggcgatgtttgctcgcgaagggtacgaagcgcaactggcgatcgcctatatctcgctgattaaccatatcaacaacctcggtgagcgtgaccagcatctggcccggcccatcgtcaatatcaccgatgaggcgcatatcatcaccgtcaacccgctgctggcgcggtttctgaccaagggctcgaagatgtggcgcaagttggggatctggctatggctggcgacgcagaacctgagcgacttcccggatgatgcaaaaaagctactcaatatgattgagtggtgggagctactggtgatgccacccgaagaagtggagcaagtcagccgctttaaatccctgacgccggagcagcgccaactcctgctcagcgccaccaaagcgccggggaaatacaccgaaggcgtggtgctttcgccgcgcgtggaagcgttgtttcgtgtggtctcccctgccctgtggctggcgctgggaatgacggagaagcatgaaaaggcggagcggatgcggattatgcgggaacttgggtgtagcgagctggaggctgcgatgaggatggctgagaggtgtttttccagcgactaa

SEQ ID NO: 292922 - DNA, 207 bp, Morganella morganii
atgaatcgctcttgtaactgtctcgttatcatcgaaagaatggttgctgtaatgtatgatcttgacggcgataacagctctctcactggtgtaaatataattaatcaggtctattgtgatattacagttattgccagtaatggtattgtaggattcgccagtaaaaatctaagtaatcactatcgaatgattattggctgggattaa

SEQ ID NO: 292923 - DNA, 945 bp, Morganella morganii
atggctggacctaaaagctatatctacatagatacaaatgttatcagtaactttaaattattcagtgatgatgaatggcgtgcatatcgcaatgcaaataataaatatttatttccagcatctgcatcccattttttggaccttttaaaaagccctgaagagtatctacaagaagatcttttattgttagaaaaaatctcagggcgcaactatatcgatcttgatgaatctggaagtattgtcacaactaagcttccttttgctttatctgaagcttatgaacatattgtttctgattataagtcgaaaactaaaccagatgaaagatttgtattcattccaggctatgataaatttacagttgacactgaaatgatgcactctaattctttcttatatgatatggttgtgcaaaaccatggtgttatcgatgggaattttggaaattatgtcatgcaatacatgttagcgaatattgattcacctactgtgtataaagcgatgaggaaacaaattcaggatattattgctcatgctaaaaaatacggcacatataattctatgccggatcattccaaacaaactcttgaaatattttcgtttgaaggaaccgatgatgagttgtttatgaggctcaaagagtacatgattctctcttatagaattcaagggaaaaactggcttgaaagaagtataccgcatcaaatagtagatatctattcactgcttgatctcgtatcgggctatggagaaaagatagacaagaaaaatccttgggttaacatgctccatgatgcagaacattgcgcaaatgcatcgcaagcaaaatactacattacgaatgagcggaaaaataacgccaagatagattttattaaaacacaatttggattgaagtttaaagttattacaccagagcagttcatttcaacctttaggctatag

SEQ ID NO: 292924 - DNA, 1335 bp, Morganella morganii
atgagcaatatgccaccgcaagatcttatcaatgttctggcaccattctggcaacttccccctcatacctgctttgaccttaatagtgttaaaaaagaaaaagtgtttcgcaagctaaaggcttattgcactggatattatgaagctatggacacgggaattttttctgacattccattggcaaaggctttgtgtctcgctggtgttccaggtattggtcagaaccacgattgctccagcaatatcatcgatgttgcaacaaaactccatgatgaattatccaaaactacaactactaaaatttatttatgccccttagattgtgctgaccggatagagcagatcaaattcgggaatgctgaagtgagggagttctcagcaggtgaactgggggttcttcttggattggagcagtttaaacgcctgccgtattataaaaaatgcgacttgaaggccttatctgagtttaaatggcttgtcgtttgggaggagatcgaacttccttctaaaatatcccatagagcatactcatttttgagtacaggtttggagcgtgactacggggctattaaaccatatggtcaaagatatcctgaaatatttaatttatctttttttggcttattactagctccatgggaggagtgggttgataatattgaagtggaatggaagtcatttcatgttaaatgggtgcatacaatcgaaaatgatttatttagcgatcaaaaaaatataccagatgcagatacgctaacgtggggctatagttatttttgtgatgaaaatggtaatgagcatgaagttcatcatccctttatcttatccactggttgttccagaaatgctttgtctttaatcgtaaataaccaactcatggctgatattgatacagcgatcaataatggattaataaatgaagcagctcggcatcatttcattaaagcatttctttcagatggaattgatgagtttcttgctcatattgttgtaattgatgcatgtttaggtgaacctcgtgaacttgaaaaaaaactaaatctaactaaatacgagaagaacctaaaatctacaggacgattaaaattccgactagttggactgttagatgatagctcagtaaaggaaagcattgatacgctctatagaatacggagtgaatatgttcatggccgagatatggctgagatatcttggtcagataaaaatctagcaagagtattggctagaaaaactttatttgaggttattaaaatggttcagcacacccctcagatgaacaaattagaacttcttactttattactcagaaaggggagggataaacttacatag

SEQ ID NO: 292925 - DNA, 1290 bp, Morganella morganii
atgtctgagaacctgcaatccaatatagcccaagctttacctcaagatcgggaagcgctgtaccacctggtctggcgcgagcctgtggagcgaattacttccttctatagcgtcagcaaagaacaactggcaaaacgatgcattgaattacggataccgagaccgctcgcaggatattggaaagcgttggcgaaagggactgcacctgcgataccacctctgccagccttgaaaaaaggtaaagcggcaaagattcagaaagaagctggtgtaaccgtgccgtcacccgcaactgcattaccaaagccactctctccagcgacacgaaagcaagccactattacagggaacggctattcgttaatcaatgatcttaaaacgtatctcccgaaatccagtgtgactgaagatggttactacaaacctgcgaaaaagaagctcctggatctcaatgtttcggatacggggtttgatagtgcaatagatttcctgagccggttctttgatgctttggggaaacagggctatcgggtaacactggatgttcctggagaacggtttcatcgtgcggatattgatatcaaggaagatccaaagggagaagggtatcgctgggacaatttatggcgaccttatacgccgagcatcatttgcattggtggcatgtatttcgcgttcaacctagccgaaatgacggaatatgttccggcgaagaaagtcaaaaatcgttatgttcgtgacgaacagatggggaggtggattcgtggaaaaaatagtgcgccttttcttcacatctcgaagcatacgttgcctaccggacgatttcttttgcagctctattcgccttatgagtcagcagattggcgagtgcagttccggcagacaaaacaatgtggtttgattagccagatcccgaagatgattgcagtgatgctggaagccattcctatcattaccagacaactagaagaagctcgaatcaaagctgaggaacggcaaattaaatacgagcgggaacatgctatctggctcgaaaaggaacgaatccgtcgagaggaagaagcacacaaagccagcgctactgagctgaaatcgattatggcccagtgggctgaagacaaacgcgtggaacagtttttccgcgaagccgagctggatgtagctggtcttgatgagcagcagagggtacagattatggaacgcctacgactggcccgccagttcttgtcagaggatacagcggttgagcggttgctgaagtggagaactccgctggagcgtttgagctaa

SEQ ID NO: 292926 - DNA, 264 bp, Morganella morganii
atggaaaagactggatcaatcaaaaaactgttaggcaaccgaatcaggcagcttcgtcgggagacggggctgtctcaggaagactttgccgacaaatgcggtattgatcgctcatacatgagtggaattgagcgcggagtacggaaccctacacttgaaattttgtgggcaatctctggtggtctggatttagatcttagtcatttgtttatgttcgaaacaaataccaaagaagaaatagaaaccacgctttgtgactcatag

SEQ ID NO: 292927 - DNA, 261 bp, Morganella morganii
atgactaaacaagactggcacccagccgacatcatcgccgccctacacaagcgcggcaccagtatggcagcggtctcgcgggaagcgggactggcctcttccacgctggcgaatgcgctctcacgtccctggccgaaaggcgagtggctgattgctcgcgcactcaacgttcacccagcaaaaatctggcctagccgttatgaggaagaaggcgaactgcggcaaccgaaaaatccgctccccgccaggtgcaggttatga

SEQ ID NO: 292928 - DNA, 726 bp, Morganella morganii
atgattatttcagacgctagcttccacgacattccccatgcagcccaagttcaacaagcggccataccaccgccaacggaaatgccgtttctcacagccccggttcgcaaccacccagttttccactgcacccacttctcccgccacgccctgctacgccctatcgctcgtgaagcaggaagcaaaatctatctacaagaagaatccatctgcggtttctggtatctcaaccacggcgtcatcggtttacaccacacgctggaaaacggcaaagaaatgctggtccgcgccttccaacagggggactggtttggctatctggggttgtttggttcggagtcctaccactgccacgcctgcgttttgcagacagcatcgctgtgccacgtcattcctcactccaacagcgatttcctgcatcatcacccgcagtttgcccaatttctgttaaatcaggtggtggcaagtctgtctgattcggagcatcgtatgacctggatcgctcgttatcgcacccgtcaccgggtactgagcagcctctggtatctgacgagttatttccccggctatgattggacgtggcgtgaagtggctgactttgcggggtgtgaaacagaaacggcgttacggttcagtaaggaattaagactggccgggatactggacgattcgcagcgccgtctgcatgtatgtcatccggagcgactggcagcattactggcataa

SEQ ID NO: 292929 - DNA, 1182 bp, Morganella morganii
atgaaacacgctttccatctgatggcaaaacctgcgggctggcgctgtaatctggcctgtgattactgtttttacctggcaaaagggcagggtgtgctgcgtgataccagcggacagcgacatatgtccgataaggtgctggaagcgtatattcgccagtacatcgcggcatcgcccggcacggaggtgaactttacctggcagggcggtgaaccgacgctggccggactggatttttatcgccgggccgtggcgctccagcagcgctatgctagggataagcgtattaccaacagccttcagactaacggcgtactgattaacgacgaatgggcgacgtttctggcacagcatcggtttctggttggaatatcactggatggcccggcggatctgcataaccattaccgcagaacgggcagcggtaagcctgtgtttgagcaggtgatggcggcgctggactgtctgaagcgtcacggtgtagacgtcaatatcctgagcgtggtgaacaacgtgacggcgcaggctccgctggacatttaccgcttcctgacgcgtgaggtgggcgctgaatttctccagtttattccggtggtggagtatgacgtacagcgtgggctgttgccctggtcagtgacgggggaagattacgggcgatttaagatcgccatctttgatgaatgggttcgcaatgatgtcgggcgggtattcgttcaactctttgataacgcactggcggcgtggctgggtgaacgtccggcgctgtgcgtgatgcagtctacctgtggacgggggctggtggttgagcagaacggagatgtttacagttgcgatcactatgtggatgtggaacatcggttaggcaatctgctacagcagccgctggaaaagctggttgtgggtaaagcacaacgacggttcggccagcagaaagcgcagctcccggatgattgccatcgttgtccgtggcgctttgcctgccagggtggttgtccaaagcatcgactacacgagcggctgaatcatctttgtgccggatattgcatgatgtttagccatatggatccgtatatgacctatatggcgcagcagatccgtttgcagaaatctccggctggggtgatggctgtggtggataatattgtggcttatgccagtaatgctgccagtcgctccggatga

SEQ ID NO: 292930 - DNA, 801 bp, Morganella morganii
atgactgcatggatgattgccgcactctgcggctgtggtatggcaaccagcctgctctcggcgctgttcggcgtcgggggcagtatcctgctcgtgccggtgctgcatttgttgtttccgcaatgcgctgtgcaggtgttggccgcgacctccctgacggtggtgatgctgagcgcgttgattaacgtctgcgccttctggcgacaaggtatccggttgaatacgcggctgctggtactctggtcgctggggatggcgacgggaatgcaggcgggcgtgtacgccagctttttgctgtcggatagagtgcttttggtgttgtttgctctggtcctggtggggctggcattgcgctgtggatattcacgtcagataactcaggaaaacgtgcaaccggataaccggacgcgcagcaccgggatgctgctgtgtaccgctggtggtgccgtggccgggttaaccgggctgggtggtggttccgtgctcgcaccgctgatgtcgcagctctccgggatcccgcgccagcatatcgcggtgtactgcaactggatgatgctgttcggcagcgccggaacggttgtcagctatctgtatcgcactgcgcctgatactggcgcattgccactggcgatgcagtttggttacgtcaatatggctattgtggcggtgatctttctctgcacgctggcgttccagcctgtcagcatgaggctgcgcactctgttgccggaatgctggctacagcgcgttttctccggagtattgctgatgattgccacgttgattctggtgacgctatga

SEQ ID NO: 292931 - DNA, 1293 bp, Morganella morganii
atgcaaccgaatattctggtctttttcaccgatcaacagcgctgggacacggtaggctgctacaaccctgccatcagtaccaccccggtgctggaccagcttgcccgcgagggcgtgaagttcgaaaacgcctttaccgtccaaccggtctgcggcccggcacgttcctgcctgcaaactggacgttacccgacgcagaacggctgttatcgcaataatatcgccatgcgacaggatgaggtgacgctggcgaaactgttcaatcaggcgggatatgacactgcttatatcgggaagtggcacctggcggatctggatgaaaaaccagtgccggaagaactgcgcggcggatggcaatactggctggcggcagatgcgctggaacatacgtcgcacccttatggcggtcacttttttgataacgataaccagccggtgcatttcgatggctaccgggtggatgaccagacctcgttcgcgctcgattacctgcaaaatcgccagcgggataatccgttcctgctattcctctcatacctggagccgcacttccagaacgatatggcgcgttttgtcgccccggatggctatgccgaacgcttccagaccgcagcggtgccgccggatctgattaaccgcccaggcgactggccgcagaacctccctgattattacggcatgtgccagaaccttgatgaaaacctcgggcgtattgttgattacctgaaagccagcggcgaatacgacaacacgattattttgttcttcagcgatcacggctgtcacttccgcacccgcaacgatgaatacaaacgttcgtgccatgagtccagcattcgcatcccctgcgtggcacggggtgggccatttagcggtggcaggacggtggagcatcttgcaacgctgctggatattccggtcacgatgttgagcgccgcaggcatcaaggtaccggatgccatggtaggccgtgatttgcaaacggctctggatactgatgattgggacgaggaggtgctgatccagataagtgagtcggaagtcgggcgggcgctgcgcaccacacgctggaaatatgaaattgtcgcgcccggcagcgatccgtggaatgagtctgccgcgatgatttacgtagagagccagctttatgacctgctgaacgacccgtgggagcgccagaacttgattgccagccatgaacatgcgcgtatccgcgataaattacgtcaggatattggccgcaaaatgacgtcgattggtgaagacctgcccgtcattattccggtggagtaa

SEQ ID NO: 292932 - DNA, 1245 bp, Morganella morganii
atggctattcaacgcgatacaaaatggaatgtgatcctctggggattctttttcctgttctattactacaactggtcttcctgcttcttgtttttacccatgtggctaacccggatggtggggctggataaaacacatataggtatggtgttctcctcctttgctgtggcggctatctgcctgcaaccgctgctgggctgggtaacggataagcttgggccgaaaaaatacctgctgtggctaatcgttatcctgatggtgctcttcgcaccgttctttatctacgtgtataccccgctgctgcaaagtcactttgcgattgggctggtagtgggcgggctgtatctgggatttatcttccacgcgggctatggcgcggtggaggcgtttgtcgagaaggtcagccgtaaccggggctttgagtacggacatccacggctgtttggctgttttggatcggcagcctgcgcaactatttctggcattctgtatggtttcgatccgacctggatttactggattggttcggcgctggctttgctgctggtggtgatcctgctggttgcacgttctgagccattgccgggcattgaagcggaacaagtccgccagcagaaggtgagcgtgtgggagctgtttaaactccgccgattctggtatttcacattatatgtattaggcgttgcctgtatttatgatgttttcgaccagcagtttattaatttctttacccgtttctttgaccatcaggaacaggcggcaagagcattcggttatattacaactgccgggaatcttggcgatgccgccgtaatgttttttattccgctgctgattaataaatatattggtagcaagaatgcattattaattactggtaccattatgacgattcggatcgtgggttcgtcctttgcctccgggccgattgaagtgctctttttacggatgctgcataattttgaagtgcctttcctgctgattggtattttcaaatatattgctgacgtttttgatactcgtctgtccgggaccatctatctggtgggcgtgatgtttatcaagcagtccgccgccattgttttatctacagtcgcaggtcatttgtacgacacgattggctttcataacacctatctgatcctcggcaatatcactgccgcgttcactctgctgtccgctttcctgctgacttcaaccccacgccagaaaacggcagatgcctgcgcgcctgccacactctaa

SEQ ID NO: 292933 - DNA, 3150 bp, Morganella morganii
atgaaaaaaacaaccggatggctctctttactggcgctgtcaatttctctggtctgccaccaggcggcagcaaatagccgcttacctgcgtcggcaattcgtgtgatggatgcacaaggcaacgacatcagtcagcctctgctggacaataatccggccacccaatggcagtcgaagctggactacaaccgctggctggagatggacttaaaagggacgtaccagcttagcgagctacagctcactaccccactcaacacgctaacgcacttcgacgtttacagcagcgatgatggcgtgacttaccgcaaaatcgcctctgcaaagagtggcaaaccgaacgagcgcctgccgcttaacgttcgcgccagccgcctgcgcatcaacatcaccgactattcggcgggtacgaagggcatggtcaacgatatctctctgacgggggataaaatcagcgacaccgcgccgatgccgcctgcgattcaggtcgccgattacgtaaacaccgaatggtcaaaacgccatctgcgccgccagaacacggcgtatcgccagcaggaagtcgtcagcgaagcacaggcgctggttgagcgggtgctcggcgcacagtaccagaaccgctttatcttcgcggttgcgccctccaccacaggcaaagacagcttcaccgtaaaagcggctgacggcaaaatcagcatcagcgggccgaacggtatttcactggcctccgggctgaactggtatctgaaaaattatctgcacgtcaattatgacccgctgaatgtgtccaatctgaccctaccgacaaactggccgatgccgaaaggcgtaacagagaaagatactccctatcagtacaaatatgccctgaacttctgcacgccgtcctacaccatggcgttctggcgctggcacgattacgagaaattcctcgactgggcggcgatgaatggcgtcaacctgatgctggatattgtcggccaggaagaggtccagcggcggatgctgcaccagttcggctacagcgataatgatgtgcgccagtacctccccggcccgtcctacttcggctggttttatatggcgaatatgcagagttttggcggcccgctgccgcagagctggtttgcccagcgcaccgagctggcacgtaaaatccacgatcggatggaagtgtacggcatcacgccggtcttccctggctttgccgggcaggtgccggataccttcgccgccaaaaacccgcaggcgcaggttatcgatcagggcgactgggttggctttgtccgcccgccgatgctgcgcacctacgttaagcagggagaggactatttcagcaaagtcgccgacgtctattatcagacactgaaaaccaccttcggcgatatcagccactactacgccgtcgatccgttccatgaaggcggcaaccgcgccgatctggacatggtgaaagtggcgcagaccgtgcaaaacaagatgctggagcacgataaagacgccgtatggattattcagaactggcaggagaaccccaccgacgcgttcctgaacggcctgaagaaagaccacgcgctgatcctcgatctctacgccgataacaagcctaaccatgccattcgccacgagttcagcaacacaccgtggatctggaacatgctgcatgccttcggtggccgcatgggcttctccggtatgccggaagtgctggcgcaggagatcccgctatcgctggcggagtcgaagtacatgaaaggcgtgggcgtcaccgccgaatcgctcggcaccaacccaatgttgtacgaaatgctctacgacatggcgtgggaaaaatcacctatctcctcgacggcgtatatccacaactggctcaccagccgctacggcgcacagtcgccggaaattgagcaggcatgggatattatggtgaaaaccgcctggcaccgccgcaaagaccgccagcgggctgaagactcgatcatcgatgccaaaccgggcttcggcgtcacccgcgcctgcacctactacaccgcgctcatcgactacgacaaagccgagtttgaaaaaatcctgccgttctacctgagcgtttacgaccgctttaaggataacccagcgtaccagcacgatctggtggatatcacccgtcaggtgctggctaacgcctcgtatgagtattaccgcgcctttgaagatgcgtggctggcgaaagattacaacgcattcaatcagctttccggcaagttcctgcgccttatccaacttcaggacaacgtactgagtacccgcccggaatttatgctcggaacatggatcaacagcgcccgcacgatgctggatggcatggacgactggacccgcgaccagttcgagtttaacgcccgggcgatggtcacgacatggggaaccgagcaggccgccgacgccgggctgcgcgattactctaaccgccagtggcagggactcaccggtgacttctactaccagcgctgggcaacctggattcaggcgctgaaaaacgcggcggcgaccgggcagaagcaggatgccattaaggtccactggttcccgctggagtatcgctgggtcaatcagaccggtaacggctatccgacgcagccttccgggcgcgatatccgccaactggcgcagcaggcgctggcagagttctccgtcaccagtgaagacttacgcccgtaccgggaaagtaaggataagcgcaatctggcgctgaataagccggtctttacccatggcgatattatcaacgccgaattctcgaccgaacgcgtggtggacggacagtcctcaacgctttggggcaataaaacctggcctgcggatctgattatcgatcttcagggcgtacagaaggtagacggtatcgagctggagtttgagcagacagcggaggatatgcgtaatccggtggtctccggctggacggtagaaattcaggacgcacagggtaactggcgcaccattcaggataaatcgaaagacttctcgcaaaagcaggtcgtcaatgcggtgccgtacaaaggcgaagcgcagaaagtcagggtcacgctgactggcgcggatttcaaactgcgcccggatctgaagccacagctggcggaagtccgcgtgctggcggatgcgcaataa

SEQ ID NO: 292934 - DNA, 1008 bp, Morganella morganii
atgaacagaaataccctgctctgcgccctgccgctgctggcatccggtatcggcctgcccgtcattgcggcggatattgataccgatgacattcagcaaaaagtggataccggcctcgaccagactccggcatcaaagccctggaaagttcgcgcaggcctgctgatcgaaaccgaaaacaaagaaggacagtcgttcgacaaagacggcttttttgaacccacattgtggatggatttctcccgcgatcgctggacgttttatggctcgtattatcaggaaacgcacggcaccaattacagcgatggattcagccgcgacaactggtttaaccaatacgaatttgacgcccgctatctgatggtggaccaaaaagatctggcgctgggcatgaccttccacttccgaaattacacctttatttatcaggataacccggaaaaaacgcagtccggcggttataactcccagcgctggtcgttccagcctgactggcgaattaacttcaccgataaattcaaatccactggctgggtgacagtctacaactggtacaacaatctgcatgaaaatggtctggcgaaccgggaattaaaaggcgaaggcggttttgaatatcactttaacccgaccatcgcagtgcgacttaattattttatcgatcggggctggaataccaacagcgacgaccagaccggtgagttctgccgctcacagctacgcccttatatcccaatcactttctcgctgtttgacgcaggccccaccaccatcaccccttacgggcgctggacgctggatgtctggtcgcaaaatgcctcacgtaatcaacggatgcacaccacggaaacccgtaccggcatctttatcgagcaaaagctgtcgccccatctctctatgacgctggattacgcctatgaagtgcaggcccggcatgatttatctcccggcgataagcctgttgtgaagttccacaaaaccggcctcggttttatctatagcttctga

SEQ ID NO: 292935 - DNA, 639 bp, Morganella morganii
atgagtacaccaatattaccgttcctgcccgataacacagactggatttatcagcccgatctcagcgacgaatttaacggtccggacctcgacccgcgctggtgcccgtattaccaggcaagttggggcgatctggatgcctcccgcgcccgctaccgctttattaccgaatccgacggcaccgtcagtctggaactgtacgtcgataatgccgagcagggatactggcagccatggcgcgccagcaacaatacctacaaggtggctggcatcaccggcggtacgcgggattatatgaacatgtggccgagcggtggttttcctgtcactaaccatatgccgtattacgacgcctttgccacccgctatggctattttgaaatccgcacccgctttctgagcggcagcggactggccccggccttctggttcctggggatgcaggatgcggtatacaccgaaaatatggaggtcgattcaccggaagtcttcaccctggagaacgccgttaagtttaatctgctgcctcgacaaggagaggcgagccagtcgcgacggcctatggtgagggcgcgacgctaccggatctggatgatggctaccatatttacggcctggaatgggatccagaatatctga

SEQ ID NO: 292936 - DNA, 678 bp, Morganella morganii
atgtttccgctgatttctctcaatcaccatgaaacaaataacgccgaagtgggcaatatctacgataacgatccacctctgcccaacgatgagacgtttaccatcgattattaccgggtctttaaaaaagcggatacgcccgccgacccatggccgaattatcagaacccgctgctgcccggatacaatattgccgaacgcgcctttattaatatctatggctatgacggcgataactccacctcaagggaaggcaagctgaacgacggcgatcacttcagcgccgcggacacctatcctaaaggtagcggcaccgaagaggagaatgaacgctggtacaacgaccagttccgctatatctacatagagtggcatcagccggtggacttcgacacgctggtcctctacgccacacaggcacgatccaccgcgccacagaatatccgcattgaggtttccgctgatggctacggcggctggaccgttgtgaagcctgatttcgatctggactggcagacagatgatccgggtattgccgaagggctgaaaatcatgctggatacaccattgcagcagaatcaacacgcccgtatcgtcattaataccgcgccggaaagctacgctttgagcgaaattgaaatcggcacacaaattaacgccaccactcgatttaaataa

SEQ ID NO: 292937 - DNA, 936 bp, Morganella morganii
atgcctgttcgccgcgcagctctatccttactcatctcactaactgtgcctgccgcgcaggccatcaccacgcccgaaatcgccgcctccgcgctgtcgccggaatgcgtacattaccagattgtcggcgtctgctattggttgttctgctcaccgtttggttgctcggtacgtacctcggtgaaggtacgccatttccgcccggacctggtggtatcagcctacagcgtaaccggacaaaatccgtggaccgaaatgtcgccactcagctcgccgctgcccggtatcgctgaagccggtggcgatactaatccccgcgcagtcggccagcacagcaaagtccgctttaaaaatgctgatgcgattggcttccctgccggtgatgcgctggcgaatttctttgcccaatttggctacgtctgcgccccatcgtcacagccttttctcccctactttctcagcacgctggatgcgctcgcctggcgcagcggtgtaccggaaatgttttacccggaggcgttaacaccgggactgcgtgaggtgagtaaagatggtgatatgtggggcaatatctacccgcgagccggggcgctcagccagacgcatgactacaaggccggggcggtcatcgcccaacgcgcagccgatctggtaacgcgcagcggtcagtcacatgtttatattcccctgaccgcctcttcacacgatggctactggcctccagaccctgttacggaaggcgacagcaataaccaccagtggcagatgctggctcccaaaaaatccgcctcctgcgcgatcttcccggatggatcctccaccgattcttacgccgatgaactggcagaagatggcgcgtatgtctggacactgtggcgaccctataaatgctgtccgcgtcgtgggcagacctttcttggtagcagcggaggttaa

SEQ ID NO: 292938 - DNA, 1368 bp, Morganella morganii
atgcgctcagcctggtgtcttctgttcgtcgcctttctcgtcccagcggctgataaataccaatatcagaaacaaggggcgatcagcgactggatgtattatcgcatcggcggcggtgcggccattcccccttcagcaacccggcgtaacaccttcccactgacggcaggcgtaagctggaatagcgacatgatgtgcggcaatttcgatattgataccacggtgcgcaaccagcttaacggcgtgacggacggctttcagcagctaatgggcgaggttatcgaaagcgcgaccagcgcggtcgccagtctacccgcgatggtgatccagcgtgccaatcctcagctctacgatctgctaaccaacggcgtgcttcagggacggctcgacttcgataaatccctgttaagctgccagaagatagcaggcaagatgaccgattatgcgctcggtccggcatggacgcagagcgcccaggcagagaactatcaggggatagcagccagcgagaaagacgccgttcgcgccgaccagagagctgccgaagaagcggcagagaaaggcaaacgctgggtgggtggcgagcatcgcggcggcaaaggtcaaccgcccatcaagctggttcgcgatacaacggttgcaggctacaacatcctcaataatcgcagcgcgaccagcaccagctcggtatccagcaacgactgtcagggtgaactttgccaggtatggagcaaacccgacgacgctgcacagtggctgactcgggtggttggcgagcagaccattaacgtagccccggataacgatcaatccggcgatacgagccagcaaagcggcgcacaatccggcgttgggctgacgccactgattcaggaagagcaggataagatccagccgctgattgtcgatatggtgaaccgcagccagcccgttaatgatgacacattagcccaagccagcggtggcgaacttcatctgacacgcggcgttatcgaggcgctgcgcgacgatcctgatgcagcagtacttatccagcggctctccggcgaactggcactttctcgcgtgatggaacaggcgctgatggcccggcgcacactgttggccggaatgcgcgaacccaatatctccgatgaaaaagaagcacaaaccgcattaacccagaccaccgcccagctcgaccaggaactgtcgcagcttaagctggaactggatatgcgtcaggcactcgcggataacgcggcgctcaccatccttgaacgccagacaacgcgagcgaagaccaaaggccaggctttcggcgtagaagacgacaccgacaaacgggtggacgatctcaacaaacccactggcggggatacgcaatga

SEQ ID NO: 292939 - DNA, 258 bp, Morganella morganii
atgaaacggctgatactgtccagctccctgcttctgatctgcatggcagtgatgttttatctggctgctgacaatacaccgcagattaaccgcagcgacctgctgccctggcgcataatgctgtacggtgtgatttgtggtgtgggctggcatctgtatgactgcttgccgccacatcgtccggcaatccgccgtatagcgctgatatttatcgtactgattgtgctcaacgaaatcgtgccagaggtattccggtga

SEQ ID NO: 292940 - DNA, 1482 bp, Morganella morganii
gtgacgaccaacagctatctggaatactttctgacgctgctcagttgggtggtcaataacgggttgtggaatgcgatcagcgcgaccggattattcgctctgccgctgctgattaagctgctggcgctgtggttacaggccagaagtcagggggcggatgaaggcaacaaagccgccctgtccctagtatggaccgagcacctgatgtacacctcgctgctggtgattatgttcacctgcgtgccaatgttgaacatcgatctcgataccatcaaatatgacaccacgcgctcaaagcagtgcggcatgtcggtaccacaacccgccgataccggctaccagccgattattaactcactgggcggcaaaaccgccgccgtcccggtctggtggtactttattcatgtgatcagcaaaggcatcaccagtgcaacagttgccaccctgccctgccagccagacctgcgtcagatccgctttgaggtgcagcacacccgaatcaaggatccagcgctggctcaggaactgcgggattttgtcgaggagtgttatgccccttcccgcgcccgtctgaaattccgcgccggagagctggacgatgacaccagtgacgatacggcctggctgggctcatcgtattttctcaacacggctggttactacgataccgaccatgcactttcaccacacagtaactggccgtacagcacatcacgcgatgccgggcttgccgacactggcgcgggcggctaccccacctgcaaacagtggtgggccgacgacaccattggcctgaaggcccggctactgcaactcccggccccggatatctggacagcgtttaaaaagatcggccagtcgcaggcagtatatgaagaggctgtgctgcgctcgctggtcagtgaacgcaatatgcaggtatcgcaggatggacgcgtttaccccggctacggcggtaatgtcgatggtacgctcaccaacgccgccacgcggttagcctccactactgggaacatcataggtagtgcggtggccttcccggcgtttgacagcgtgcgccaggcgctgccaatggtgcaggcgctgctgcaaatggcgctggtgatctgtattccactgataacgttgtgttcggcgtgggacgtgaaggcggtaatgacactgacgtttgtgcagttcgcgatgttttttctaacattctggtgggagctggcgcggtggctagatagctggctgttgggcgtgctttacagcagtgatactcacagtagctggaatctggccgggatccagaactcgcaggatgatgtgattatcaatctggtgatggggtcgatgtttctggtgctgccaacgttctggctgggggcgatgacgtgggctggagccagggttggcgtggcgttgaatggggcgctggcgggtggggttaaggtagcgcaggatagcggggggaaggctgtgggaatgattggaaaatga

SEQ ID NO: 292941 - DNA, 1317 bp, Morganella morganii
atgactacgcaaagtaacaacgataataaaattaatgcaaatcctactaaagaattcttcatagaaatgttaacccgagatattgcattagatcgagcgattcttgaccttatagacaatagtgttgatgcttcccgacaagaaaataagcctacttcatggattaaattatatcttagcgaagataagtttgaaatatatgataattgtgggggcatggatcgacacatagcacaaaactatgcgttccgatttgggagaccatctaatagccctgaaacgccgaactcagtaggacaatttggtgtaggaatgaaaaggactctttttaagcttggaaaaaatttcattgtagaatcaaggaaaaatgacatcagtttccgtataaaaatagatgttgatgaatggaaaagtcgagaagagaaagattggacttttgatattgaagatgctcaagatttagatcttcaaaatggtgaaactaaaataaccgtcacaaacctttatccggaaatatctagccagttcagcctcgatacattcaagaacttattaagcaatgagatctcctatgctcattttaagagcataaataaaggactaaaaatttttataaatggtatccaggcatcagagtacaagctatcattgttatccactcaggaaataaaaccattcagaaaggaaatcactagtgatgatgtgcatattaatattattgctggcatatcagaaagggattttaaaaaaggtggatggtacatagtttgtaatggaaggttggttgaaagtgcacaacaaagcagtataactggttggggagaggataaaataccacagtatcatgctgattttgcttttttcagggggatagtcgagtttgattgtataaactcaagtaaactcccttggacaacaacaaaaactggcgttgatagcaataaccaaatatataaaactgcattgcaccacatgaagattgcaatgagacaaatcatagcgttcttgaggaatagatcgaaagaagactcacagtataaagagtcgttacttgataaaaggccattgaatgacgcaatacatactgcgattcataatagtaaacaaatagttcctacagatgtagaaatttcagaacaatttattgcacctgatccaattgaaccattatccgagccaaaggaaacatcaattcaatacaaagtgttaactgaagaaataaacattgtaaaagagagtttgggagttactacaaattctgaagtaggaaaacaaacttttaattattatatggagtatgaatgcaaaaatgtctaa

SEQ ID NO: 292942 - DNA, 984 bp, Morganella morganii
atgtctaactccggaaagaaaataaattatagtttgcgtcctgccaaaaatattgaaagaaagatgattagggataccttaataaggctattccctttcggtatattttctcaataccaatacataggttttggctctaaatattttgtagatttctctattattcataagtatctacatataaataaaatgatcagtatagaaggcgacacaaccaaccgggatagatattattttaatagaccttacgagtgtatagatatcaaatttggtcattccactgttgttttgcctaaactagacttaagtcaaaaatcaataatttggttagattacgatgaagcattctccaattatatgttggaagatctatcaacccttgtatcaagtcttccaagcggttcgattgtttgcctaagctataatagtcatccatataatttacaaaatctaagaaatgaatatccagatatagcagaaggtttttacagaaaaaaattcgtcgatatctttggagaggaacatatacctggagatttcgatgagagaggatggagtaataagaaaaccttttcaaagtttatccgtaatgttatcacatcgcaaataaatacaattttagcaggcaggaataatatcgaaacttccgaaaatgattggctaagcactaaacaaattttatattttgattatgctgatggagcacatatgtccactgtgggatttgtaattacctccaaacaggataaccctttgttagagtcatgcaagttacatgaattgagcttcttcagagatggtcaagagagttacgaaataaacattcctaacctaacatctaaggaaatacggtttttaatggagaagatgcctcgaacagaggaattaaagcttgataatactattttcaatagtgccgatgttacagagtttcagaaaaattatagatattatccttcctttatggaaattgagtcattttaa

SEQ ID NO: 292943 - DNA, 1629 bp, Morganella morganii
atggaaatgctagagtttgaatatgatgcagtaattttacgtcaaacagaaaccagtaaacctataattttatttggtgctcctgctgttgatattgaaacttgggcgggtattcctcagaagaagacatttcttcctgatggggctgaaagctccggttttcaacgagttgaaaaccaatcaagattagaacaaatcagacgtttttatcttaatgagagcaatgtaattcaaaacagcctaatatgtgcattgcgtggagttaatagtggaaaagttgtttttaaatcagagtctgactccgtagtaggcaaagtgaaaattaactttcctaatctctacaatgctgattatttatttttattctcattacttcgtcaatcactagaaagcaggttaggtaaatataagcaaccaatcgatagtgtactatttgaaaaattaaaaggtcaactttcacgacaaatatcaaatgaagatactgaattagaacaagatgattatctagaaacagaaaatgagactgaatcagttattttagaagaaactcatttacatgacttcttacgtgacgttgttattagacatgaaatcttaaaagatatagatccgattctcttgcaaaacatggataaatttttaggattcgatcgcgaggcattactatctttccttcttcctgtcacgcttgtcgatggtcaacatcgactgaaaggagcaataatagccgcaaagcaacatattcaaaatgataaatatgttgatatgattgcggagagagtgtttgctgtttcgcttttaatggacgatgatccaaaagagcaggttttccaatttgtagtgataaaccaaaaggccacaccaattggaaaatcattattagggacaattatctcaacatcattgactaatgatgaaatgagtttagttagtaatcgattaagggactcaggtattttgctggaagaagcaagagcaattacctgggcagcacgtaatccagaaagtccgttctgtggccttgtcgaaagagggatgcaaacagacaaaaaaggactgctccagtggaacgttatgggatctctcatccagatttttaggaatttaaatggtggttgtttatttcattccaaagttgattatgcaagaacttggagagataacttccttgaaagttcagggttagttgaatccgatggctttgatgatgcttatgaaaaatggagagcgcttgatggtgtttggaaagttttttttgttattttttggaaaagaataagagatatatttggagatgtaacagacaacacacgctttaattattggggaaatactcgtcgttctaatttattcaataaaatatctttaacaatcctcgctgctgatttctttagatatttatgcgtagcagacattacattagataacgaagagcaaattaattctgttatagatgggtggcttcaacgagttaacccaaaatattttgatcgcgactgggagcttgcgggcgtaaaaaaagactcaacaggcataagagcaaaatggtcagagttatggacagaatacagagacagtaaaggaggtgcattaccacaagtaaaatcttacagacaagcgaaaaaataa

SEQ ID NO: 292944 - DNA, 867 bp, Morganella morganii
atgcagcaagaaatttcacatataaaaccaccagatttattaatgggggtacgccgtgatatgatgcatgctgaaatcattcgtgaatggtcaaaatggattattgagcaattcattgatgaaaaaaatatcacgcacaatattagctttgcagttatattaaacgatatcaatctgacaataagtgagcttgttggaaagcagatgtctgctggcgataaaaaggaaatcgtaatatccattagtagaatggtttttgatcgcataattcaactgaataaattgaaacagaaacggataagtatatctcaccatataaaaaatgatttattaacaatttatggaccgaaaccaagatgttggttaacaggatatcaattttccgatgaggcaattcataattttactgcacgtaaagatgaatcgttagaaataaaacttccagctcttattgacaaatataagccaatgggtctgaatgccagggatctatctattgaagttgatcatttgcatcctttttcccttggaggagaagatgatatccagaattatagattaatatgtggatgggccaataaagttaaaagtaaccatattagtggatatagcatggggacgcgagcagatattgcatgcgggttatttccaaaaaaatattattactgggtggtcagactcataggaatgaggcgtaaatgcgaaattgatggttgttcgaataatatcaacaactcagagcttacagtcagatcatctctaggggactcaaaattaataacgccaataagtatgcaagttgtttgccagcaacatgcttcttcaacaattggaagatatatcagcagatcactatacgagggttaa

SEQ ID NO: 292945 - DNA, 345 bp, Morganella morganii
atgatgcaacacattgatattattcgtttatcggaaaagcaaaaacagcagttgatcactctcaaacgtaaaactggtatagaaaactggaatgtattatgccgctgggcactttgtaaatcattggccgatccaacagtacttccgaaggaggatattccttcagatagtaatgttgagatgtcatggagaacatttgccggtgagtataacgaagtctacagtgccatttgtttaactgcatttaaacaacaacatagcgagaacgattttttgagatttataaagagtcatatctctagaggtattttcttcctcttaaaagaggtgaatctaaaaaattaa

SEQ ID NO: 292946 - DNA, 1974 bp, Morganella morganii
atgatatttaatcagttacagattttaaattttggcatttatcagggcgagcattcaattaatcttgaggtcgagcacgataaaccagtagttttattgggtgcattaaatggaggagggaaaacaaccttccttgatgctatacaattagctttatatggcaaacatgcaagatgttctaatcgggctggtactgtttatggagcctttttggccagttgtaaaaatcgtttttcagctcctgatgcagaggttaaattgacattaacttttacgcatcaggttgaaaacagaattaaccgatatgatattgtgcgtagctggaaagttaagggtgtagaaactaaagataaaattaaagtctatgttgataatcaactggacgaatatcttagtcaatattgggacgaatttgttaatgaatttatccctcttagtttgtctgacttattcttctttgatggtgagaagattgaaaatctagcacatccgcagcgttcatcagagctaattaagactggtattgaaagtttattaggattggatttgctatcccaattacaaattgatcttgctcaagttgataaaaaacgtcgggcttctaatgttgatcaaagtgttattgcaagggttgaggcatgcgaagatgaaatgggactatgcaatattgtagtttcagatcttaaaaaagaaattgctgaaattgagcatgatatcaaaagcactaatattgctattaataaatctcgccagactgtacacaatgcgggggcacatctattagaaaaacgtgatgagattaaatttgaactaggctcgattgaaagtaaattaaaagtaaacaaatccgaaaaaattaaactagccgctggtgttggaccgcttggcctagtaaaggatctaatcaattcaactaaaaagcaaataaatttagaaactaaggcaatacaatctaaaatcttagatgaagctattgataactataatgaaaagctcatcaatgaactcaaaagaaattctgtagccgaacaaactatttcttgcgttagccaagtaatggctgaacaagcagtaattcggaaggaatattcagatgtggaatgttttcttaaaacggaaatcagcatttttaatgggttagaagagcggattacgcgggaagaaaaaaaacggcaacagttagaagctgaagaaatccagctactcgaacagcaagcgtttcttcagaaacagttggatacaatacctaactatgagtcggttaagcatttaattattgagttagccggatttgagttgacgctaaaaagtctcaatacacaatttaaaaataagcaaaaattacttgagcaggcaattgctaaaagtaatgtattgtcacagcgttataccaatcttttagcccaacaaagtaaagatacctttgagcaaaagcgatctattgaggtcagtagacatattaagaatttgaaatcgactttgcagggttttgctgaattgttaataagtgaaaatattgaacgattacagacactagtaaagcagaaatttgatgcgttaggaagaaaatcgcaacttattagtgggttggaaatttgccctgtgactttttctataacgttgtatgatgccgctggtaataatcttgaatcagctaaactgtcagcaggcgagcgccagttacttgcaatcgcagtattatggggattggctgaagcttcaggtaaagagcttccaactgttattgatacgcctcttagccgattagatggtaggcatcgcagtaaattgataaataactatttccctaaagccggtccacaggtaatattactatctaccgatgaagagatcattgctgattactatcagcaaattaagccttatgtaagtcgtgaatattatattagctataatgagaaaaacagaacttctagttttgaagaagggtatttttatgatgcaacacattga

SEQ ID NO: 292947 - DNA, 1665 bp, Morganella morganii
atgagttcgccagtctcaacgccttactccgcattcaacaaacttggtctgagagcgactgttgctgcgattatttctcatatcaaagaattatatctttctgatcaaatcccatgggttgtaggctacagtgggggtaaagactcaactgctgttttgcagttggtgtggactgctctacaagagttgaagcaagaaggtaaatgccacaaagatgtgcatgtcattagtacagatacgcttgtagaaaaccctattgttgctatgtgggtagaaaagtcattagagcggatgcttgaagcaaagatacagcaaggtattcctatccaaccgcatcgtttaacacctgatgttaaagataggttttgggttaacctaattggtaaagggtatcctgccccgcgctataaatttcgttggtgtaccgacaggcttaaaatttcaccttcgaacacatttatcaataacttggttgataaacgtggtgaagctattttggtgctgggtactcgtaaagctgaaagtgcgactcgtgctgctacgatggagcattatgaaactaccggaacaaatactcgtcgtgccgacggcctaacagcaaatggtactttagatagggtgtgggtttatcctccaatctccgactggacgaatgatgatgtctggatatatctaaactcggtacctaatccgtggaatttccctaatcagagtttaatgggcatgtaccagggagcaactgaaggcggagaatgtccgcttgttgtggataaaagcactcagagttgtggtgatagccgctttgggtgctatgtttgtactatggtatcagaagataaatctatgtcagcaatgattgctaatgatgaagaaaaagcatggatgtatccgttattagcattgcgtaatgaaatagacgttaacgatgtagatcatagcaagaaactagataagctccgtcgtgataagtctcgacgtgattttcgtcgcatgaatgggtcattgactgtacacataaccaaaaatggagctgatatcgttcctggtccgtatgtacagagttttcgtgaagaattatttgagaaagttttgcaggcacaaatagccgtacaacaaatggggcctgccgaagtaaaaaatcttgagctcttgcctctggaggatatggaagaaattcgtcgtatctggttggaagaaaaattagaagtggaagataatcttccggctatttaccaaaaggtaacggggaaaccttatcctggtttgcgtcgcgcccatcacccaattctgaatagaactgtattagataaactcaaaaagttttgtgctgaaaaagatgatagcgatggtttaatgtaccaacaaatacgtgcggcgatggctattgctaataagtatagaaatcaattacgtcgagcgaatcttgcaactgagctaactgatagtttagagaaaggtgcgtttacctctttggatgatgcaaaagtctttgcgcttgaacgcaaaagacatgaattacaaattaaatatgataattcacctaatctatcagaaaaagaaaaggatgcaattaatgagcaaatcgctattattacgcgctcagtcaaggagcaaggatatagttcgttgctgatagaaacagaggttgtaaacgatgatatttaa

SEQ ID NO: 292948 - DNA, 1080 bp, Morganella morganii
atgaataatatagtatctggaatcagttttcccgcaatccgagggattcaggccggacatgaatactatattgtaatgtgccccctcaaaaggcttaaaaagattttcactctagatgagtctatgcttgctgaaagcgataaagctcagcgtgtgttaaatcatagccgcattccacaaattgcccgttatattcatagcaataggcatgattatacgttttctgctattacagcatgcattgaagggcaaacgtactttgagcctatagctcctgagggacacggtaataaaattggtaatcttgttgttgatgaggatgctgaattttatctaacagatggtcaacatcgtagtgctgctattcaacaagcactggaggaagaccctgctttaggtgatgaaactatatcagttgtcttcttcgttgataaaaatctgaagcagcgacaaaaaattttccgtgatttgaatctatatccggttcctgcaaatagatctatcgcagtattatatggatcttctcctgaggaaaatctgactaaccatgtagttcaaggtagtgagttttttaatggtgtagtcgaattttctagccgcataagtaagcgttcagctaagttttttatgcacagctcagttcatgcggcctgtatggagctttgtcctagtatcacaaaagaagactggcgagaacaagctgaaaaggctgttgaatattgggatgagctggcaaaaaatttacctctatggcagcaggcgaaaaatcatcagataaagccagcggatagagcaaattatgtattattcagtgctattttactgaaaagctttgctatgtttggacacgagattttgtgtaatagctctaattggaaatcccagctaaaaaaatttcaagggttaaattgggctcgcaccaacaagctatggatagagcgctgttttaataaaggtcgtatggatcatagcgttcattctgctttgttgacgctaaatgccttaaaaaaacatttaggacttccattgagtgctgagcaacaaaaagtcgaagataaatttttaggaatgaaaaaatga

SEQ ID NO: 292949 - DNA, 1125 bp, Morganella morganii
atgacagtctatctagattacaacgccacaacacctgtacttccagaagtagctgatcttgttcataaaatgatggtcgaagaatacgggaatgcaggcagccgcacgcacgaatttggagccaatgccaaaagggctgtggagcttgctcgtgctcaagttgcggcagtggttaaagcggataaaacagatgtaattttcactagtggtgcaacagaaagtaataatatagccatattaggtttacgtgaatttgctgagcaaaccgggaaaaagcatatcatcaccagcaagatagaacacaaagcggtactggaaccaatagcgtatttagagaaacatggttttaatgtgacttatcttgatattactccagatgggcaaattgatactgaacaattagaaaaatcattgagagaagacacaatacttgtatcaattatgcacattaataatgaaacaggagccattcagccaattgataaagtatgtcaattattgaacggacatgatgcttattttcacgttgatgcagcacaaagttttggtaagtattcatttactcttgaaaacacacgtatagattttattagtgctagtggtcataaaatttacgcaccaaaaggaattggcgcccttatcatgcgacgtcgtggctattctagatcgccattaaaaccaatatttttcgggggtggccaggagaaagggttgcgcccaggtacactagccacccccctaatagcaggcctaggtttagcttgtgagttagcaattaaaaatgcagataattggtttagccacgtatccattttaaaaaatgattttctcgctgctattactgaaattggtgctgtcgtaaatggcaataatacatcaccttatgttttaaacttttccatcccaggaattaactcagaagctgcgatggtaaaattaaaaggtgttattgcagtttcaaatggatcagcctgtacttccagtagctacgaaccgtctcatgtactggttgcaatgggtatggatgccggacgaataaatggtgcaataagggtttctttcggtgctgaaactcaacacataccttacaaagaaatcatgaatctactggaaacattacgataa

SEQ ID NO: 292950 - DNA, 990 bp, Morganella morganii
atgaatgatttattagcctggaacatcggcaatgaagatgttgattgtttcgtaacagtaatgaaagccaaagacatctttcagttatctgaagtctctcgtgcaagtgagaaacctgaagatggatatcaaagacttctaaatagaaagagagctcaagatattgctgcttatctggacgaaggcaacataataccgggagcaattatattaagcgcaagaaaagagtataacttaaagtttgacaaaactaataacacgattatttttgatgagaataacaacgaaaaactacttgtaattgatggtcaacaccggctatttggtgccagcatggcagaaaatgatatactcttgccagtttgtatatttaaagggcttgacttgaagcaagaagttcaatacttcatagatataaattctaaccaagttggagtacctaaaacattaagaattgaactccttaaattcttatctgagcctgaatcaattgaagctactttgattaaattgttccgtgagttaagtgaagatattgaatctccgctttatggtaaaacctcatccactgtatcaataccaggaaaattgtcgcatgtaccctttcaggcaagcctatccggtttaattgaaggtcgtatacttaacgcattcaattacgacgacaaaaagaaaataattattaactttctctcggctacatctcgcgtattgaaggatattgaagatactgacaagagattaattacttctgtgttctttcaagcattatttaaaatatttgaagcaacgtgttccctgtcactaaccttctataaaaactatcaggaagaatcattatacaaaatactcagtggcttcaacaaaattaattttgaggctcatagaggcactaactcacaaaacatcaaagcactttctgatgatatgcttcaattgatcgagttgcatgtcaaaatgtttaagacgccagatgatcttttaggataa

SEQ ID NO: 292951 - DNA, 894 bp, Morganella morganii
atgttatccgatattttatttaagaaaataatcaataacattagtcagtatagtttatccccagagataggtcgtagttattattttaaagatacaataaaacaatatttattagatcccgctagtttcttaacttttaattgtgatggcattagccatttatctgttgaagttaagggacaagactatagaaatgcgttgttcagtgattattactatggaaaaattagaattcaagaacaaattaacaatcttcaattacagatacaaaatacaagccaagcatcatgggttttggttacagcatattatgcctccttttttatggcaactgagatttcgaagctatgcggtaaatatataattaatttctctgatgaggatattaaatttattttaaatcattcatatagccctatcgaccaaaatataaaactggatgaaagtaattacggttaccaagtaaacatcacacattcagaaaatgataaaatgattaggctcgtttttcataagagatcccccagacctcatgttgaagtatggaaaaacattgttgagatagtgaatcaattgagtgttacagattcaaacattcattttaaaaatttatttttaaatatttgtgaagaaaacaatgatagatggcacaatccaagtagaataagaaatgactggaactataaatttgcaaattattatggagaaaaaggtaatgctcttggcgcaacattctataaaaacataaaaagttatagttcctcaatgaattgggccggaaatagaacgatacaaccatatgacgaaaatatagttgctggattatcttatatttatcatatattatcaaagacgatgaactccattaacgatagaataattttcacccaataa

SEQ ID NO: 292952 - DNA, 294 bp, Morganella morganii
atgccaacttcatcttgtcctgaagcaacatccttatcattgtctatctcatctgaggcctgggaaaaggtagtcagttttccacccgatccctctcaggaagatgaccgcctcgaaaacctgattgtcgcgaccatactgacattcaaaagcgcaggaccggaccgtaagagcattaatttcggtctgtactgttttcccgccgacggcagcagcaatgtaccgctgatgacgccgctgcgcttaacccttgaaaatgaccacctgttggttactgcccttcacaccagctga

SEQ ID NO: 292953 - DNA, 912 bp, Morganella morganii
atgaacagaagcaacgatctttaccagaaagtcaccgatgaaattatcgccgcgctggagaaaggcgtgatcccctgggttcgcccatggcgggaaggggaaccggtggtgccgatgaatgccctgtccgggcggttttatcacggcatcaatattcctctgctctggaacagcgcagagcggcagggatatgaaagcgatcgctggctgaccttcacacaaattcgcaatgcgggcggtaacatccccaaaggcgaaaaatctacactggccgtgttctatctgccccaacaacgcgaggtagtagaccgcaatgggaacacggttcttgatgctgacggcaaccctaaattgacgtcctacgccgtagtacgcgagttccggctgttcaatattcagcaatgtgaaggactgccggaggcgttttcacagcctgtcgtgatggtcgatgatcctatcgccgccgctgagcaggttgcccaacaaagtgcggtggtgatcactcaccgacgccagaatcgggcgtattactcgccggggcgcgactgcatcatcatgccgcatcctgagcagttcacttcgcgtgaggattattatggcacgctgctgcatgaactgacgcacgctactggacacgcttcacggctgaaccgggacggcatcactgccggaaaacataccttcggcgatccgacgtatagttttgaagagctcgtcgccgaaatgggtgcagctttcttgtgtgctcatgttggcatccagtcgaagctacagcatgacagttacatcgcatcgtggctgaaggtattacagcaggacaaaaaagcgattttccgcgccagtggattagcgcgtaatgcctgtgaatatctgcttgaacgggcgcagcagccgttagcgctgagcgcatga

SEQ ID NO: 292954 - DNA, 1605 bp, Morganella morganii
atgcgcaaaaagcaaaacaccacaccatccactggcgaaccagacgtcacggagggatggctgcatcctgaatcggcacagacgttactggctgaaactactcgccaacagctgatccagtttattcgtcagagcaccgccgttcccgcctcactgtttgaacgcttctggctgataccaatccaccgtttcgcagaactggcgcagttgttcccagcctcggaaaaccaccaccattcccacgcaggtggcctgctcgatcacagtctcgaagccgcctgctatgccgcacggctgcggcagagttatctttttccacctgatgcagcgccggaagatcaggccgcgcagtccgagcgatggacaacggtcatcatctacgccgcgttgctgcacgatcttggcaaactcatcaccgacatcgaagtggaaaatattagcggtcaacgctggtttccatggcatggcccgctgacccagccttatcgatttcgttatctgccgcaacgtgattatctgcgccatccagctgcggtagcccttctactcacccaactactccccccggaaagcctcgactggctcgccgccgatgccgctgcgttatccactctactgcactgtctgaacggacagtatcagtatgccgggctggcgggtgaactggtgcagaaagccgaccgggcgtcggtggcgtttaatctcggcggcgatccggtcaaggctatccaccgcccacaaacctcgctgccgcagcaaatcatcgccgccctgcgcgacctgttggcaaatgagttccgactcaacaacccgagcggtggctctgatggctggctgacggaagaagcgctgtggctggtcagtaagaacgctgccgatgccgtgcgcggctggctgctgcaccaggggattgacgccgtaccgcaacataacgtgcggctatttgatgagatgcaggcacaccagttgctcattccctgtgaggataaagccatctggcattgccgggttgaggccagcggcggctggagcagtgaactcacgctgttacgcttttccccttcgctaatttgggaagatccacaacagcggcctgcaaccttcagtggaaccgtcacaccgatagcggtagtccagaatgcgacagaaacagtgattgcaacggatatcactgtggaacaaccatccccccaacccgaacagaacgataccccactttcaggcgaagccttctggcagtggctggttcgtaatgttcaggctcaacatctggaagtcaatgaacctaacgcccgaatccataccgtcgccgggtcggtgtttctggtgacgcccggtattttcaaactctggcttagcacctgcggtcagaatgtccctgaagaatactggcgggaggtacagaagaagttccagaacctgaatcttcaccgaaaacaaaaaaacggcctcaacatctggcactgcgccgttgtcggcccacgccgttgttcacgtctgaagggatatctgcttgacgatcccacgccgctttttggagatgacgttccctttaataaccctcatctcttgctcaatgaaggaagtcactcaaatgacctttga

SEQ ID NO: 292955 - DNA, 927 bp, Morganella morganii
atgacctttgaacagatcctggaagagtatttttttgcccgcttattgcgacctgacacccagagctgttatcgcacggcagtaaaccagttcactcactggcgcaacgtgttacccgccgaagtgacgtcgcatatggtgctggagtggcgtcattacctgctaaatgtgcgaggtatcaagccagtgagctggaaccactatatgcgccatatgcgggctttgtataacttcgcgattgaacaaggattactggagcagttcatcaatccattccagaaaacatcgctgcgggaatctcgtaagaaaaagaaaactctgacccgcgagcaaatcctcgcttcccgaaaagtgctgaaccaatttatcgaacgggagaaaatgcagcgcggctatcgctcgcctttatatccggcatggttttggctgaccgtggtcgaaaccttcaactacaccgctatccggctgaatcagcttattcacctgcgggtcagggatatcgatctggtccatgacacgctgtttattcagagcgaaggcagcaaaagccatgatgaacatatagttcctatcgcctcccggttacggccctatctggagcagatgcttgaagaagcgaaaacaaagggaatgcgagctgacgatcagttgttcaacatcaatcgtttcagtcggcggacgctgcgccagggtaaaccgatgacagaaaatcaggtgagttatttctttgccaaactcagcgatgcctgccacagccgtttttcatcacatcgctaccgtcataccgttgccacagaattgatgcagaaaccggagcaaaatttgtatgtcacgcagaaactactcggacaccgcgatattaaggtgacgctcagctatattgaacacaatgtcgagatgctcagaagttgcgtggagagagattga

SEQ ID NO: 292956 - DNA, 264 bp, Morganella morganii; identical to SEQ ID NO: 277406

SEQ ID NO: 292957 - DNA, 237 bp, Morganella morganii
atgtgttcacggcgttatggatttgttcaggatctggctgttgccctgcaacgaattgtgattctgcattgtcagcaatatgctgcgaaggtttattttatgattgcagagaatgataagttaaaacgctactatgacagaattttacagcacggacatgataacgtactatcagaaataaaagcgggccttggtgaaggggggaaagggtatgtactcaaaacgcgacatttctga

SEQ ID NO: 292958 - DNA, 153 bp, Morganella morganii
atggtttcgcttaaaataggcagtggtagaagcctatcattagaaattatgttatctactattttttatgacagcttattgtttgaaataacagacgataatgggttgatagtaaaatttgcatgttacaagagcgttatggctataaaataa

SEQ ID NO: 292959 - DNA, 1263 bp, Morganella morganii
atgttttttagttttctttttacttctcctgtgttcttttggtcatatattgccctgtgtgttccccagccatataatcgtggggaacacgggggaaaaccatcaatgaaagtatctatcgaaaagcgacagccagaccgcgaaggaaaacgctctttgcgcttggtatattactacggttccaacgttgaagacgggcaacgtaaactgaaacgttcacacgagccactagacatcttcatctatgacaaaccgcgctctccagcagagcgagagcacaataaagaagctttaaggatcgctgaagctgtgcgatctaagagacttcttgagagcgagacatcaaagcataagctggaggatcgaactaaactctctgccagtttcttcgattattacgattcagttaccgatagcaaagcttctggcagtaaatccaattattcaatttggatctcagccggacatcatctgagacgctaccatgggcgagcagaactcacattcgaagatattgatagagcctttcttgagggttttaaaacttatcttttgaaaagtgcaacgacgaaatctgatcaactgctgtcaagaaatacagtaagcagttacttcaataaaataagggcggccctgaatcaggcataccaagaggggattatcagagataaccctgttcggacggtgaaaagcgttaaaccagaaacaaaccaaagggtttatctgactctggaagagataaaagctatggcaaaagctgaatgtcgctatgacgtgcttaaacgagcctttctgtttagctgcacaacaggactgcgctggtctgacatacagaagctagtttggtcagaagtggaagaatttgagcaaggccattttcgaatcatttttaagcagaaaaaaatccagaatagaggaacggcacttcaatacctcgacttaccagattcagcggtaaggttgatgggagagcgcaaggataacgatgaacgcgtgtttaaagcattgcgatacagcagctataccaacgtagcgctacttcattgggcaatgcttgctggaataaccaagcatgtaactttccatgccggtcgccactcgtttgcagttaaccagcttgcgcggggcttagatatttattcattatcacgcttgctgggccacagtgaactgaaaacaactgagatttatgctgatatcttagatcaaagaagaagggacgcaatgcggagctttcctgatatttttgccgacagtctttaa

SEQ ID NO: 292960 - DNA, 1266 bp, Morganella morganii
atggcactgactgacgctaaaattcgggcggctaaacccgatgtgaaatcctataaattaaccgatggtgcaggattgcacttattggttcacactaatggttctaagtactggcgattacgctaccgccatttaggtaaagagaaaaccttagccttgggtttataccctgatgtctctttatcagaggcgcgtttaaaacgtgatgaagcaagaaaattgattgctgacggtattgacccgtgcgaacaaaaacgtgtggctaaagcagcttctgatgctaatctctcttttgaaaccatcgcaagacaatggcatgccagcaataaaaaatggtctgaatcacacagtgaaaaggttttaaagagtttggagtcgcatgtctttccttatattggattacgcgatatcactaccctcaaaacccctgacctgcttattcctatccgtgcagcagaaagtaaagagatttatgagatagctgcgcgtttacagcaacgtatttctgctgtcatgcgttatgcggtgcaatccggtattattggctataaccctgctattgataccgcaggggctgtaacgacggtacaacgccaacatcgtccagctcttaaccttgaccgtctaccggaactcattgcccgtatcgatgcttataaagggcaacccgtcactcgcctagctgtgatgttaaatttattagtgtttattaggtcaagcgaacttcgctatgcgcgttggtctgaaattgacttcgataaagccttatggacgattcctgctcagcgaaagcctatacccggcgttaaattctcacacagaggcgctaaaatgcgcactccgcatttagttccccttagccaccaagccatcactatactgaaagaaatttgggcatggacgggtgaacatgaattgatcctaacgggcgctcataatccctttaagcctatgagcgaaaatacagtcaataaagccttacgtgtgatgggctatgatacgaagactgaaatttgtggacacggttttagaacgatggcgtgtagttcattagttgaatcaggtttatggtcgaaagatgcagtagaacggcaaatgagccaccaagaacgtaactcagtgagggctgcttatattcataaggcagaacatattgatcaacgccgattaatggtgcaatggtgggcggattacttggatgctaatcgggaacaaacgatttcgccattcgactttgccaagttgaataatccaatgaatcactaa

SEQ ID NO: 292961 - DNA, 210 bp, Morganella morganii
atgaatattgatatagattcctttgccctatatattggcattaaggcggaatatttagctatgctatatagaactacatgtgaattagaaggattgcctttacctaaaagaaataggcacggtaaggtaaaaatgagtgaggttttaatttttaaacaacactttgaagataaaacaaagaatattaatgagaataaaacattaagttaa

SEQ ID NO: 292962 - DNA, 186 bp, Morganella morganii; identical to SEQ ID NO: 289416

SEQ ID NO: 292963 - DNA, 1188 bp, Morganella morganii
atgctgactgataccaagctacgcaatctcaaacccaaagataaactttacaaagtcaatgatcgtgatggcctctatgttgctgtcaccaaagcggggtctatctcctttcgctacaactactcgatcaatggcagacaagaaaccattacctttggccgctatggaataggaggtatcacgttagcagaagcacgtgagcgtctcaatgaagcgaagagaatggttactgatggaaagtcaccggccaaagagaaagcccgtgcgaaggcgagaacgaaagatgctgaaacctttggtgcttgggctataaaatggctacgaggttatcagatggccgattctacccgggatatgcgtcgctcagtctatgcccgagaactcaaagataaatttggtaactggaagctcacagaaattacccatgaagatctgcgagcactgactgactcgatagtagagcgtggtgcgcccgcaacggctgtacacacgcgtgatattgtacttcaggtgtatcggtgggcaattgaacggggccagaaagttgacaacccggcagacttggtgaggcccgcaagtatcgctcgatttgagccaagagaccgaacgttaacaccggctgaaatcggtttgatgtatcgttatatggaaaaagttggaaccacgccttcgattcgtactgcggtaaaattgctattgctaactatggtgcgcaaaagcgaattaaccaatgcgacttggagtgaaattaactttagcgaagcgctgtggacgattccgaaagaaagaatgaaacggcgaaagcctcacttggtgtttttgtcatgccaggcgatggacattcttattgccttgaagacatttgccggtgggtctgattatattcttccttcccgttatgactccgatgccccaatgagcagtgcgacaatgaatcgtgtattggctttaacgtacaaggctgcgcagaaggatgggcagtcactaagtaagtttgggccgcatgacctgcgtagaacagcgagcactttgctgcatgaggctggatacaacacggattggatagaaaagtgcctggcacacgaacagaaaggggtgagggcagtttacaataaagccgagtaccgagagcagcgcgcggccatgttgcaggactgggctgacatgattgatgagtggaccacttag

SEQ ID NO: 292964 - DNA, 174 bp, Morganella morganii
atgacatgcccaacttgtgaaaagcatattggctgggattggctcgaagatgagtgcatcgagccaaacgaagcctttgactgcccacactgtgatgaaaccttgcgctatgaagtggatgaaggtacttaccttggtgctcagcatgtaacgattgaagttgtggatgattag

SEQ ID NO: 292965 - DNA, 777 bp, Morganella morganii
atggcatcaacactctctgacgaacgtaacaaagaggaatacagcttcatctatggagatgaggctgtgagctatgaggtgctgcgtaagcctatcaaacaaggaaaaaagcgaagtattaccatcaaggtgcaacccaactgtgatgtcacagttagtaccccagaagacgctgagcttgaggacattcaccaagcggtaatgaaacgtgccaagtggatttatgatgccctgaaagagtttcgaggtcatttggagtacgtgcagcccaaacactacgttagtggtgagatgcagttctatcttgggcgtcgttatgtattgaagatcgtggaagattcagaagccttaccaacggtaaaaatgactcgcggtaagttacttgtcaccttgacgaggtttaacgatgacaaaacttccatggttaaagctttggtgcgcaactggtacaaggttcgtgctgaacgtattttccatgagcgcctatctgagttactacctcaagcgacatgggttgatggtatccccagctttcgtgtactgcccatgacaaagcaatggggaagctgttcagccaaagggaacctgatgctcaaccctcatctaattaaagcgcctaaagagtgtattgattacgtgattctgcacgagctttgtcatatcgctgagtacaaccacagtgagaaattctggcgcttattaacaagcgtgatgcctaattggaaagcagtaaaagcccgtttagatggaatggcggagctgtatttgaatgagtaa

SEQ ID NO: 292966 - DNA, 315 bp, Morganella morganii
atgccaaccgatcgcttcgcagagctagaccccaaaattaagcgtcatgtacaagcttactttggattgttcttaaaacatggcgctgaaggtcaaggtcttactgaagaacaatgcctcaactatgcagtagagattgacgagaaagtgcgcaaagcggtggcagagttttcaatcaatccatcagagattgaaaaccagatcactctagaggtgctgcctttactgtttgccgatttaggggtcgataaagcgcaagtcattgccgaagaagtggtgcaaatcactcgcttaggtttagctggtcaccattaa

SEQ ID NO: 292967 - DNA, 570 bp, Morganella morganii
atggcacgggtatttgcgccgaacatagaatacgtagatggtcagcccaccgatttaaacctaaagaaacgccaagatttttatagcacgctcactgcgtttgctaattgcttaaaagtcgccctgcaatcagccacctactttgaagacaagagctttgatgataaacgtcagatttataaagacacgctaaaaagcatgacatcactgcgtaaagttgtccgtgagcaagcagaagagaccattgattacgacgagtacgctgagagcattcgcactatgttagacaagcacatcggcggcgttgagatccaagagtctaaaggcgcttatctggttggcaatatgggtaaggatataaaaccagaagagctaagtgacgatgaggctcgtaataagaaagatgcgatcacagggcgtgtcactaagatgattgagcaagaccttgccgacgacccttacgctcaagagtatttctcgaagctacttaaacaagcgattcagcaagcaaaagagatgtttgatgcgcctgttaagcaatatctcctatttgctgattttgaacagtaa

SEQ ID NO: 292968 - DNA, 165 bp, Morganella morganii
atgacccaccgcaaacacagccacgcatttggaactatcaccctgaccgttacggcctgcctgcttttatggggttttcagttgccagcttgggctggtgacgctacccaggttgagccactggcgctacgcaagatcatgcaggaactcgggcgcaacatgtag

SEQ ID NO: 292969 - DNA, 228 bp, Morganella morganii
atgcctactaacccagggggaagcgatgccctgatgcgtgagatattaaagatgaaaggggtcgattttgagatggacaacctatctctgcaaagcctctcaggtgaaagcactcaaataccatcatccgttcattattcatggaatcctaagcagtttaatcgcaagctggtagtcggcaatcgagtactggggacgtctcagaaaacggaaaataaagcacgttaa

SEQ ID NO: 292970 - DNA, 594 bp, Morganella morganii
atgtggacaaagaaaagtcatttaacagggcagaaaaagccatttaagctagaagatatctggcgtattcgaactcgactagaaattgagggcaacatcaaagagctggcgttactgaatatcgccatcgattgtaaattacggtcatgtgatctgttgagaatgaaagttcgagatatttcttcaggtggtgtcattcagaacagagttctttaccaacaaagtaaaacggaacgtgaggttcaattcgaaataacttcgcgtactgcgcaatcattaacacaatggttgatgcaaagtggtttatctgcgtctgattatatcttccctagccctcgtaaggagggtaagcctatgagctatagctgctattcaaccatcattcaccgctgggcgtctcaactcggttatgatccttatctatatggaactcattcaatgcgaagagctaaggcgactttaatctatgctcgaacaaaaaacattcgtgccgttcagttactgcttggacacgctaagttagacaatacaattcgttatctgggcgtcgaaatggaagatgcgcttaatatatctgaggatatcgaaatttaa

SEQ ID NO: 292971 - DNA, 1143 bp, Morganella morganii
atggatagtattgagtcagaaaaagatgcagcaaagcgcttaggcttatacaattttttaatcatagataaaggctgtgatgagtttgtatctcaggctatcaaaagattccggggggaatgggggccatattctcagtactctacgcgtaggaatattattaacttaattcacaaatcattagacaatagcatttcaaggtttattaataatcttcctgagaagtatcaatatttctttccaaaacaagacaaaaagatatctttaagcttattgattaaaaagttaggttttcaagaagcccataaggaaataaaaagacatctagcatttttcatcgaatacaatagttctggcactgaaacagatagacgattcatcgccactttagaagcaataataaatctagtttggatgtgttatctaagacggccgaaattccaagagtactcaactgatgtaaaaattaatactactagaaagcagactttatgtgagttctgcggcgaaaaaacagaattaacgtcatttatagaatcattagataagaatatcattcaatataaagatctagacgatataaaattaatggctctaagccataatttttgctcactccataaacaaaagaaaaataatacttcggcttataaacgagcaaaacgctctcaaaatcagtttgaaaccgaagtattaagattacgccgacaagtagccaaaccagataagcgtaatgctatgtcaggtgatgaactcatagacgaatatttctatctctaccttcaggggaaaatggtcacgtcagaacaagctgaagcttatatgaactatgtacgcaaaacatttggcaatcaaataaaagtcgatacaactatgctccatcgcttacatgagatttcggattctctgactaatgaaggaactatgatttcttccggtgatattgacaaaattcgaaacatagctcgaagaatggtcgattcgaggatcactgataacaagaaaagaatgctagttttgaaacaaagaaagcttagtcaaaaagagatagctcaagaactttcagagtacactggtcagcacataattcaccaaaccgtatctaaggcgctttcatctgttcgagatgaattttttctatga

SEQ ID NO: 292972 - DNA, 225 bp, Morganella morganii
atgcatgaactagcacataagacactgattaatagaaaaacattactgcgtatggttccgctatctgatcgaaccatctataacctggaacagcgtggggagttccctcgccgtattgttctgaccagccgaagtgttgcttgggacctagctgaggttgagaactggatagaagaaaaacgtaggtctgcgttaaaagccgcaagacctggttttatttggtaa

SEQ ID NO: 292973 - DNA, 1008 bp, Morganella morganii
atgacgattaaagatgtaacggatgttcaggctaagggaaccactcggcgaaaaagtgcctcggttaccagcggtaagctagagatcagcacgaaatatatcgacaacatcatagcaatccaggagcgcagtgctcaggaggcgaatgaactcggttttatcgctcggcttctgattcaagcaactataccgcatagtaagcccaaatcgaatgagtggagccgcaagaatggtcatttcacaatgcacatgatggccccctcatctgtaggtttgccttacggttgctatgcacgtttgttgttggtttgggtcagtacacaagcagtaagaaataagtcaagactggacagtggttttatcactgaacaggaagcacgcaagcttgatctgggacattctcaaagacgttttatggaagagctagggctaggttcaactggaggcgaaaatggaaccattggtccttttcgagaacaaatgcggcgattatttaaaacgacgatcagtgttagctatacagagctaaatgatgaaagtggatatatttgtgaagatgaaactggagccagagttgctgatatttcccatatttggtggagtacgaagcaacctgatcaagattcactatgggaatcttgggtggaactgtcgcctaaattttttcaattgattactgataaaccggtccctctggatatgagagtgttgcggttgattaagcgttctccgatggctttagacatatattgttgggcgacttatcgggtgagttacttaaagcgagccacaattattccgtggtcaggtttgatggagcaaatggggtctaattatgccaatgtaaaaagctttaagcagcggtttaaggatggactgaaaaaggtacagcaggcatggccagagctagatgctattccaaccgaaaaagggttgcttttgaagcctagtgctcctcaagtacctcgtcagacaaagcgacaggtttcacgggatattgaagtgtga

SEQ ID NO: 292974 - DNA, 375 bp, Morganella morganii
atggggaacagcacgaacaagatcactcgaaaaaatagcccaccgattaaggtttactgtttgccagaggagcgtgagttgatcgaatcgctgtctgtgcaagcaggtcttagtacttctacttatctacgtgaagtcggccaaggttatcgcattcaaggtattaccgatgtagaacaggtacgcgaactggtaagagtgaatggtgacttagggcgtttgggtggtttgcttaagttatggcttagtaatgatgccaaggtagcgaatgtgggagtcaatacaatcttagcggtgcttaatcgtattgaagcgacacaagatcaaatgagctcgcttatggaatccattcttcgcccgagggccgatcaatga

SEQ ID NO: 292975 - DNA, 1761 bp, Morganella morganii
atgatagtcaagcacgtaccgatgcgttcgcaaggtaaatctgactttgcgggcttggtgaattacatcaccgatcaccagagcaaagagcatcgacttggtaacgttcgtttaaataactgtgaagcgaaaaccgtgcgcgatgcgatcagcgaagtgttagcaactcaattcgcgaacacccgagcgaagagtgataaaacctatcatctaatcgtgagcttcccaagtggcgaacagttagaagcaaataccttggccgcgatagaagagcgcatttgccaaggcttaggttatggagaacatcagagtgtcagcgctgtgcacaacgatacggacaatcaacatatccatatcgcgatcaataaaatccatcccacgcgaaatacaatccatgagccttattacccacataaaaagctagcggaaatgtgcgaggccatcgagcaggattttggtttgcagccggataatcacataccgcgcaagcgtggggcggaatcacgtgcgatggatatggagcgacattcgggtattgaaagcttagtggggtgggtgaagcgcgaatgtatggacgagattaaatcagccaatagctggcaggcgttgcaccaagtcatgcaggacaatggtttgcagttaagaaccagaggaaatggtctagtgatcgttgctgacggtgaagcgatcatcaaagcgagcaccttgggacgtgagttttctaaatccaaactcgaagcgcgccttggtccctttgaagcgactgcatcggattctgttaagccgagccgccaatatacacaccgacctgttcgattgaaggtggataccaccgagctatatgcccgttatcaatcagagcagaaacgtgctgcagcgagtaagtcgcaagccctcgaacaggcccgccgtgataaagatcgacagattgaaaacgccaagaggaaagggcgtggccgtcgcgcagcgattaagttaaccggtagtaataagcttactaagaagcttttgtacaaacaggccagcgatgcattgaaaagcgatcttgagagcattcacaagcgttaccaagagcaacggcaaacgatatatcaaagcaataaacgccaagcctgggcggattggttaaagagccaggcattgcagggagatggtgaagccctcaaagcgctacgtagccgagaggctgcacaaaagcttaaaggcaataccctcaaaggagatgccgttcaggccgagctcaaagcaacggtcgatacgattacgaaaaaaggcaccattatttatcgagtaggtaacagcgctgtgcgtgatgacggtgagcgtctacaagtgtcgacggcttccaaccaaaccagtgtcttagctgcgctaaaggtagcaatggagcgttacggtaatcgtattaccgtgactggttcgcctgagttcaaggcgcgagtaatcaaggcgacggtagatggcaatctgtctatcaaatttgccgatcaaggactagaacgccgtcgtcaggcattaatgacccagaataaaagggccaagcggtctgataagcctggcgtgttaccgattggcaaagtgccaccttcacgccgtggctggttgcagaatctctctcagctagaagtcttagctatacagtcaggccctgtaactgaaaaagcggcggtcatgccagtactagagcagcgtaaagctaagctccaagctgagcaggcagctaaaaaggcgaaacgacaacataagagccgatcacgttga

SEQ ID NO: 292976 - DNA, 774 bp, Morganella morganii
atgctaaaacgaaaaattttagcggctaaaattcccgtgcttgccatctccttggcgttaaacctttctaatcctgtatatgcggggattccggttgctgatggtacgaatctagttcagaacatcatgtcggcaatggaagctgttacacagactgctaaacaaattcagcagtatcaaacccagttgcagcagtacgaaaatatgctgcaaaactcgatggccccggcttcttatatttgggaccaggcgcagcgcaccatcaacgatctgaaccaggcgaccaacacgctcgcctattaccagaaccagcttggcagcctcgatgcttacttaggcaagttccaggacgtggcctattaccgcagctctccttgtttctcggcggcggggtgcagcgatgcagaacgggccgcaatgaccgagaaccgacgccttgcgtctgaatcgcagaaaaaggccaacgacgcactgtttaggagtctggaacagcagcaagataacttggaagccgatgcccgtcagcttaatcgcctgcaatctggtgctcagagcgcggacggccaattggcggccattggctacgctaaccagcttgctagcaaccaggccaaccagctcctgcaaatccgcagcctgctgatcgctcagcagaatgctgttggcactcgaatgcaggcggatgctgaccgcgaagctcaatatcaagcgtcccgtgaaaggttgtttgatatgggcgagccaaccgaccgttcggaaaacaaggggttttaa

SEQ ID NO: 292977 - DNA, 198 bp, Morganella morganii
atgaaaaatatcacacgaacttttatcgttagtgcgttggtctccttcgttctggtgggatgcggtgaagatgacgggcccaagcctgcaacgatcgactgtgacaacccaaacctgacgaaagagcagagggaagaagggaactgtctttgggatatgggcgaacccactgatcgctccaagaacaaggggttctaa

SEQ ID NO: 292978 - DNA, 1293 bp, Morganella morganii
atgaacaagatattcattcgacttgtgatgctcctggcagttttactgacttcgcaaactgcgtcagcggccattgatcctaatggtgtcttggatgaagtggccgtgcgtttcatgacggccagtgctacttggggcacggtaattacaaactatgccgcctggctattctggacgctgggtacgatatcccttgtttggactggcgggaccttaatccttaaacaagcggatataagggagttttttgccgagttcgtccgcttcatcctgacgtttggtttctttctttggttgctcagaaacggcccagactttgcgacgtcaatcatcgactcattgagaatgatcggtgctcaagccggtggcctttcgagagacctaaccccatcagagcctattagtattgcgttcgacattattgtgaaagctggtgagtcctacagcatcacaagcccgatagataacttgtctatcttcttaatcacgctggcaattttggcctgtatggcggtagtggcggccaatgtgttgttggccttggtgacggcttggatattgatctatgccggtgtcttcgtgctggggtttggtggttcgcgttggacttcagatatagcaatcaactacttcaaaagcgtattgggcgttgctttgaagttgatgacaatgacgttgctcattggtattgccatgtcgatcatggacggtttctatgccgatctatctaatgatgcccctatgcgtgaactgctggtgatctttgtcgtttcactggttcttgtgatgctcattcactcggttcccaatgtggtcgccagcctggttcctggaggcggcgcggcggcaggtgctggcagtatcagtgccggagcgatggccggagcggctgttgccactggcggtatggctgccggtgcagcaatggctactgccggcggtgcgtctgctattcaggctgcatttgcaaaagcaggtgagaacgtagcgaacaatactgacgttatgtcgagccttggcggagcaatcagtggcagtggcgattctgatgaggctggctccttctcccaagcttccggccaatcttctagcggtggccaatcctctggcggttttaaaggtagcgctgtaaaagcggggcgtattgcagcggataccggtgcgaatttgatgaagggaatgggggatatggccggggatagaatcagcggcactgctggaggccgtctagctagctcgatccgaaacagcacgaaagatgacggggatagcgatgaccaggagggcgactga

SEQ ID NO: 292979 - DNA, 273 bp, Morganella morganii
atgaccaggagggcgactgacgacgcttcccctgcatttgacaacgatagcttgggcggtgtgggtactggctggatgaatcaaacaggcggctttgatggcctatccagtgaggaccaaaaagaagcccgccaagcgcacgcagaatggcaagagcgtgacccggaaaagcacaccttcgatgttgaggactacgtgtcgtatgcccaggaacgccagcaggagcgcaacgaagaggttgccagttttgttaaaaagagtcgtatggcctaa

SEQ ID NO: 292980 - DNA, 255 bp, Morganella morganii
atggagtttagctttccacctcaaaaccttgcggaggtatttggtttcttcgcagggatgttcattgtgatgctggccttctattttttggggcagtggctgcacagcaccggacacggcccgaagatgaaagacattgccgacaaaatggaggtattccaaaacaggttggccggacgtgcttacaaggacatgacgagatcggtcgatcaaatcgacaaaatgagacgctggccgtttggccgacgcaagtag

SEQ ID NO: 292981 - DNA, 228 bp, Morganella morganii
atggcaatcacacataatatcgaagttcagcacgcaattcatcaggcagcaatcaagctggcctccctagaattcattgatcaggaaaccgctcagcagatttcgtctgtcgcagaagcggtcgccaatatgtttacgatcctttactaccaggctgaaactggccgagcgacgccggaggacttcgagcaggcgttggacactatccggctggtgacaagtaactga

SEQ ID NO: 292982 - DNA, 933 bp, Morganella morganii
atgactttgatagagcagttagcattagagctgaaaaagagtgaagacgaagtcggtcgctttctccagagtgcgcctaaaaggtataaagtctatactattccaaagcgtacttctgggcaccgtgttatagctcagccttctaaagagttgaaagagtatcagcgtaagtttctggaaatacaacagttacctatccatggttcagctatggcttataggaaaggtctgggtatcaagcaaaatgcaattgctcataaaaataatccttacctacttaagcttgatctcgaaaatttttttaattctatctctactaagctcttttgggaggtttggaagtcaatattgcctcttcccactaaccaagacatgcaaactttagacaatttacttttctggtccccaagtaaaacaacaggaggtgccctagttcttagtataggagcaccaagctctccactaatatctaatttcttcatgtatcaatttgattgtgttgtcagcaatatgtgcgctgaaaaagaaattatttatacgcggtatgctgatgacttgacattctcgaccaagcacaaggattctctttttgtcgttcctaagcttgtaaaagaaaagctggctgagttatttggtggggcgataagaatcaataggaagaaaactaggttttcatctagagcccataatagacatgttacaggtataaccattactaatgatggctctctttccctaggaagagagcgcaaaagatatatcaaacatttagtgcaccaagttcaattaagtaaacttgatactgaggatagacaacaccttagagggcttattgcttttgcaaatcatgtagagcctatgtttgttcaatcattgaagcgaaaatatacttctaagttaattactcaaattattgaggaatcaaatggctaa

SEQ ID NO: 292983 - DNA, 1641 bp, Morganella morganii
atggctaagtcacaaaaaaatagaagcagaacggttaaacacctcattcaaaactcagataaaggtaattttcaatcttcgtatcagttgtatcgaaactactttgaaggtaagaatgtagagcataaaaatgaggacttagcttatcaatattttaataaagtagaatctgcgcttcttgaaaagaaacttgttttatcttcaatgcacctaactgattttagaaggtttacagatcttgatatctcatttgatgaaaaagttactgttcttataggcgccaacggcgctggcaaaacgagtgttgctgatgctattgcgaagacattgtcatggttgaataataatctggaaaaaacagacgtagttggtagacctgttacagaaagtgatatccatgttgactctaaagaattcagtgaagtaacgactaaatttaaatttgatgatcagaatacgtttgatgtaagtattggtagtactgttttggggtatgaggggagttctcctactgatgtggtcgatataagacaagttgctcatatgtataaaagcactgccaaaaacccatcaatacatatcccacttttggtattctattcagttgaacgttcagacttttcattatcttcaacgattacggaaacagcttcaggagacagtgtcagcaataggttttctgaccttaagaccgctttggatggaagcggaaaactggaggatttttctaagctttatatcgagctcgttaatagagcaaaaggtgaagagaataaggaagttcaagaactcaaggtgcagatcgcaaccttgcaagccactattgatgatgtatacgcagatcaagcgcctccagaaaatgatgtattcaatgccaagttaaatgctaaaaagcaagagttagaaaacttagtaaaaactaaatcttcattaaaatatcagcgacatttagagctagtcaaccaagcaatagaagcacttgttccagatgtgaagaatcttgaggtcgaccgcagttcaggaaaagccagactaatggtcgataactttgggaatagagtgaatatagcccagctatcacaaggtcagaaaatgttggtagctctctccggagacttggcaaggcgtttagttaaactaaatcccgactctgacgcccctttacatagtcatggaattgtagtcatagatgaaattgaattacaccttcacccaaaatggcaacaagaaattctaataggtcttcaagagacgttccctaacctacagttcattgtgactactcatagtccccaagtgctatctactgtagataaagattgcattcgtatacttcgatttgatgatagtggagttgcttttgtagacaaaccaagatttcagaccaaaggtgtgtgcagctctgatgtcttagaacaaattatgcgaacattttctgtacccccagtgtgtgaagccaattggatttctgactattcgagtttggtagcagagaacctttggaagtcggaggatggcataaagttattcgataaaatagttaagcatttcggcattgatcatcctgaggttgtgaaaattaaaggaaatattagaactcaagagttcaaattaaaggccagggcactaaaaggaaagtga

SEQ ID NO: 292984 - DNA, 672 bp, Morganella morganii
atgaagaaattagttcgtggtgatgctcccttgtgtttagctcaatttatgcatggtcgagataattggtctgttatttcaaacaatggcttaactaacgaaatttgggcaaagctccacatcatgcagcgtggtttttgtgcgtattgtgaatgtcagttacaagaagataataccaaaagacatattgagcattttattcaaaaggatcaaaatccgagtatgacatttgactgggataatttatttggttcatgtaaaaatccgaatcgttgcgggaagttcaaagatgaggatccagaagctaaaaagatagatcttactaaggtatgcaaacctgatgtaatggatcctagtgaactaatactgttccttaattctggaaaggttagagctaaaacaactctaacaccggaaaaaaaagagattgctgataacaccattgctgttttcaatcttgatggtgatagtacactagaaaactctcgaaaagcggctattgcgggagaaaaaagtttggcagatagttattgggagatgttggttaatgatgataacgatgagctaactgaacttttggaaacggagttatctgaagcattagaaagaattaaagcagttcagcattcaacggcattagaacatttgtgggtacataacgaacagttttaa

SEQ ID NO: 292985 - DNA, 159 bp, Morganella morganii
atgcttactaccgaagagaaacaagagcttcgtcgtgatatgcaagaatcctcagcatgggccaaagccgaactaaaacgtcgacgagttgcaaaaaatcaaaaaaaatctgcgcatggtacagatgatggtatcgagaaaggtagcatttctaactag

SEQ ID NO: 292986 - DNA, 726 bp, Morganella morganii
atgaaactaatatgggggctagttcagtaccacttaaacaggaagcatggctcccacgaccacagatccccattagaactatatcgtatttatttttacgattgcccaccactagatattcaaaccagatatcctttcccggcacaaaaagggcacacttcgccagctaggaaaaactttaaaacggaaccatcctatatactcaggacggagcttcacgaagagctaaggaaaagcagaaaaacggcccttaggatggggactcttgttgacagtaagagatggcaaattaacgatcacacactaaaagacctcatatctggaacaaaaaaatgggaagatttaactaatgatgacttccattatgacataaaacagaaggcggtagatataaaattgggcatggatataaccatgctagcatacgaaaagctcgtcgacgtcatggttcttgttgccggagactccgattttgttcctgcggcaaaacatgcaagaaccaaaggaatcgatttcatactcgatccattaaggcaagaagtttcccccaccttgtcagagcatatcgatggaattcaatcatatagcctaatatctggcatagcagatacattacaaattaccccagaccctcttcctgagtggtgggaaaataaaatatccagaaaaaacacaaaaccaaaaccaaaaccaaaaccaaaaccaaaaccaaaacacaataaataa

SEQ ID NO: 292987 - DNA, 531 bp, Morganella morganii
atggggttggtaaaattcatatcaagcatattcacgaagaaagaaaataacgtaaataacgagaaaaagctcaggtcgctaccaacagttaaaagcgatgtgaaaaaatacttatcaaggcatgatatctatggcgtcctccaagaaataaaaaaagaatatacgagcatcgcttttgacgatgatgacatgatagacagcatcttggctggttataacatgtttattgctggggagtccctgcggcgcctgaatgtaggaatatcaagctcagatgttaaagacattacggcttggttctctgggtggtgtagctatcttaacagctcaagaaaggctatgtcttttggcttcactcatggagtatggattagctcaggtttttgtggttatcgtggatgtgataaaaaacacgataaatttaatggcagaaaattctcattgaaagatggacttccttactatggtaaagtctattaccctggatctaaaaagcattgccggtgtgggtataaatcctataacccataa

SEQ ID NO: 292988 - DNA, 411 bp, Morganella morganii
atgaaacatttcatgaataaaaaaacgggtaaagtatatgcatatgaatcactcagtgatgctgaaaaatttaatgatgatttttcaaatatttcagagatgagtgatgctcttcttgaatcctttaaaaatccgcccccgggagggcggtggacagtgaaaggatgggttattgatgacgcattgcttgctgaacaaaaggtacagctcatttctgatgcagagaaccggaggaaatatctgctgtctgaagctaatgattcagttgccccgttacaggatgctgttgatttggatatggcgacaccggaagaagagtcagccctgaaagcatggaaggtataccgcgtgctgctgagtcgtattgatacatcaaccgcacctgacattgattggccggttaagccttaa

SEQ ID NO: 292989 - DNA, 1035 bp, Morganella morganii
atgccaacctatgcaaaatcgttagtaacttctaagaaaggtattaactacgtaagaggagttatcgagggagttggctgcttgtttcaaaagattgagcaggaaaatgatcttgggatagatgcgatttgcgagttgataaactcaaatggtcagccagaaaaccacctttttgctttgcagatcaagtctggtgactcttactatgatagttctaaaaactcctgttcatttaggataggaactcatagggattactggacaaattataaggtccccctttttgctgttgtttacataccatctctcgacacggcttattggacagatattaagaaatttctgaagagtaacgttcacgctagctccattagtttcgatttgagtcgtgccaatcactttgatgaagagaagttcatttcttactttaagcccttggttactgggagagggccaaatatttctctggaagacagtttaagacttgttagaagcagtaatgatgacgaggcttggcttggtttaacaacgttatttaggcgatttcctaatacataccaaacctgggatgagttggttagagctttcaaaataagaagtattgccaaaattcctagattactcatttatcttctagcccatatcccttggcatggcgatatttcatacagtggcgaagatataaagtcagagattagatgttatgccgctgacttgtttaattcgtttgatgaaggtgacatacgtaagttactgtccatgatcgatgacaacggaatacagaggggagctatcgggcaatcggtcgaagctgtaattaactgtgtaggtagtgcatcacagtatctaatcagaataatcaggaatggctgcgacagtatggaactaagagaatcagcagcgttcattttggccgtcgataaaggtgttgaggctataccgtaccttcgagagttagcatctagtggcagcgagatatccagtttgattattcaggatatcgctgaacatggtgggttttacccatactcttaa

SEQ ID NO: 292990 - DNA, 480 bp, Morganella morganii; identical to SEQ ID NO: 30179

SEQ ID NO: 292991 - DNA, 822 bp, Morganella morganii; identical to SEQ ID NO: 15325

SEQ ID NO: 292992 - DNA, 183 bp, Morganella morganii
atgaataatgcttggaatcaatataaatatcgtaaaaataatgcagataaaaaagtattaagtggttacattagccaagatgcaaaaatgaagttaacagaaatggcaaagaaagcacgtatgcctgaatatgagctcatagagctacttattcttgagtactatgatactgaaaaaaaataa

SEQ ID NO: 292993 - DNA, 270 bp, Morganella morganii
atgaaaacaaatccctccaccaccgcttcaccttttgaggcggtgctttcgccactccccacggcaattaaacatcaattacaacataaactgagcgagcttattcattattcgcccacaatcggtttgatgggaaaaactggtgtcggaaaatccagtctatgcaatgcgctgtttcagtctaccttatgccctattagtgctgtcagtggttgtacccgttcagagcaacgatcaacctgtgttttacgctcaaacagcgaactataa

SEQ ID NO: 292994 - DNA, 750 bp, Morganella morganii
atgttaacagatgatagctggaagttactatcaaagatcatgcacctaaccggacgtatttataacaaaccagaacatagaatgacccttgaaggtattttattccgaataagaacaggcattccatggcgcgatttacctcgtcaatttggtgaatggaatacggtatttagacgttttaacctttggtcaaagaaaggcgtgatgatggaaattttccaatttctatctcgcttcaatgatcctcagtggctatttattaatgccagtatcgtgaaaacgcatcaagatggagccaacgttaaagatgcttcaaagcaggctataggcaaaagtcgaggcggcaactcaactaaaatacatttagcggtagatagcagtggtcttccggttcattttgagttgtcaggtgggcaagcccatgatgtgagttatgcagaaacattggttacctcttcaccggaagccgaagttgttattgcagataaaggctatgactgtgaagccttacgacagttgataaaaaaccgtcggggtcagcatgtcatcccaagaaaagggaatagtaaacaagggaataaagatattgattggtgcttatatcgatatcgtcatttagttgaaaatgccttcctaaaaataaagaaataccgagcagtggcgactcagtatgacaaattagcccgaaattatgaaagtgttgttgctttagcattttcaatcatgtggctcccaatgtgggtcgattga

SEQ ID NO: 292995 - DNA, 264 bp, Morganella morganii
atgagtgagccactactcactccttttccgtgcaatgcctgcggcaagtgttgccgcagggtgagcgctagcactgaaactgcattccttgatcgcggggatggagtttgccaccatttcgttgaagggacccatctgtgcgcaatctatacaacccgtccgctggtttgccgggttgaagagtattaccgagcgaaactagctgatgttctttcgtgggatgagtttgttcgtcttaatattgctatctgtgagaaactatga

SEQ ID NO: 292996 - DNA, 426 bp, Morganella morganii
atgcttaaattacacgaagtcaaaatgtcgctagccttaacgcagaacaatcgtttcgcgggagccacccaagaaccgagttattcacgagaaaactattactgtgctcactgcggtgagcccgtcacactgcacaagacgccaacggagtcatggtttacccattctgatcctcagagcgcagagcactgtccgcgggtcatcagtaagatcaagagcttagaagacaaggcacgactgagcacacaggttcgatcagtgtcccctattttaaaggtcacggattggttttgcgtgcagtgtcgtgagtattttacaagtaatcaaaaatgttgcccgaaatgccatgaggggatttggtgtattcctgcccagaatgtaacagaggaacatcagcctaaaacagaaaaatcgtttccattatga

SEQ ID NO: 292997 - DNA, 240 bp, Morganella morganii
atgacgattcaaacacccccaaccaccagcctgctgaatgaccagtttgttgatatgaaatttatcactcagtttaccgggcttacggataaatggttttataaactcattcaagacggtgagtttcccaaaccgattaaactgggacgcagctcaagatggctgaaaagtgaagtagaacagtggttacaagcgcgcattgatgaatcgagagagggcaactccgcccttggatcctaa

SEQ ID NO: 292998 - DNA, 126 bp, Morganella morganii
atgggtgtgaataacgcgttcagcgccattctgagcgttttattcgggcaggggataaacttgcacggtgtcgccacaataaacggctataagggccatagagatcgtcatacagcccctgactag

SEQ ID NO: 292999 - DNA, 210 bp, Morganella morganii
gtgccgcgcctgaccgcaccccggcggcaggccgaggtgtgcgcgccactgccggccgcccacgccgctgcgcgttacgcgcgccacctgcccgagcgcacgctgctgtacgcgctagtgcaggcgcactacccggacttcatcgcgcgtcttgaggccgaagaccgcccgctgcccgagtatgtgcgcgaggagttcgagtattattaa

SEQ ID NO: 293000 - DNA, 1641 bp, Morganella morganii
atggctgccaaggacattcgtttcggcgaagacgcgcgctccaagatggtgcgcggcgtcaacgtgctcgccaacgccgtgaaggcgaccctcggcccgaagggccgcaacgtcgtgctgcagaagagctacggcgcgccgaccatcaccaaggacggcgtctccgtcgccaaggaaatcgaactggctgacgcgttcgagaacatgggcgcgcagatggtgaaggaagtcgcttccaagacctccgacaacgccggcgacggcaccaccaccgccaccgtgctggcgcaggcgttcatccgcgagggcatgaaggcggtcgccgccggcatgaacccgatggacctgaagcgcggcatcgaccaggcggtgaaggccgcggtcggcgaactgaagtcgctgtccaagccgtcgtcgaccagcaaggaaatcgcccaggtcggcgcgatctccgcgaactcggatgccaacatcggcgacctgatcgcgcaggcgatggacaaggtcggcaaggaaggcgtgatcacggtcgaggaaggcagcggcctggacaacgaactcgacgtggtcgagggcatgcagttcgaccgcggctacctgagcccgtacttcgtcaacaaccagcagtcgatgtcggccgacctggatgatcccttcatcctgctgtacgacaagaagatctccaacgtgcgcgacctgctgcccgtcctcgagggcgtggccaaggccggcaagccgctgctgatcgtggcggaggaagtcgaaggcgaagcgctggcgaccctggtggtcaacaccatccgcggcatcgtcaaggtctgcgcggtgaaggccccgggcttcggcgaccgtcgcaaggcgatgctggaagacatggcgatcctgaccggcggcgtggtgatttccgaggaagtcggcctgtcgctggagaaggccaccatcaaggacctcggccgcgccaagaagatccaggtgtcgaaggaaaacaccaccatcatcgatggcgccggcgaaggcgcgggcatcgaggcgcgcatcaagcagatcaaggcgcagatcgaggagacctcctccgactacgaccgcgagaagctgcaggagcgcgtggccaagctggccggcggcgttgcggtgatcaaggtcggtgccgccaccgaagtcgagatgaaggaaaagaaggcgcgcgtcgaagacgccctgcacgcgacccgtgcggccgtcgaggaaggcatcgtcccgggcggcggcgtcgccctgatccgtgccaaggcggcgatcgccggcatcaagggcgtgaacgaagaccagaaccacggcatccagatcgccctgcgcgcgatggaagccccgctgcgcgagatcgtgaccaatgccggcgatgagccgtcggtcatcctcaaccgcgtggtcgaaggttcgggtgcgttcggctacaacgccgccaacggcgagttcggcgacatgatcgagttcggcatcctggacccgaccaaggtcacccgcaccgcgctgcagaacgccgcgtcgatcgcgggcctgatgatcaccaccgaagcgatggtggccgaggccccgaagaaggacgagccggcgatgccggccggcggcggcatgggcggcatgggcggcatggatttctaa

SEQ ID NO: 293001 - DNA, 291 bp, Morganella morganii
atgtccaatatcaagccgctgcacgaccgcgtggtcatcaagcgcatggaagaagagaagctgtccgccggcgggatcgtgatcccggattcggccaccgagaagccgatcaagggcgaagtcgtcgccgtcggcaccggcaaggtgctggacaacggccaggtccgcgcgccgcaggtcaaggtcggcgacaaggtgctgttcggcaagtacagcggcaccgaagtgaagctggacggcgtcgagctgctggtggtgaaggaagacgacctgttcgcgatcctcggctga

SEQ ID NO: 293002 - DNA, 330 bp, Morganella morganii
atgccggtgagcgccctgatctgcttctgcacctgtcccgacgccgacagcgccgagcgcatcgccaccgcgctggtggccgagcgcctggccgcctgcgtcaacctcctgcccggcctgcgttcggtctatcgctggcaacgcaaggtcgaggccgcggccgaggtcctgctgctggtcaagaccagtgccgaggcctaccccgccctgcaggaacgcctgcgccaactgcatccctacgaactcccggagctgctcgcggtcgaagccgcgtccggcctgcccgaatacctgcaatggctggccgccgagagccgaccggtaaactga

SEQ ID NO: 293003 - DNA, 1032 bp, Morganella morganii
atgaccgcatccacgatccgcctgcgccgctggctggccgggctcgccctgctgcttgcgctgcccgcgacctcggccgtcgcccaggacttcgaactgccgccggtcgacgaggtcttcgtcctgtccgcgcaggccaccgcgccggaccgcatcgaggtgcgctggcggatcgccgacggctattacctgtaccggcaccgcacctcggtcaaggccgatgccgccttcaccggcgcgaccatggcgctgccgaagggcaaggcctaccgcgacgaattcttcggcgacgtcgaaacctaccgcaaggaattgctcggcaccctcaccggcacgcccgcggccggcgcgagcgcgaccaccctgaccgtgaagtaccagggctgcgccgatgccggcgtgtgctacccgccgcagacccgcaccctgaaggtcgcgttgccgggcgaagcgggcgctggcggcttcggctgtaaggcgcgcgggctgcatgattatgtcgtcaagaacggctctgccgatcatcccaacgccgaggtgaaattcgcactgggtgatgtggtcaacaccatgatcggctgcactaatggtgaaacgatcatgctgtgccacgacacctcgctgccgcgcccctattctctcggctttcgggtgcaaggcaccgaggggctgtggatggacgtcaacaagtcgatctatctggagggcaagagcccacagccgcaccgctgggagcctgccgagggctggtttgcgaaatacgatcacccgctatggaaacgctacgccgatctggcggcaggggccgggcatggcgggatggactggttcgtgatccacgcttttgtcgaggcgctgaaggccaaggccccgatgccaatcgacatttacgacgcgctggcctggagcgcgatcacgcctctgtcggaacaatcgattgctgagggcaatcgcacgttagattttcccgacttcacccgagggcagtggcgcacccgcaagccgatctttgcgctgaacgacgcctattga

SEQ ID NO: 293004 - DNA, 639 bp, Morganella morganii; identical to SEQ ID NO: 270464

SEQ ID NO: 293005 - DNA, 261 bp, Morganella morganii
atgatcctgcagcgcggcggtttgcagctcgaattcttcccctatcctgacctcgacccagctacgagctcgttcggctgttgcctgcggttggatgatctcgatgccatggtggcattggtgaacgcggcgggagccgaggaaaaaagcaccggctggccgcgcttcaaagctccgcaactggaggcgagcggcctgaggatcggctacctgatcgatcccgactgcacgctggtgcggctgatccagaaccccgactga

SEQ ID NO: 293006 - DNA, 813 bp, Morganella morganii; identical to SEQ ID NO: 158561

SEQ ID NO: 293007 - DNA, 1011 bp, Morganella morganii
ttgtcataccatcatcttaactttgaagatcgtactgcattaatgcttgagtcaagaaaagaaggcttttcagccagaaaatttgctgaactcattaaaagacatcctagtacgatctatcgtgagcttaaaagaaatagcatcaatgacgtttatcaagctcgatatgcttctgataacaccttcgctagacgtagacgtggtcacagaaaactcaaaatcgattcaatcctctggaaatttattgttgaagcgatccgttgtttatggtctcctcagcaaatagcaaagcgtttaaagacatttcctgatttggatcaaacaatgaatgtaagccatacaacgatttattcaacgatacgagcattaccaaagggtgagttgaaaaaagacttattatcctgtctacgtcatgaaaataaaaagcgaaaagctaacggtgaacctaaaaaagattctatattacaggatattaaaactattcatgagcgcccagccgaagttcaagaaagaaaaataccgggtcattgggaagctgatttaattaaaggtaaagacaataaaagttcgatagcaacacttattgaacgaaatacacggctctgtatcttggcaacattacctgatgcaaaggcagaatcagtgcgcaaggctttaactgaagctctgaaatatttacctgcagaactgcgtaaaacgttgacctatgaccgtggacgtgagatgtcagaacataaaatactcgaagaagatttaggcatagatgtatatttctgtgacccacattcaccctggcaaaaaggcacatgcgaaaatatgaatggtttaattaggcaatatttacctaaagggattgatttaaatcaggcagatcagcattatttaaatcaagttgccatgtcactgaatactcgtcctagaaaggcgttagattggcttacaccattagagaaatttgctcagcttgttgattatcatatggcttttgaaactgtcgcacctcatgtttga

SEQ ID NO: 293008 - DNA, 780 bp, Morganella morganii
atggaattgcccaatattattcaacaatttattggaaacagcgttttagagccaaataaaattggtcagtcgccatcggatgtttattcttttaatcgaaataatgaaactttttttcttaagcgatctagcactttatatacagagaccacatacagtgtctctcgcgaagcgaaaatgttgagttggctctctgagaaattaaaggtgcctgaactcatcatgacttttcaggatgagcagtttgaattaatgatcactaaagcgatcaatgcaaaaccaatttcagcgctttttttaacagaccaagaattgcttgctatctataaggaggcactcaatctgttaaattcagttgctattattgattgtccatttatttcaaacattgatcatcggttaaaagagtcaaaattttttattgataaccaactccttgacgatatagatcaagatgattttgacgctgaattatggggagaccatagaacttacctaagtctatggaatgagttaactgagactcgtgttgaagaaagattggttttttctcatggcgatatcacggatagtaatatttttatagataaattcaatgaaatttactttttagatcttggccgtgctgggttagctgatgaatttgtagatatatcctttgttgaacgttgcctaagagaggatgcctcggaggaaactgctaaaatatttttaaagcatttaaaaaatgatagacctgacaaaaggaattattttttaaaacttgatgaattgaattga

SEQ ID NO: 293009 - DNA, 213 bp, Morganella morganii
atgaccaatacaaccaattaccccttactgaatgaccaatttatcgacatgaaatttatcactcatctgacgggattaacggataagtggttttataaactcattcaagagggtgaattccccaaaccaataaagttaggacgtagctcacgttggttaaagagtgaagtcgaacagtggctgaatgaacgtatcaccgcttctagaggctaa

SEQ ID NO: 293010 - DNA, 561 bp, Morganella morganii
atgagctttgctatccctcaattacaaaatttactctatcaacaacaaaccaaactctttgaacactactcgaagatattgatgataagaacggacttccattggcgtgaagacagtgagcgatacatttacgaagatgaacatcaattcagtcgggatatgagtatcctgatgttacgtctctcaaaatatcccggagtaataggttatgcctgggtattggaagaagctcctgataggggcttacatgctcatgctgtcatctatgtggatggtcaacgccatcgtaagaaatgggactttaatcagcgaatgaatatgctctgggaaaccattacggaaggcgaaggttatctttatcattgtaccgacaataaacaatatcgtgcggatatcagtaaacctatccactttgatgatagacagggtaaaagagcgatgcggtatgtcgtcaattacttggctaaatacgaacaaaaaggcgttaaacctatctaccatctctcgactccgcctacggaaaagcgaatcggtcgtcctcgtaagtcctcttcgtcttaa

SEQ ID NO: 293011 - DNA, 267 bp, Morganella morganii
atggacaaagggtatgaagcggaatggttgggatcgtatctgagaagtcgtcgctatgaacctcatatccagtcacggaaggatgaatcagaagccatcaaaaacacggattttaaggcccaccgctgggttgtagagagaacacacagttggatgaatcgctaccgtcgtgtcctgactcgttgggagaagaaggtcgagaattatgaggcgatgctgcattttgcctgtggtatcattgcctgtaacaaaaccctattgagatag

SEQ ID NO: 293012 - DNA, 399 bp, Morganella morganii
atggtgggcaacaagtggcaaatcagtgatgaactctgggagaaaatggctcctctcatcccggagcatagaactcaacacccgctgggtacgcaccgcaagcgggttgataatcgcgctgcaatgaacgccattttcttcgtactcaggacgggttgccagtggaatgcgctaaatgccaccggtatatgctcgtcaagctctgctcatcgccgatttcaggagtggcgggatgctggcgtatttgaacgcttctggcaaaacgggttgcttgcttgcgaacagttggacgctattgactggtcgtggctgtcgatggatggttgtatgaccaaatcaccgctggcaggctcaaaaaaacaggcaggaacccaacagaccgggggaaacggggcgtaa

SEQ ID NO: 293013 - DNA, 798 bp, Morganella morganii
atgtcagtttataagaatgacgatccaattttttttgatgccgcgataaatagcgttctaaaccaaacatttaaaagttttgatatttacctacaagtggatggccaggttcctattcagctatccaataagctcaataattatcaaaataattatcaaaatatatatattgaatttattaatgaaaataaaggtcttgcttggcaattaaatagggctataagccgtttatcaacttcaaatatatattcattcatagcaagaatggatgcagatgatatatgtgaaccagagcgttttcaaaagcaaattgagtattttcataaccatcctgatgtagctatttgtggaactcaagttatcgaatttcacgaggatggttatactcagttgaaaaaaattccatgtagtcatgctattttaagtcgctatataattaagcgttgtccttttaatcaccccacggttatgtttaacttatcaaatattaatattaatcatattcattataatccagcattaatgaatacccaagattattatttatgggttgacttattagagaaaaagtacattttcggaaacttagatgagccattattacgatttagagttgataaaaatttttataatcgaagaggttttaaaaaagccaaaaatgactttaacgctcgtttatatgcaatgaaaaaactaggtctttttagtccattaaatttcatctttctgcttttaattgtatccttacgattaagcccaccatttttaaaaaaatttgcatataagtatttaagataa

SEQ ID NO: 293014 - DNA, 477 bp, Morganella morganii
atgaataaccgattatataaaaaagtaatggccgcttgtgctgctggcgcgattgccggtgcgctggtgctgattcccgcttatgagggtgtcgagtatacgccttatcgtgatgtggctggagtgctcaccgtatgttacggccacaccggcagtgatattcagcccggcaagttgtatacggatgctgagtgtaaagcgctactgcatgacgacctgacgaaagtccggtatgcggttgacccaatgataaaagtgccgattgacgacaacacccgggcggcgctctactcatttgcatataacgtcggccccggcgcgttctcacgttctacaatgctgcggaaactcaatgccggtgatattgccggtgcatgtgacgaaatgaagcgctggacgtatgccggtggtaagcagtggcagggtctgattaaccggcgtgagacggagagagcaatatgtcacggcaccctgtaa

SEQ ID NO: 293015 - DNA, 495 bp, Morganella morganii
atgaatatttttgaccctactattttccctgctgttacagctttatttggttctcttattggcgcaggaatcacggcattaagcggtatatacatggaaaaaataaaatgcgatagaaatattaaaatatatactgctggcttcattgcggaagttgaatcattagttgacattattaaatgtagaggctatctcacattactagaaaatgtactgcatacactccaaaaagaccaagtaatagagttaaaactccttattcctgacaactatgctcgcttttatgatgcaaatattgctaaggtaggttttttgaaaccgaccactgctaaaaatttagttatttttcatcaatacttacaatcagtagttcaagatttcaaatcagaatcatttttaagcgctgaaggttttaattacgattcactgaaagagatgtatgagttactgaataaagcaatactattagctgatgaaattaaattaaataaataa

SEQ ID NO: 293016 - DNA, 321 bp, Morganella morganii; identical to SEQ ID NO: 83617

SEQ ID NO: 293017 - DNA, 738 bp, Morganella morganii
atgaacatgaaaaaaataaaacaaacattaataaacctaccaaataaaagtaaattagcagctagtctattaaaatttgtaaatatatttagacctaaaaagaaaattataaatcaggctagccacgcagagaatgtttttaacctaataaattcactaagcgttccagtgatcccattctttgggacattgttaagtatttatagagaaaagaatattacttatgcagatgactttgattttgcgaccactaacacaaatgtgtttacatctgattttatagaagaaatagaaaataaaggggctgcgctaattgcagtttcagttgtagataaagaattagttgaattaacgtttgatttaaatggtgctaaaattgatatattctatttagacagtgatgatgaatattatattcatcggtgtccaaacttcagaaaagaaagagcacaaaaagaattcactcttatcgagaaaagtatctatacttcctactttcaagttaaatatccaatatttggattaaagaaagatgatttttcaaaactttcgattcctgataattgcccagaaatctttattcggcattatggtaatgattggatgatccccaaaaaaaataactttatcgactttaaatcatacgaatttattaataaagaaagctacactgcttttggttgtagcgaaaatattaaaaaacacctcttagataataacttattaagtaacaaatga

SEQ ID NO: 293018 - DNA, 276 bp, Morganella morganii
atggctaccatttcagtaaaatgccgattctgtggattaaccgcccctgttaaaaaacatggcaccggcaatggaggtcatccccgttatcgctgtcaggcctgttgccgcacttttcaactcgattatacctacaacgcttgtcagcccggcatcaaagagcaagtggttgagcttgccatgaataatgcgggtattcgtgacaccgctagggcattacatatcagtatcaatgccgtcgtccgcactttaaaaaactctcgccacggaatgtaa

SEQ ID NO: 293019 - DNA, 639 bp, Morganella morganii; identical to SEQ ID NO: 266670

SEQ ID NO: 293020 - DNA, 267 bp, Morganella morganii
atgaatatattaaaattaatcacattaactgcaataaccacgctgacagcctgcagccataatgtatacaccaaaccagtggattgcaccgggcatatgcttgaggggctggataaccgacattactcagctaagctgacaaaatatgcaccggacagtaaacggtttttcagcacaggagctcctgttctggggttacatggttggatccgtatggatgcatttgacaaaattacatgtgttaaaggcaagggtacagaggactga

SEQ ID NO: 293021 - DNA, 339 bp, Morganella morganii
atgaaaaatgaatttttattaacatattcagtaaacagtgacgggtcatcgcaagcggatatggacgccaacactgtacgatccaagatcgatgattacctatcactggatgaagacattgatgatgttcggaaacttgatgccgttgaaactacaattactggcgtgattacagttaagtcttctatggaaatatacaaaatatctgacgttaaagaattcataggacggtcagtgaaaaaactaattaaagactacgatatcaaaaaatcgcggttagaaatccactgtgccatcttagtgcatgggatcaaaaaaacaattgagtttcaagtgtaa

SEQ ID NO: 293022 - DNA, 471 bp, Morganella morganii
atgacagccattgtttcccctcatgtttgctgtaatgacgggattattacggatttatccggttatggctgtattcccggaaaccttggtttaccggaaaagtatcagcccaaaggaagctatcaaccagccggagattatccgttaacgagtctggtatttggaatcgggcaaagatggcaggatgttgaaagtcagcggaagctggatatcagatacaaaaatacaacaacaaaaccaatcggtgtcacggttacagttgtatcatccggcactagtactctggtggcagtgaggctatatgttgatgatgttctggtgggtgcaacacagtcacaatcatcaacggggggccgaaacacatatttaagtgtcagtgcggttgttccggctggttcggaatattacgccgtgaatccactttcgacggcggaaggcggactcctctatgcttggtctgaatttcgctga

SEQ ID NO: 293023 - DNA, 915 bp, Morganella morganii
atgaacaaaatagattgtttagtaaattccattaaggagcagtccgatagtgtcgatttaattgttaaaatttttgaagctaaattaatagcattgtcgttcgataaatttaacgctgaccattggggtttaaaaattattcatgacagtttagtaaagattttacatattgtagaaaaagaacttgactcgactgaaactttaaacgtgatttctgttgctcgctatatatgtgagcttaacattcaacttaatttaattaaaaatgactctcgttatagtttagtgtattacggcgagttgattaaaaatcagagggagtattggagcaggtttaaggatcagttggagcgagagataatcgctttcaacagcttaaaaaaacaagaaaatgaacttcataaccaaaaactttcggaaatattacagatgccaaaggggcctgagcagacagaagcagcgagatctttatctcagtatgtgttcaaggccattgatgaaaaagctgatagaatattttctatacatgcggaacaagcgaagattaatggatatgacttccaggctatactcattgctaagaaacaattgccacaagtcatagaatcaatcaacgagattgatatagaagagacgacttacaattcaaatgtatctggtgatataatcgaaatcataaattcaaaaacatcttgggcaaagaaatccaagataacaaatctttatgatgattatcatttcatatattcattttctagtaaattacttcatgctttacctgcaagcatctctactcgtgacctagggttatctaatgatgaaaaaataatattcttaaaatttataaaagttcgggtgttagatattctgaaattaagtcaagaccatttaaaaaataagtgccattccaattaa

SEQ ID NO: 293024 - DNA, 327 bp, Morganella morganii
atggcaggagttaaaagagttgatcactcaaaaataatgaccgcgagcgaagttgcaagacatctgttaaataattgcaagtcattggttttgtatgagagctttatgtttggttcatcacttttggggataggttgtgattacgatatattggttattgggccctcaggtgatactttgcataaacttaaaaatgaattgaaacttgctggcgccgaattaccgctagatattttatatatgcttccaatcgaagctgaacaaacactgtttgtgaagaaacaaaaatgcgtatccctttcacttttggctacacaagggagttag

SEQ ID NO: 293025 - DNA, 645 bp, Morganella morganii
atgagctggcaagtaaattatgcgattgaatatattaatggtgacctaaaagaatcagggtctgcagtacatgttaatggagatactattagagtctctattcgcgataggcctgatgtattagcagtaatttcagcatcagaagaaattagcttgcaaattgctcagagatatcatcatgatttcccggatgtagattttatatgtggttatagaaaagagtgtgtatggactggagaggccatcagttatcttacatcagctaaaatagggtggggtaacgccggaacattttacagagctctttccgataatactctcaatatcgcctcacataaagactactttttctcgtatcgactcataacccagatgagagtagtaaaagaaattgagagacagcttgatcgtgtttttattattactttggcaaacagtcgaaagctaagagtaggcatgttaattgaatatgaaccgactgcagatgctgtgcgcacattctgggaaagatttggccctgttgatattttatggaatataaatcccaatggagaacctgctcgaaatgcctatgaggcaggtcatgaacttgggtgtgaggtaatgaaatggcaggagttaaaagagttgatcactcaaaaataa

SEQ ID NO: 293026 - DNA, 693 bp, Morganella morganii
atggcaacccgtaaaagcattccaaatgagatcaaattacaattgttttctgcatcagcagggcattgtcagcatcctgattgtcataagccattgtttcctcaagagatgggtggttataagcatatcggggaaatggcacatgtaattcctcatggcaataaagggccaagacatgaggagagacctgaagaggaattcgaagcagactcttttgaaaaccttcttttactatgccctaattgtcacactctcatcgacaaggctcctgaggcgtatcccagaagcctccttctagactggaagacaaatcaccttgtcgctttggccaatcggcaaggcattgttcgctatgaaaacagagagcaagccagagagactgttttagccgcgatggatgaaaataaagctctttgggaaaaatttgcacctggtgaaggagagagttttacctatgaccctgagtctgaaacggcagagttatggtctcaaagaatgcgtagtatcatattacctaatcattatcgaattcaggctattttaggcctcaatagatgtcatatgacacctgacgagagaggaatttttgcgcagtatctagagcacgttcgtgggcttacagaacgtcatgtctgtggagtttctggtaaagccataagatatccaagagaaatggacggaatattagcatga

SEQ ID NO: 293027 - DNA, 141 bp, Morganella morganii
atgatggctgacacagattttaaactgatgctttttattttccatacaaaaactatctttttattcagcatgttaactattaatataataaacagaaaaagtaatttaaaaaaaaattccctgtttgcattaacaacataa

SEQ ID NO: 293028 - DNA, 756 bp, Morganella morganii
atgaaaacaaagaaaaaagaaaggcgttttgtagcttgttttttatccaagtttagtgttgacaataatccaccaatttatttaggttctgactcatggaaagatgcatacaagctattttaccccctattacacgaacccgccgaaacttttgatagtttcaggaactccattaagaatgaaagagataggtttgatagattttatgaaaccaacccacgaaaagggtggaaaaaagataaactcagtcaatctaacgaattgataaaatcaactatggatgcaatgaatgatgatgatattttttcacatataaagaatatactccaactttctatggtagaagaaataagaaatgatcaatctataactaatacagagaaagaacaaattattctctctcgagtggggcaaggtaaatttaaaaaagactgcttatcaatttatccatcttgtataataactggtattgaactacctttccttcttattgcaagtcatattaagccatggtcaaaatcaactaatcaagaacgattaaacaaatacaacggtcttattttatcacctgtgtatgataaattatttgataaaggatatatatcctttgaccatgaaggaaaattatccgttagctcacaaatttcctcaattaacatttcccttttaaagatagacactaacttccaacgggaattcagcgatgaaaccaaagtatttttacaatggcattacaaaaatctattcaaaaattaa

SEQ ID NO: 293029 - DNA, 267 bp, Morganella morganii
atgccagcttatcaaatttcttacgatctgcgaaagcagaaagattatgctccgctcattgagcgcatcaagtcttatgggacctggtgtcatcctctggaatcaacctggattattgtcaccgagcaaacagcaactcaagttcgcgattatctcaaagccgttatggataacgatgatggtttactcgttactggtttgaggggtgatggtgcgtggtatgggctttctgacaatatctctcaatggcttaaaaacaacttataa

SEQ ID NO: 293030 - DNA, 579 bp, Morganella morganii
atgccaacacctttaaaaaagttaggccaaattgcaggcatccgttcaggccacactctaaggggagcaatcacgcctgaccctgaaggagatgtgcgtctgttacagattaaagacctcgatcaagactggcagttcaaccacaaagtactgcctactgtcgtgtgggaacaacgcatcgctcctccattccttgaacagggggagattgttgttgccgccagaggtaatcgtaatctggcagttgtatatcgtggccaggttcctgtggttcctaccagccagttcctgattgttagcctcaaaagaaaagagcgcgagattgcccctgaatacgtgtgctggcttttaaaccatccgacgattcagcagtggttccatcggagtggcaccaatattcagttaataacgaaatcagcgctgctggatgtcgctatcccggttccgcctattgaaactcaattacagcttatcgagctccagcgcatatggcagaaagaagatgaacttatcaataagttacaggaaaatcgccatcagcttgaacttggtattttacaaaaattacttaaggattaa

SEQ ID NO: 293031 - DNA, 1524 bp, Morganella morganii
atgagcaatatgatcgatcaggaccgcatcaatcgcgtgctatggggcgtatgtgacactttccgtggcaccatcagccctgatacttacaaagatttcattcttactatgctgtttctgaagtacatctcggatgtctggcaggatcactatgatggttacaaagcccagtatggcgatgagccagagctgattgaagagatgatgaagaatgaacgctttgttctaccgaaagatgctagcttttatgctctctataagcgtcgaagtgaggcgggtaacggtgaacgtatcgatgtagctctacacgcaattgaagaagctaacggcactaagctgaaagatggcagcaagagcgtgttccaggaaatttcatttaataccaataagcttggtgatgaaaaacaaaagaatctgattttgaagcagttactcgaagattttactcatccagagctgaatcttaagcccagccgggtggggggattagatgtaattggtaacgcttatgaatatttgattggcaagtttgctgcgaatagcggccagaaagccggagagtactacacgccaccagaagtgtcagatctgctcgcagcgctgcttgacccacagccaggggaatctatctgtgacccaacctgtggttctgcttcgcttttgatgaaatgtggcaagtgggtggctcaacagcaccatagcaagaactatgagctttatggtcaggaggcaattggttccacctggtcgctggctaaaatgaacatgtttctgcacggcgaggataaccataaaattgagtggggtgacacgatccgtaatcccaagctactcgataaaaatgctaacctgatgctgtttgatgtggtaaccgcgaatccacctttctcactggagaaatgggggatagatgatgtaaaagacgatcattttagccggttccggcgcggactaccgccaaaaaccaagggcgattttgcctttatcctgcatatgatcgagaccatgaagccgaaaaccggacgaatgggcgttgtggttcctcatggcgtgctattccgtggttctagcgaaggtaaaatccgacagaagttgattgaagaaaacttgcttgatgcggtaatcggcctcccagaaaaactattttttggcacaggtattcctgcagctatcctgatatttaaaaaacagaaggttgacgataaggtactttttatcgatgccagccgtgagtttaagtcgggtaaaaaccagaaccagctgagtgcggaaaacattgcaaaaattgttaaaacctaccgtgatggtgataacgtcgataaatacgctcatctcgccagcctgcaggaaatccgcgacaacgactacaacctgaatatttcccgctatgtcgatacgtttgaagaagaagaggaaattgacctgatcgctatccatactgagcgaaaacagctgcaattgcaattggctgagctggaattagagatggcgaaataccttgaggagttaggttatggtgcctga

SEQ ID NO: 293032 - DNA, 1221 bp, Morganella morganii
atggtgcctgaaggatggaaaataagaactcttaaagatattttatctggctctattagaaatggtttttctcctattgcctctgataaggaaacaggtttttgggtcttgggtcttggttctctcggtgatgaagggatcaatgttactgaaataaaacctgtcgaaccaacagatagagtgcttcaaacaaagcttagttatggggacttccttgttagtcgctctaatacaccagacaaggtcgggcgttcaatttattttcgggatgagattgagaactgttcttatcctgacctgatgatgaaatttaggattgatgagagtaaagcctaccctctattcatcgagcaaaaattaaaaagctctgatgtaagagctttttttaaaaactgtgcggctggtagtagcgcgacaatggtaaaaataaataaggtcattctggaaaaaacacctttattacttccaaatataaatgaacaaaaaaaaatcacccaagtcctttctacctgggataaggcgatcgctaccaccgaacaactgcttgccaacagccaacagcagaaaaaagcacttatgcagcaattgctcgcaggagagaagcgcctgacaggattcaagcaggcatggagtaaggttaaagttagtaacatgggaagtatctcttccggaggtacgccagacacaaccaagaaagaatactgggacggaggtattaactggttaacgcctacggatgttacgtctctcaaaagtcggtatgtgtttagtacaaataaaaaaatatcagaagaaggtttgaaaaatagttcagcaaagatgcttccaagagggtcgttacttatttgtacaagagcaaccattggtgccatggctatttctacaacagaaatagctaccaatcaggggtttaaaaatttagtcccgaatgctgagttttctgttgaatttctttattacctttttactttcaatattaaagagttagtaaggaagtcatctggctcgacatttttagagttgtcgaaatccgattttgaaaaattgacatttttatgtccctgcatagatgaacaacacaaaattgcttctgttctaattgctgctgacgacgaaatcgcagtgcaacaacaaaaacttcactacctaaaacaagaaaaaaaagccctgatgcagcaacttcttaccggtaaacgccgggtaaaggtggaggccgcatga

SEQ ID NO: 293033 - DNA, 1047 bp, Morganella morganii
atgactgataaacacttacctcaacctccagcaggtgaattcctgctgtttcaaagcgaagatggtcgtgcacgcgttgagtgccgctttcagtcagatacgctttggcttactcaggcatccatggctgagctatatgataaagatgttcgtaccatcaacgaacatttgatcaacatcttctctgaaggtgaacttggtcaaaattcaactatccggaaattccggatagttcgccaggaaggaaaacgtcaggtttccagagagatagagcattactgcctcgaagccatactagctgttggctatcgtgtccgctcagttcgggggactcagttccgtcagtgggccacgcaaaccctacaggaatatgtgattaaagggtttgtgatggatgatgagcggctgaagaatccgcccgttggctcttctgtggtgcccgactactttgacgagatgctggaacgtatccgtgatattcgtgccagcgagcggcgcgtctatctgcgtatgcgggatattttcgcactggctgctgattatcagccgactctgaaagagaccaccctcttctttcaaaccatccagaacaaactgcactttgcttgcactgggcgtacagccgctgagctaatccaccagcgggctgatgccagccagcctcatatggggttcaccagctataaaggcaatgaagtacgaaaaggggatgtcacggttgctaaaaattacctgacccaaaaagaggtcagtgagctgaaccgtgtagcgaatatgtggctggactatgccgaagatcaggcgctgcgacgccagcaggtttttttgcaggactggcaggagaagctggatcaattcctgcagttcaacgaccgcaaagtgctgcagggtgcaggcactgtcagtaagaaaacggcagatgaaaaagctcagggtgaatatgcaagatttgcagaacagcggcgtttgttaaaagaggctgagggtgaaaaggatattaccgagctactgcactggaaagccaataaagataaggggacttcatga

SEQ ID NO: 293034 - DNA, 3279 bp, Morganella morganii
atgagcatgcaaatcgcgccaaaattccaggaagagtacagcgccaagctcccggcgctggctctcttgagcagtttaggttggacatatatttcgcctcagcaagccatgtctgcgcgagcaggcaaggcagatcaggtggtcttaaaccagattttgcgtgaacagttagctaagaggacgtttatctttgccggtaaagagcatgccatttctgaaaaagcgattgatggcttggttgccgaagttaacagtcccgcattaaatcagggtctgattaccgccaatgagcacttgtacaaccaccttttgtacggcatctcagtgacggagtttatcgatggcaaacgggcgaacccaaccatctcgttgatcgactggaacaacccgaagaacaacagctttgttttcaccgaagagttcagcgtgacacgcgctaacggcattgaggtgcgcaggccagatattgtctgctttgtgaatggtattccgttggtagtcatcgaggctaagcgcccggatggcaatgctaaaaaagggccgactattgacgaagggatatctcaaagtctgcgcaaccagcgtcatgatgaaattccgagactgtttgcctacagccagatcttactgtcgataaacggtcatgatgggcgttacgggacttgtggaacaccagccaagttttgggcgacatggcgggaagaagatatctccgatctggagatgcttactatcaaaaatcgcaaacttaacgcgcagcagatggagttaatcttcagccatcgaccggttgcctgcctgaaatggtatcagaacctgattgccgcgggtgaactggctttaacgggccaggaccagctacttatcagtctgcttttacctgaacgtctactggatatggctcgtttcttcacgctgtttgataagaaagccggtaaggtgatagcccgatatcagcaggtcttcagtatcagacggctgctacagcggattgaaacgaagaaccctgacggcagccgcaacggtggggttatctggcataccacgggctcaggtaaatcacttacaatggtgttcctcagcaaggcgctgattctgagtgaaactctcaagcagtgccgtatcatcgtggtaaccgatcgcgtcgatttggaaaaccagctcagtcgcacctttatctcaaccggggaactggcaggtaaaagggataaagccgatgctattgccacctctggcagacgtttagccgaacagataggcaaggggactgagcgcattatcttctcgttgattcaaaaatttaacacggccacccgcttgcccgagtgcgtgaataccagccccgatatcattgtgctgattgatgaaggccaccgtagccatggcggtgagagtcatcaacgcatgaagctggctctacccaacgcggccttcgttgctttcaccggtacgccgttgctgaaagatgataagactactaataaattcggtcccatcgttcatgcttacaccatgcagcgtgcggtagaggacaagactgtcactccgcttctctacgaagagcggccacccgaactgaatgttaatgaacgagctatagatagctggtttgaccgtattaccgaggggttaacggataaacaaaaagccgacttgaagcgtaagtttgctaataaagggcaggtttataatgccgatgaccgcatccaccttattgcgctggatatcgccaaccattttgtcaagaacatcgatgatggcttgaaggggcagctcgcctgtgacagtaaagctgcagcgataaaatacaaaaagtatcttgatgaagccggactgtttgagtctgcagtggtcattagttctcctgacacgcgtgaagggaataccgaggtggatgaatctggcatccctgatgtgaccaaatggtggcaagataatgtcggctctcaagatgagcagatttacacgcgcaatgtcattgagcgttttgataaagatgattcgctgaagctacttattgtggtcgataaattacttaccggctttgatgaacccaaaaatgccgtgctttatatcgataagcctcttaaagggcataaccttattcaggcaatagcccgtgttaaccgactccaccctaagaaaaaatttggtctgctaatcgattatcggggcatcctcaaagagctggataccaccattgaggattaccagaagctggcatcccgcacgcagggcgggtttgacatcgacgatctggtggggctgtacggccagatgagtacggagtacaagcgccttccccagctgtataaaaatctgtgggcgattttcgcaggtgtaaaaaacaaaaacgatattgagcaactccgtcaggtgctagtgccgcgcacggaagaaaagcatggcgaaatggttgatgtgcatcttaaagtccgtgaagacttttatgaggcactcacccaattttccagttgcctgaaagtggcgttgcagtcggctaccttctttgaggataagagtttcagcgaagaggatcgccagcactataaagagacgctgaggcaatttaccagcttgcgccagctggtgaagcaggatgccggtgagacagtagattatgatcagtacacagaacaggttaaaaagctgttggataaacacgttgttggcgtagaagtccgcgagcttgatggagtgtatgaagtcagcaaaatgggacaacgacccgaagagtggagcgaggataaaactcgcaatgaaacggatattatcaaaacccgtgtaacccgcatgattgagcaggatttacgtgatgatccttatgcccaggaagccttctcgaagttactgcgtctggctattgaagaggcggaaaaactgtttgatcaccctctcaagcagtacatgctatttcgtgagtttgaggagcaagttcaagatcggcggctgaacgaaatacccgacgtatttgctggtaatcaccatgcacaggcttacttcggcgtgtacaaaaaagtactgccggaggtttttgccgttaccgattctcaagttatcgataagtgggtgaagcttgcttttgaagtagaccaggcagttgatatctcagtggctgagaactcgatcaatccgcaaaatatcgaggctgatatccgcaagaagcttctgcctatgatgtttaaagagtgtaaagcaataggtggcggaatggatcaggcgaaaaagattgtggaaatgatcgtccagattacccgtgtagggctgagcggagtctaa

SEQ ID NO: 293035 - DNA, 735 bp, Morganella morganii
gtgggcgaaagagcaatgagcttcatttacggtgatgaacgtattaccttcgagtgtaaaccccgaccgttggtgaatggacgcctcttgataaaagttcaccccgactgccgggttgttgtatctgcgccgcaggataccgatgaccaacagattctgaatgccgttgaaaagcgtgggcgctggatctatcagcagctacgagacttccgtaagcagctggaatatataactccacgacagtatatcagcggtgagagccactattacctgggcaagcagtacatgcttaaggtgatagtggctccctctgacgctcagggcgtaaaaatgttgcgtggcaagctggaagtcaccttacgccataagagcgctgaaaaggttctgcagttgctgactgactggtataaggctcgagcccgcgaagtcttcgccaaaaggctgagcgctatgctggagcaagcgttatgggtcagtgactcaccaccattgcgcattcttaccatgcagactcagtggggaagttgttcccccaatggaagggtgaccctgaatcccaatctggtaaaggccccgcgtgagtgtatcgattacgttattttgcatgagctatgtcatctggctgagcataaccatagtgaacgcttctaccggctcatggggcaggtaatgcctgactgggagaagatcaagaagcgtttggatgggatggctgggatgataatgacaagctga

SEQ ID NO: 293036 - DNA, 630 bp, Morganella morganii
atggaaaaaatcatatgtgctctgtgtaatactgcagttgaggtgacggtgctgtccagtcatttgctaaccaatcatggctggaagatggcacctcatcttgctaagccggtagttgaggcaccgcttattgcccgtcaaacctgcaaatgtccaatatgtaacgtttctctcaaagacgctaaaagattagaaaagcatataaataaagcccattcagaaagacgaagctcttcttccatcagtagtactccttcaaagaaaaacagtgtaacgacgatttcctatcaatgggcgataactcaaccgctcgataaaaaatactccgctgtagtagagaaattcgttgctgaaaaaacgttatctgaaattgaaaaagaaataatgaccatcgtgaatggctatgatatggcggatacttccagacagagcttgatgtcagggcggctcattctgcttgcccatgccaagaaaagacttgctgcaaagagcaaatcaagcaaaaacaagaaagtagcggcaaagggtaaaaaaaacaaaaatgccaagtcacgagacattatggaccaatacattggcgggcgcaggattgttgtctccggcggtttaccttccttagggaaaagataa

SEQ ID NO: 293037 - DNA, 987 bp, Morganella morganii
atgataaatctcagtaactcaatacgttgcaaaaaaagtgtatatccgccccacctcttgattaggtggtatcttgcgagcatcatcgcaattatttccctaactatgaaatctatggactccagcaaaaacctgcaacaggcaattgccagcatcacgatctggcgcaaaggtgaacaacgtgcaccacataagccattgctactgctgtatgtactggcatgttatcagcacggccacagccgcctgttcgattacggttcagaaattcgggataacctgcatagcctgctggaacggtttgggcctcaacgcgctcagtatcgccctgatatgcccttctggcgtttgcagggtgatggattctgggagctgcaaaatgcggaacgctgttccacagcaggtagcagtaaacagcctccggcaggagagctacttgaatataacgttgcgggtggcttcgatgagcagcattatgccctgctgataaaaagcagaaacctgattaatgtgctggcacaacaaattctcgaagcgaactttaccgaaagcattcaggaggaacttgctaacgaattaggttttgaaatccgacaaattcgtaaacaacgcgaccctctttttcgccagcaggttctacgcgcttataattacgaatgcgctatatgcggattcaacatgaggcatgacaacacgtctgtagccttagaggccgcgcatatcaaatggaaacaatacggtggcccttgcgagatccccaatgggctggcgctctgtgcgatccaccacaaagcctttgataaaggatcgatagggttagatgaaaatatgcgggttcaggtctctgacgctgttaacgggagcggtatcgtcggcagactattctgggattttcagggaaaggtaatttcattgccacaggtgaaagcacactatccacaagagagatttgtagattggcatcggcgcgaagtttttaagaggtga

SEQ ID NO: 293038 - DNA, 441 bp, Morganella morganii
atgcaactattcagaccaattcaacacgctattaccgaagatggtgagtgggttacagccagggagttgcccgttgattacatggggcgactgaagtgcgatggctgccatgccagcgtggtggctatcgagaataaatcgggtgaggaggaatttgttcatttacaccacaatctgcaggaaatcaccagaactcgcaggtgccggtacgcaattcgaacgcctgccgccatgcgctcaacggatacagggatggcgataagcagacccataaaagcagtcactcagatagcccccataccaccaattggcccaagaatcctgcggatcagtacaacagtgagaaaatggcaatgcatcttgtgtaagcatcactactatgggaccaagcagtgcccattatgtagcgaatggacatacacgcttgaagataatggatga

SEQ ID NO: 293039 - DNA, 654 bp, Morganella morganii
atggcatttgaattgaaagacttattgactccggtggcttcccttcttgctgtctggcttactgccagatttacccttaatcgtgaaattcgtaagaaagaactggagctccgtgttgaccggctggagaagctctctgctgattgcgatgaggttttattacagcttatcaattatgctggttttatcagtgggcttgttcagtcccggctcttactactcactccgactcaatcaaagactctgattcctattcaagcattttctgaagacaaggaccttttagataatagtaaattggctccagatagggagaaagggcgaagatgcgaacacggcttacgcttccatcattatcaggagtggcaaaaatgggatgctattgtcccgaagctgcaaaacgatatttatgattttttcatcattacacctgctggtgagattgttaaagatttaaaggatcagggccgaacacaagaagagtgcgaggcatttgttcgacaactcagtaaatggcaaaaaaatgctgataccctgcgaaaacagctccttgacactatgtctaaagattttcacgagttaactaaatcgaaatcatcttcatggttcagacggtcttgtgtacgttcatggttcaataagccgggatgttaa

SEQ ID NO: 293040 - DNA, 180 bp, Morganella morganii
atgggttcagttttagatgggggcgcgaagacccccgatttatcgctctcagaattgtgcggtgtaattcacgaatgccagcttgttgccatcggggtctttgacgtaagcgctgttgaaaccttcgcagtaatgcggacgcagaccaagcgctcactcgttcgtgccgccgtggtttaa

SEQ ID NO: 293041 - DNA, 252 bp, Morganella morganii
atgtcacaacatgaacagttctgtcaggcttgcggaatgccgatgtcggcgcccgatgcacacagtgccagtgataaatattgtgcgtactgcagcgacagcaacggcaatcttaaaccctgggaagaggcggtatcaggcctggccagcttccttgattcctggcaaaaagtcggcccggaagaatcaaaaaagcgggcaaaacgttacctgacggcaatgcccgcctgggctcataaagcagaggagtga

SEQ ID NO: 293042 - DNA, 444 bp, Morganella morganii
atgaatacacaaaaccttcagttcgctgagcaggcagcaattactgcctcaacggtccctgatgaattatgcatcagtttctggcctcagcactttggcgcaatcccgcagtggataacgcttgggccccgtgtctttgcttggatggaccgtctctgtgccgattaccacggcggtatctggcgcttttcgacgctcagcaacggcggcgcttttatggctcctgagccagagaacaatgagacgtggacattgttcaacagcatgaacggcaacggtgcagagcttaccagtgtagcggcagggattgtcgtctgcctgatggcatacagccaccatgcgtgccgcaccgaatgcgatgccatgacggagcactattctcgcttacgtgatttcgcgctgagccatcctgaatgtagcgccatcatgcacatcattgactga

SEQ ID NO: 293043 - DNA, 480 bp, Morganella morganii
atggagtcacagttaccgctgtttgctaccacattaccagcgtcagcacagcaaaccatcagtaaagccttaaccctgctggagcgccagttacgcgaacccggcgcatcattcacctccagccataccgtccggaactggctgcgcctgcaactcgctacgctggatcgggaagccttcatcgtgtttttcctcgacaaccagcattgcctgatcgcccacgacacactgtttctgggaaccatcaacagtatcaccgtgcatccgcgtgaggtcgttaaggccggtctgaaacacaatgccgctgctgccgttctggctcataaccacccgtcaacccatgccgaacccagcaaggccgacagactgattacagaacgcctgaaacaggcattggagctggttgatatccgcctgctggatcacctggtgataggcggcatggatattgtctcgtttgctgaacgtggctggttatag

SEQ ID NO: 293044 - DNA, 321 bp, Morganella morganii
atgcacatttcatctgtaccggccacggtgccggtttcgtcacgtctgccacccgttcaggtctggcagcaactgctaacgtatctgctggagcatcattacggcctgatgcttaacgacacgccattccacgacgatacggccattcaggaacatattgaagcgggaataacgcttgccgatgctgtgaatttcctggtggaacgctatgagctggtacgtacttaccgaaagggatttagctggcaggagcagacaccgttcctgactgctgtcgatattctcagggccagacgtgctaccggattaatgaatacttaa

SEQ ID NO: 293045 - DNA, 831 bp, Morganella morganii
atgcaaacagaaactgatgtattaacggatcataacgagctcatcctttcgacaaatattgaacgtgtagtcacaggccgtgatgctgcattgatacagattgagcagcttattctgcagcttgatactatctcccgattaactgccgcagtcggcggtggaactgcgcaagactgggcaatgaaatccgggcatcgctacgatagttggctgacagaaacgccagataaagcaatgccagccgtcacccgcaatatagatcgcagtatctggcgagacttgatgttgaagtctggcatgatggctttgatggatgcacaagctcgtgaccaatggcataagaacctggaggagggcgatctaccaactattagtgaggcaaatatccttagtacctttgagcagctacatttgaacaaaatggatgttttcgaacgtggcattatcaacgtgttcaaaggactatcgtgggattacaaaaccaacagccccagctgtttcggtaagaaaatcattatcaacaatctggtgacgcataaccgctggggctttagcctgaactggggggggcggcgggaccaactggcggacctggagcgaatgctatttctgcttgatggtaaaccgatccctgacaaccggggcgatgtcactacctggttgatggagcatatccgtgataacccggctaaagacgtttacgaagatgagttcttcagtattcgttactttcagaagggcacagcgcatgtgaccttcaagcgcctggatttggtcgagaggatgaacgatattatcgctaaacactacccaggaatgttagcgaagtaa

SEQ ID NO: 293046 - DNA, 1203 bp, Morganella morganii
atgctaacgaaaaccgcagaagattttctctccgcgctagcagatgagctagcaattagtgaatcacgatatgaacaggcgtgccgcagctatatgtcacttggggactggcttcaccgcccagaatcctctgtcgttcagtttgaaccgcaggtttacgtgcaagggtccttccgactgggtacggtaattcgtcctttgcatgacaatgaggaatacgacgtcgattctgtctgtttactccaaagccttggaacgaaggatcttacacagagccaactaaaagcgttggttggcgaagagataaaagcctatcacaaagctcaaaacatgattaaacccgttcgcgagggacggcgttgctgggttctggactatgcggatggtgcccagtttcatatggatattgttccctctgttcccaacgcgatacgtcagcgtatgttacttgaggctagagggctagacttgaaatggtctgaaactgcaatggctataaccgacattgagtcgcctgtatataggatacactcagatgattggcagcactcgaatcctaaagggtatgccgaatggttcaaacataggatgggtgatgtgtttgagaagcgcaagagaatgttggctgaatccataaaagctagtgtcgaggatattcctgattataaaattcggacgcctctccaatcagctattatgattttgaaacgccaccgtgacggtatgtttgaaaagcgatacgacgagcgtccgatatcgatcattatcacaacacttgccgctcatgcctacagtggtgaagaaacaatagctggcgctttgtattcgattctttcgcgaatggaccactttattgaacgcaatggactccattacatcatccgtaacccttccgatcctctcgaaaattttgcagataagtggcctaagcatcccgaaaggaaagctgcattctttgagtggctgggacaggctcgccaagacttcggaacacttgcgactcaggtcgaaaaacgtcgactggtcgaaagcatccagccccgcatgggggctgtagcggacagagctgccgcgcgtctcgggtcatcctctgggagcatgcttcaaccgacctcagtagctgcggtcatcggtgctactgccagtggcccggcatttccaaacacaccgaggacaccaacttcgcctaaagggtttgcttga

SEQ ID NO: 293047 - DNA, 1713 bp, Morganella morganii
atgtggtgggcggagcagcctggccgtgcacagtccgagcgcgctgctatttcggacttggcggatcagaacccatggcttacgaacgtaacatggcgtgtggccaacttgcagctcgttgctgacttcgatctgcatgttggtgagcagatcatttcattgatgcttacctaccccgagttttacccggatgtggcttcttcggttattccgagagagcaagttcgtttgtccggccatcaatatggtgcggccggagaactctgcttgcagtaccgccctgacaattggacacctgaaatcacaggcgccatgatgattgaaagtgcctatcgcctgttgtcatcggagcaggaaaccggtgaaccggcaccttcagaacatcaaatccttccggctcagcgagcgagaagtgccgtgtttcgcttcctctactcgccgcatgtgttggccggtttgttgatggtcgaagaagggcatatggcaaatgctgaaattcagcatcactttttctccgatgtttttgtagcccaacttgcgcgtattggtcctgctgatgcttctatatgggtcgaatcgaatagacgtggttacggagctaactcattagcaggtaaggtaatccgtttacctaaaggtgaggcaatcgagtgtcggacgctcgatgatctgaatgcattgcttgaacgtcatggcttcgaaactttgggtaccgaactgttacaatcatctggctttataggcatcatcatttttgatggtgttagcacttttgtcccaatggtctgcggtgacgtaggttctcgtaagctgattaactacgacctgatatttgctgaacctgatagtgtgcgcctcgatcctgagtacgctcgcctcaaagcagccaaagttgctgtggtcggctgtggttccgtcgggtctaaagttgctgtgcagttggcccgatctggtgttggacgctttgtgctcgtcgatggggacgtacttgcttcaggcaatctggttcgtaacgagctcgattggcgagcggttggcatgcataagtcgcaagccctgaaagctcggcttcaggaggtcaatgccgattgcgaagtcatcagtcgcactacggttttgggtgggcaggagagcggtggcgcaacttctgcaacgatggggtacatcgcggactgtgatttgatcatagaggccactgccgatccagtggtcttcaatctttgtgcttccattgcacggagagcaaagaaaccgatgtgctgggcgcaagttttcggcggtggcgctggcggcattgtcgttcgcctgcgacctgggctagatccgacgccccttactgcccggcagcagatagaagcctggtatgtaaagcaaggtgtagagtggcctgaaaaaggtacctcacagccttactcggaggttgacggtgcaggggctccattgattgctgatgatgcagatgtttccgttattgcagcacatttatcgcgtttcgccatcgaccttcttgcccgtccagactcgacgatttttcctgtttccgcctacctcattggaatgactgataggtggttattcaccgcgccctttgacacgaggccaatcgaccttggggcaagcgatagctggggcacagaagcgcaggccggtgactctgaagctttaaagcaattaatatctgacctgttccccggtgcaagcaatgcaacttga

SEQ ID NO: 293048 - DNA, 135 bp, Morganella morganii
atgccattctcccaaatagttgaatcgttcgtattgatgacccgtctcaagaaagaaagcttggagagcttcggcatggtcttcggggctacgaacaaaatgagcatgaccgcccgtctggttatcaatcgataa

SEQ ID NO: 293049 - DNA, 1071 bp, Morganella morganii
ttgattaaatatttttttcggtcattcattgactggcttttcaggcggcgctcaccgggtgtcatactgataaaagttggggcgcctcttttggctattgttctggtggggctcacattcggtataacgataccgacatcccaggggccctttgttttcagctgggattcgtctggaagtgccggagctctgagctggggggtgtttgccatcgcgagctttattgtcctgttaggggcatttctgattattctcaatatccgtcaagagagccgcaagaaagttatcgttattgaagcaaggggattacgggattggcagggaaaaccattggcatctgcagttccttccacaatagtgggacgatgcgaacaggtgataatcgatctaaggcaaggggtaattgatggtcaaatcgttagccctgatgcagcaataagtcgcctgatcaacttgcccgatgatattgctcggcgctgtgatgggctggacaggtctgatatctccttcgtgctcggcggactcgcgccagtaccattcctttttctgcttggcgtaattgtcgatgatgaatcccagatggtcatcatggactgggataggacgcaacatacttggggcacacttgctgatgaagatgatggcaatcgcttcattgttacggggctggatgctgtgaacgcaaccgtgaagcgagtggcactttgtatgtctgcctcttatgatgtgcttgaagctgatgtacgtcttgttgaacctagcgtaccaatcatcaaaatggaactagaagggcgcaacactaattcacactggtccgagacaaaacaacagcaacttgctcagcagtttttggatacagtgatgttactgatgcggcaaggcatcacagaaatatcactattcctagcagctcctgcaagcctcacactgcgattgggtacgatttacgataaacgcaatctccctcgtatcgaagttaaccagtacgaacagaacgattccaagcgattcccttgggcgattcaaatgccagttgcgggattacgccatgctcagttaacacaacgataa

SEQ ID NO: 293050 - DNA, 375 bp, Morganella morganii
atgaatactgaatttaaatttttcaaagataaaaataataaagtgtttggtattgatgtggacagcagcaatgaagattcatgggagaatagtataaaaaagggatggacggaaatatccagggaagaagctgaaaagataaccaatccgcccgcaacaaaagagcaactgacagaacaggcagagcaacagaaacaggcgttgatcagagaagccaaccaaaagacccaactctggcagacgcagctaatgctcggcataatcactgatgaagataaagccagcctcacagagtggatgctgtacgtgcaaaaagtccaggcggtggacacctcagctgccccggatatcatctggccggagaaaccggaatga

SEQ ID NO: 293051 - DNA, 252 bp, Morganella morganii
atgactataccatcacctgtttttatgccggtagataaatgtgattccgataacacggccgttatcgggcttttaattaaggaagttcgcacggatgagcgtcgcgtaatcgcagaccgttatgcattccgcatgcgcaatgtcggcatgctggccattcgggacaggctggattgctaccagattgctgagttgcttgagggggaagcgagtcgggcagagaacgaaagccgggagagcgaccatgcctga

SEQ ID NO: 293052 - DNA, 1179 bp, Morganella morganii
atgactgaacaggaagctgaactgaatgctatccgggaaatcaccggatttttgctgatagatgataaaaaacggtatttaacccgcctcgggctggtgatgacgttcttctttaaaaatgggtataccccggagaaaaaagcggccattctgcgctgttaccgccggttccgtgagctgtacgcagggaaactgaagtttcattcccatgaatttgacggtatgaaaaagtattctgaagaaaatatcgccaaaattgagaaaaaaattgaggaatccggagttaatgaacgtatcggatggtatatcagtgatgccaaaaataaagacgaggcggctgagcatattatacgatgcctgacttcttatgaagtagatggtgcttgggggacttcctatttaagcctgtatctgccgtggaatatcctgttttcagcggaaggtaaacaggaatttcaggactgggtgcagtatttatgtcaggagctggaaccggatcacggtgactgtggttatacgctggtgatgccgcgtgactattatctgtttatgccacaggagtgtgagctggcacagcgctatcccgctatggtggtgaattccaccgttcatatggcatcgtctgagtatgaaaatgctatccgcagcgtgcagtggctgacgttcctggctgaccgttatattgagcgcctcggtggtgagactcatgtccgcaaaatattatccgctgatccggaaattaccctgacccgctatccgggcgggctgataattcaggccggtgattatccggatctcacccccggcacaccgccggaaagctattaccggattaatgaactgatccggccaatccgttatgtcataaaaaaagatgattccttacatttttgcggagagggacattttacagaagaaacaagcagacaatggtatgagcgttatgaccgcggtccgatggtcgtttctccgttgtatgcgggtgaaccggcccgggttgacggttactggacaaccaaaagccgcgagaatgtggagaccatttttcttcagggcacaccagcgattgatattgagggcaatccgcccggccggacagaatggcggcttatccgcgaaattccgcatgacaatgaacgggatctgaccctgctggagcaaaaactcaatggccggtaa

SEQ ID NO: 293053 - DNA, 171 bp, Morganella morganii
atgcacaaaaaattaatattcctgctattactgcccggtttcaacctctgtgcttactcagaaaatcagtggactgacaatatcactgtgtatgaatacaacccaattgaactgagctatgacccggcattaccagaatatgcttcttatccaaaaataaaaatgagctaa

SEQ ID NO: 293054 - DNA, 1095 bp, Morganella morganii
atgaaaaatataccggttacacaaccatatttaccaccattagaagaatttgtaccctatcttgaagaaatttggaataataagtggcttacaaataacgggccatttcatcaaaaattagaaaaagaactctgtgaatatttaaatgtagaacatatatcactttttaccaatgcgacgattgcattagtcactgctttacaggcactaagaatatctggtgaggttattacaactccttactcatttgtagcaacagcacattcgattatctggaataacttaactccggtttttgtagatatcgatccagagacatgtaatatagatcctaagaaaattgaggaagccataacaccaaataccacagcaataatgccggttcactgctacggaaatccttgtgcagttgaagaaatagaaaaaattgctgatatttatggattaaaagttatttatgatgctgcacatgcatttggcgtttcatataaaggtcatagtttactggattatggcgatctatctattctgagctttcatgcaactaaagtttttaatacatttgaaggtggtgcaattatttgcaaaaccgaaaaaatgaaacaacgaatagattatttaaaaaactttggcttttctgatgaagtaactgtcaccgccccaggcattaatggaaaaatgagcgaagttaatgcagcctttgggttattgcaattacaatatgtagatgatgcaatacagcagagagagaaaatagaccactattatagaaatgaattaaagaaaatccccggaatagaggttattaatttctcgtctgaggccagtaagaattattcatatttcccaatattagttaatgacgattatccactcagtcgcgatgaattatacttaaaattaaaaaataataatatcttaagcagacgttatttctacccactaataagctcaatgccaatgtatcgtggccttgaatcatctaaaaagctcccaaatgcagagtcaatagcatcaagagtattatgtttacctatataccctgctttagatacctctgacatcaacaacatcattaaattaattaaagaataa

SEQ ID NO: 293055 - DNA, 1224 bp, Morganella morganii
atggaatcaaaaaacagtagtttttattttgatagagttgactttttatctaagtctatcagctattcaacattaatgatttcctgcttatcgatcgtcgggatttttttgaattctcattggctctacggtattgcaacccttacttttataatacaactcctcacttggtttgcaatgcattttaaaacttcgtatgcagctaaggctatagaaacaaaaagattagaaatgctgagaggtattataggcgaggaaaatttttaccgagagcggctctacattgatgggaatgcggaaaataaaaatggctttcgtgcagagaggttaataacactcatacaagagaatgcatactggaactctatcttatatattaaagctttccagcagaagttattctatttattactaacaatactattactaattactataattattattatgtataccacgctgactgataatttagattttcagtatagccgcgccatatttgggatgctagttataaataatttctatattttattctcagaggtgtcaggttttttcaacgcccacaatgagatgaaaaaaatagatggattcatagagattaataatcgcaaagcaccagaatatctatcttacatatattctaaatacgaacatgagatatttatagctccaagcattaataatgcaatttatttgaaacacagtatgcaaataaaacaaacctgggctcagcggctttataataaaaataactttcagagcaaacaattgatcgacgcgattactgaattaacattattactccaaccgattgaggaggattggagtattactggtggggctaataggtacttacaaggtgttcaaatttatgcaaatgatattgatatcataacaacggagaaaggggctaatgaaatatgcaagttaatcaaccctagtatcaaaggggacttgtttaaaaccacatcagaaaatatcaaatcattttattgtacatttatgttaaaaggtatcaaaattgaagtaatgggagaccccgagaacaaaagtgaattagcgtggaatgaaaataaaaaatggaagaaaaatcaagagtcccttttattaaatggtgttgaaatacctattgtcagcttagattatgaaattgaaataaaccaagaaattggcaattataatgcatttaaagacacttgctatctggaaaattatagatag

SEQ ID NO: 293056 - DNA, 729 bp, Morganella morganii
atgttagaaggacttggttattgctttacacaacgccctgaaccagatccgatttcgaaaaaaatccttaaattgctacaagtatttttatatcgaatctcattaccaaaagctcatactgtactatttttgaataaagatgatgctaatgaaatcattaaattacataatattcccttaaagtcatatgagattataggtggtattggcgttaaccctaatgattatgtgtattcagaagcatcatcatctgaacctattatatttacaatggtctctagattactaattgataaaggaattagagaatttatatctgctgctaaaatagtacacaggcatcatcctagtgctatttttaaaataataggcggaatagatgaaaatttaggcggtataagtaaaagtgagtttgaaaaatggaaaaaagacgtatttgtattaccttcatatcgtgaaggagtccctaaaagtacgcaagaagctatgcatatcggtagaccaattattacaactgatgttcctggttgccgagaaactgtaattaataatataaatggatttttaattccgccttgggatgccaatgtattagctgaaaaaatgctattttttattgacaacaaggaatcaataattcttatgggaaaagaaagtcggaaaattgcagagaagaaattcaatgaagatatattctgtgacaaattagtaaaaatactaaccctctaa

SEQ ID NO: 293057 - DNA, 1098 bp, Morganella morganii
atgataaatcaatcacctttgatatttattaaagaagtaataaaatcgtcccttcaagttaaagatgaactggttaaacttaattacatgaaagaaaagagttcatggggattgtcatcaatctcaccagattctacgtatgataattatatatttattattggtgaaagtgcccgcaaagactacctacacgcttatggatatcctatcagtaatactccatttatgagctcagctaatggtctcttagttgatggattaacttctgctggcacaaatactgtagcttcccttcgattaatgttaacatcacctaataaaaatgattggactccagactatacaagaaactttatcgagttagcaaattcagcaggttttgaaacatattggatttcaaaccaaggctatattagtgattatgatacacctatcactgctgttgccaaaaatagcagtcataagtatttcttgaagtacagagactacgcatcaaaaaacacaagtgactttgaattattagatttatttgaaaaaattattactgaaaatccaaaacaaaagaaacttatagttttacatctttatggttctcatcctgatgcctgtgacagaattgcagattataaacctatctatactgttagtgataaaaaatacagctatctcagttgctatatctcttctataaataaaactgatgactttataaaaaaagtttatgaacttgccaatgctgcgtatataaaagataaatcatcatactctatgatatatttttctgaccatggattagctcatcgtgatattgacggtgttatcaatttcaataacaaccgagccagtaaattacactttaatattccattatttatgactgcatctgatatacatgagcgtaaagtatgcagttcatttaaatcagggctaaactttactaatggtattgcaaattggttgggtataactaatgataaattagatccaaactatagtttgtttgattgtaaggatgatcctgaagactatgggttgagtaagataatatcagaaatacctggtgaaccggatccagcaattgatattcgtggtaaataa

SEQ ID NO: 293058 - DNA, 780 bp, Morganella morganii
atgttttttggaaaagagattaatataggttctctaggaaaaaataaaatcaagataactgttaccaatgaagaatccaacggtgttcctatagtaatcgctcctggctttttaacagagcattccgaagattgggaaaactttttaaaaaaacatattaatacaaaaattatttatgttaattggcaatcttcatcagctttattgatggcaaaacgagcattgtttagcatgttaccatcatggacgtctgctctttatactctagggccaggatggctacgtgctggcggtgtgttaacatcactttgggagatatataaagtatggagtagggcagcggatgaagcaaattcagcaggcgtggctcttgcgagattcttgaatgatgtatgggatgatgatgataaaggtatttttattggacattcgttaggggtaagggttattacagcagccatggctagccttaagagtgataacatcctttcttctatttcaatagcaggagctattgatgttgatgaatatgaggaccgaataaaaaaaacaaaatgccaagagcgtgtaaagcatacaaatatctttagtaataatgacgcgattctgaaatatttatatatacctgctgagttgagcttttctccattggggcttgagaaatctaagttaccctgtgttaacaatatccttactgatattggtcataccgagtatcatgataaagaaatgttttcagaaatgattattgatctttacaacgatgctttgaacaaatga

SEQ ID NO: 293059 - DNA, 672 bp, Morganella morganii
atgttggtgggggggactttaattgggggttattcagtatgttattttttagccatagaaaatgggattactccggggcttattgctacaataatgggagcccagccaatactatcactatgctttacagagcgtaaaatatatggttttaggttaattggtttaagcatagccttgtttggccttgttttacttgtctggcatagtctttcaagctcacaatttccaattgtcggtcttgtgctttcgtttgctgctctcatgtttatgacggtgggtgttatgctgcagaaaaaattaaatcaatctccttcccgatctttgccaattcaatacgttgtaagtttatttatttgtctgatattaattccaattgaaagtgtcagtataaatttcaacgttaatttagttgtatcggttatttttctaggggtttttatttctgtaattgcacagttcttactttattatttattgaataatggtaacattgtaaatgttaccagcttgttttacttggttccaatagtaacaacacttctcgattatattatttttagaaactctccgggtttttatggtctaattggaatgtgttgtataatattaggggttgttctggttttttatggtccgaaatatttaaatttaaccttgaggggtagtgtgtaa

SEQ ID NO: 293060 - DNA, 543 bp, Morganella morganii
atgaaaaaattaacaagagcatcttggattaaagcaggacttaacatattagataatgaaggatatgagcattgctctattgaacgaattgcaagaaaactaaatgtaacaagaggttcattttatcatcattttgtgaatcgtgacgacttcattcgaacaatgctttccagttgggcttctgaagacacagaatacatactcaatctaatcgattctgaaacctctattgataaaactttattgaaatatatcaccttagcatcacaaaaaaataccaaacgagaagtccaaatccgtacctgggccctacatgacccaatcgttgctgaataccaacttcttgttgataatcacaggttaaacatcgttattgacacactaaaaaagcaaaaattaacgtccagatatgctgatacactaggtaaattaatccacatttgtttaattggaggcacaataaccggggagagaactattcacggtaatttcgccagactaatatcgaacggaataaatataaaaaaatctctattcccctga

SEQ ID NO: 293061 - DNA, 603 bp, Morganella morganii
atgaaaaaaatcgttatagtggcttttgaagatttcacagatatagacctgttttttatgtgggatatattaggccgtaacagtaccgattgggaggtgaaaatacttggactcaccccaactttaaaatcagcacatggactagaaattcctgttcatgggtctttatctgaagcaaacactgcggatgccgtcctttttagcagtggaaaaaaaggagtaccagatgcaatttctaactctaaattcatagaggcatttaatttaaactcggaaaaacaatatatcggctcaatttgtgcgggagcattaattctcgatgcactaaatctgttacccgagcggaaagcaacgactcatcctgatgcgatggaggctttggttaaaattcatgttgagcctataaaccaacccctggttgttcataacaaaatagctacagcgggggggtgtatgtcagctatttacttaatagggtggttaatagaatctttattcgatatagaaaaaagaaaagaaacgctacttccagttttccccacaggacaacaagatacttttgaatttatgatagattcatgtctgaaaaaaaatatggaatag

SEQ ID NO: 293062 - DNA, 462 bp, Morganella morganii
atgaagaatttgatagcatcaatatcagtgcttgttaataaatataagagttataatatgcttacaggattaaatcatataacccttgcagtaaaggatattggtgttagcttagaattttatcgtgatatccttgggtttaaagaagaagctgtatggaatatgggggcgtatctatctctggggaatttatggctttgtctttcgaatggccaagtatcgattcaagatgattatacgcattacgcattttcaatatctgaagtaaatatacaaaagtttaaaaaacaaatagcggatgcgggggtaattgaatggaaagagaatacaagcgaaggagattcgatttattttttagaccctgatggccataagttagaagtacactctggaaatatgcatactcgacttaaatcatgcagagataagccttatagcggaatgatatttccttatgtataa

SEQ ID NO: 293063 - DNA, 231 bp, Morganella morganii
atgagtcgtcgcggtaactgccatgataatgcggttgtagaaagctttttccatctactaaaacgcgagcggataaagaaaaagatctacggaacgcgggaagaagcccgcagtgatatttttgattacatcgtaatgttttataacagtaggcgtcggcatggttcgagtgataaaatgccacagactgaatatgaaaatcagtattatcaacgactcggaagtgtctag

SEQ ID NO: 293064 - DNA, 321 bp, Morganella morganii
atgaaattttctttccagaatgattcattctcactgtgtgaatgtacaggtttgctgataaaggaattaagggtttccagagggatgagtggtttggaattaggcgtggcaataagagttagccaacaacaagtatcccgctatgaaaggggggaaacagaaataaccttaaaccaactacaaaatatatcctctgcatttaatattaccttgtgggagtttgttgatatgttgcattttatttatcaatgtaaaaataatgaatgcaattctccggaaaacgttggttatgataaaaacctttggtgggggagtgagtga

SEQ ID NO: 293065 - DNA, 2844 bp, Morganella morganii
atgaaaaaaaatatcatcaccttattaatcacgacagctttcgcctcatcctctttaaccgctcaagcggccagcaccggaaattacgataagtacgagccgagttacaacgtagtcccggaccaccaaggtgccggctctgccgcgagcggtgtatggactattaatggcgacggaagacataacagtggttgggctcttttcaccccaggtggaaaagatgactacggccgtcctcatgctactgacgatatcgcaaaggaagctcgggttcgtacggataaaaactacgaatcaatagtttaccttgacaaaaacaaagtagacaagaaagaaggcaccgagtacattcagaacgaaatcgaaaaggcaaaagaaggtagcttgggtgatatccaaggtgctatcgacaattcaatcaacgtgtccattaacgctggccatcaggtcatcaataacaaatgggaagataaccaaactaacgttaagaatgaaatcaacgctaagtacgaaagtgccaagactgatatcacgaataacgtggtagcccaaattggtgacatcattgttgaaggtaacaatgatgtcactaacgccaaaaacatccagactaatactaacaacattcagaaaaaccagcatcgtaacgacgaagcctggaagctgatgttcggcggtacaccacacatcaataacgaaggtgagttcgacggtttccttcgtgaagaaaccggaaaattggcagtaggacctaacggtgaaatgtacgactatcgtgaaaacgccggcctgtacggaaaataccgtaatcaatttgacgaccacgaaaaacgaatcacacacaatactgcgcgtattgacggcaatgatgaccgtatcgttaatcttcaggaaaccaaagcggataaaaccgagctggctgaactggaaagtaaaggcgttaacgccttcggtgctttaggtgaccgtgtaacgactgttgaaggcgacgtcaccaatatcaacggtaaagttaattatgttgaatccaacaaagacctggcaattgacaacgccaagacttatgttgataacagcattaacacggccatcggtgactacgtgcaatctctgcgtgttactgtaggggatgttgctctcaatatcaaaaatgatatcgtttctggtaataacgaaatcgtgaacaatattaaaggcagcatcactaatgccggtaaagacttccaagaccaaatcgatgctctgggtttagagaccgttcgtctggaagacgtgaaggctgacaaagctgacctggctgacctcgaagcaaagggcaatagcgcggttaacaacatgaacggtaagattatcgccatggacgaccgtgtgaccaccgtagaaggtaacattgcaaacattaatggtaaaatcgactacgttgagaacaacaaagacgttgctatcaatgcgggtaaaacctatgtcgacaatactgttaacactgcaattgacctggcttacgataatgccaaaaccactgtcaacaacaagtgggaagaaaacaaaggcgacgttaacgctgttgttaatggcaaaatcgaaaacatcactaacgacgttaccaacaatgtaacgaacgaagtgatgaaccagattggcgatatcgtgattgatggtagcagcgaaaccgttgtgaacattaaaaatgaaatcaccaatgacgtttccaaccatctgaaactggaagcaaaagacctggctctttctgtgaagaaagaaatcctggaaggtaatagcaataccgtgaacaacgtcactggtaaagttaatgccgaagttgataacgctaaaaccgtactcggtgataaagcaaaagacttccaggaccagattgacgcgaccaattccaaagttaacaccattgctaaagcaggacaggacgccatcgttactactaacgagaacgttaacaaccaggttattcgcggcgaagctgcttacgaagacttactgtcccgtttagataacgcaactacccagcaggatatcgatgatgcgctgaacgagtataagaaaaatgcttacgctcgtattaaagccaccgtcgttaacaatggcccggctgctaaagatgcgttaacacaagcaaaagaagatgccaagaaagacgctaccgattacgttaaagaccaaatcgaccaagctattacagataacacgcaggctggtaaagactacgtcaaagaagaaatcgataacgcgattgccggtttagtaccaactggtgaagacctgactggtcgtattgagaacatcgaaaacaccatcaacaaaggtaaagtcgttgttagcactgcgaagaaccagggtgtgaacgcaggcaaagctatcgttgctaaagcaccggctgttaaagcggtggctaacagcaaagcagcgaaagcaactacctacgttaagaacgttaacgctaaagcagatacagcgctggcgttaggtcacgataacacccaagcaatcaatcaggaacgtgttgaccgcatccagggtcagcgtgatactctgtcggcggcaaacagttataccgactctcgcttcaacagtatgcaacagcaagtcgatgacaaccgtaaacgcgctgcagctggtatttccggcgtagctgcaatgactaatattccccaactgtcaggtaatgctaattattcattcggggttggtatcggcggcttcgatagtgagcagtcaatcgctgccggtatgaccggacgtgtaggtagcaacgtagtaattcgttcaagtgtttccacttccacacagggtgaaatggtttggggggcaggtttagggtatgagtggtaa

SEQ ID NO: 293066 - DNA, 1209 bp, Morganella morganii
atggatgaaaaaaaactaaaagcttttgcggcagaatttgcaaaaggcattaaaactgaagctgacctcaatcagttcactcgaatgttaaccaaattaaccgttgaaacggcattaaacgctgagctgactgagcatttggggcatgaaaaaaatagcgctaaaacaggctctaacacgcgtaacggctattcatctaaaactgtgttaacggacgatggtgagctcgaattgaacacgccacgcgaccgtgaaggcagctttgagcctcagttgattaagaaaaaccaaactcgtatcactcagatggatagccaaattttatccctctacgcgaaagggatgaccacccgtgaaatcgtcgctacattcaaggaaatgtacgacgcggatgtttcaccaaccctaatttcaaaagtcaccgatgcggttaaagaacaagttcaagagtggcaaaatcgaccattagaatctttatatcctattgtttatcttgattgtattgttgtcaaagttcgtcatgatggcagtgttatcaacaagtctgtttttcttgcgctggcaatcaataccgaaggacataaagaacttttgggtatgtggatggctgaaaatgagggcgctaaattttggttatcagtcctcacagagcttaaaaatcggggtgttcaagatattcttattgcctgtgtcgatggtctgaagggcttccctgatgcgattaacagcgtttatcctcaagcacaaatccagttatgcatcatccacatggtacgtaatagcctgaaatacgtctcttggaaagattataaagcggtcacggcgggtttaaaaacggtctatcgtgcagccacagaagcgtccggattgatagccctcgaaaaatttgccctgatatgggatgaaaaatatccccaaatcagcaaaagttggtatacgcattgggaaaacttgaatacgttcttcgcgtatccggatgatatccgtaaagcgatttacacgaccaatgctattgaatcattaaatagcgttattcgtcatgcaattaaaaaacgtaaggtgttcccgactgatgattctgtgcgtaaagtcatttacttggcgattgaatcagcctccaaaaaatggagtatgccaattcaaaactggaaacaagcgatgagtcgctttattattgagttcggtgaccgcctagacggtcacatataa

SEQ ID NO: 293067 - DNA, 354 bp, Morganella morganii
atgaagctaataccgactgcaattttaattcatgttcccgatgtttcctctggtttggtttggtatcaacaagcctttccacaagcagttgccgaatacctccctgaatttgactttactttattacatgttggggatttcaccatcgaaattgtccaagcagatgaaaaggtcaaagaaggtaagcaggggacagtgctttattggcaaactggggctttagatgctgccatgaaacatttaatagctttaggtgcgaaactataccgagggccaatgttaatcgatggtaacaaccaaatgtgtcaacttgaagatccattcggtaatttaattggtttaagaggacagtaa

SEQ ID NO: 293068 - DNA, 597 bp, Morganella morganii
gtgaatacgatctgcgaaattataatttcgttacgttacttttgttttagttatggtgctcatgcaaagtctttgtttatcggagacagcctgacacttagtctggcaaaaggtgcgaaagaacaggacgttctggaatattattacctgggcagatccggactgatgaatgaggcattttatgactggctggcgttcgtacaacggatcccggtcagttatcctgatttaatcattgtatcgctgggtgctaatgatggtatggcggcctctgccgctaccccttacagcccaaaaatcagacagtttatttccgttttaaaaacacattacccgacggccagtattatcagggtcttacctcctgccatgaaaaacacacagacagaaaacgtactggtgaatacccgccggattatttcagaaacatccgcaatggccggttacaccgtatttgatccgcgtccggttaccggcagagcatggacatattcagtcaacggaattgttctgcgtactgctgatggtatccactacacaccggaagccggtaaactgatttcaaaacagatttaccgggctgtccggcaaaactga

SEQ ID NO: 293069 - DNA, 294 bp, Morganella morganii
atgagtacaaagaaagatatgttatctagattggcaaatgtttcaaaaaatgcaccactacaagaaaaaaatctggcaccaccagaagcaaacataccagaaaaattagcaggcacagtgtcgaaaacgaaagtaagccgccgacctaaaaatctacaaattccagaagatttatgggaagcatatgaatatctaaaaagcagtaacattaccagcttgttaatgacgccttatatcctcgaagctttcagagaaaagctggcaaaagatggggcatttgaaagggataaataa

SEQ ID NO: 293070 - DNA, 687 bp, Morganella morganii
atgtctgaaataaacaatttgtatgcagggaagataattactgttgcaattaaaaaaggcggaacaggaaaatcgacaatctgcatgaatatagctcctgagataaagccggatattttttatgatacggatgatacacctgctgtaagtacatttaatcagtttcgggatgaagacaaacgctggaacgtaatcagacttacttcccagtctataggggtagaaaaatttatacatgacctgcttgaagccaaagagtccggaaaatgcgtacttatagattgtggagggtttgattccgctctgacacgaacagctatcgccgccgcagatttaattctgtcgccagtgaatgacgatccttctgatattttaggtttgcaagagtttagccgggtattgaatgatatatccgaggaaatgggttcagataagatcgcgcatgtagtccttaacaaagtgcatccgtcccgcactaattttaaagatattgatacttaccttgatgcgtttcctaatttagtacgattggatactgcaattccactagataaaactgttcccgctaaatttggtgaaggtcttggggttgtagaacaaacggcaacacgtcatggacgagctgggaatgccatgcgatctctgtttctcgatttgagaaccatcattgggcaagtgcataaatag

SEQ ID NO: 293071 - DNA, 243 bp, Morganella morganii
atgataataacagggttatttgtcgggtttattatgattcatattggtgtgtggcgatattatcattgtgaaaaaagagccggaaagataatcggtgccggtatcattataaccggtgttctggttattgccggaatgtttgcaattgatgcaataaactataaaggtaattcttaccgggcgatttcaggtaaatattacagtgaagaaagtaaacctcttgtgttatcggatggtatttaa

SEQ ID NO: 293072 - DNA, 126 bp, Morganella morganii
atgaggggcaagcgttatcccgaagagtttaaaattgaagcagccaaacaggttgttgaggcaacaaccgttaccgttactggtctgtcctactgctctgtgggtgccggatgtgcaccccagtag

SEQ ID NO: 293073 - DNA, 753 bp, Morganella morganii
atggaaaaacatttttatcaattggaatatgtattttggggaagtattagtcaaacaaaaataatatcaccttttgtttttgcttataataatgaatttactagttacccaggttttgattttatttttgtccatgaaggggctactttcactgatattgaaaaaggtctgacttggtttaaagaaaaacacaaagactgtacagtggtttatcctaaaggtaaacttaaaacacaattacaaacactaaaacttagtgaagaagagtctacaacagctatggttttagcgctagatcaagtaaagaatttatccgaatatatagctgaatacgagataaaaatcttagatttggatttatcagattgggcaatccctctttccagcgcatttattggagagggaaatgaagatgattctggcaatactcttgttaaagagtatcaagcctgtcacgaagctgctgttaaaaataaatcaccgctataccattttgttcttaaagtttctggcgttcctgtttgttctttaacattaacaatagacggtaagttatcacgtctcgatgatattggaacaaagattaaatatcaacgtaaaggttatgcaacagttttaatccaatatgctctacagtatgctaaaaaaaatggggttatgtactgttacttggaatcttcaaatatgggattatctatctatcaaaatctcgggtttataaaactatttgaatatgacgtatgtagtacctga

SEQ ID NO: 293074 - DNA, 546 bp, Morganella morganii
atgagaaaaacctgttatctcctgtttttattttttccgttctgtgcacaggcaaacaatgaaatacagtacctacaaatgatcgattactccctcagcaaacgtcctctatgtttgggagaaaaacagtttccggtttcaattaggatcggaaacgaccaatggattcacgccaaaatggaagctcttgttgatgccgggctacttacctcacatgttgagtctagacggaaaatctgggagttgacgccttatgggcagaagtcattcaataaacataatgatttctgctatggaataatgcgcgtcagaaaaataactgattattcgacagataacgcaggtattacgactgtcaattttacgtattttatcccatctctaccgttatggtcaaagaatagctctatacgttttgctaatactgagctcgacaatcttattacgggagtcgattcagaacgttatcaagtatccttctatactgacaagcatggggtattacatatggttaatgaaccagagcaacttgaacttttgtattag

SEQ ID NO: 293075 - DNA, 549 bp, Morganella morganii
ttgaaaaatactattcctttaattattttaatcgttatatttggaatgtcccctttaacgtctgatgctgctactcgcattcgcctgaaaagcggggtgaataacattgatttaaatagtgatggtatacctgatgttgttttctccgctatttatgacaacaatacatctcaccccggagaaacccttagtatatatatcaggcaaaagaacacctggtatattgtaccgctacctgataatgatggttttatctggacggatttaaaactttcagcctctgtcctcaaaatcatagggataggactttatcgttataaaggcaaagtttatctggttcgcgcgttaaaatatactagtcaagcagatcgtggtgaccctacagattcattacctgtaaaattttcacgatttttgctagcgaataacaatgatgaccctggaactgctgttttttactgggaatcagcgggcgtatatgtcacaaaacactctttctatgatgtggatgaggcctttaaatcattggaaatgaataaatttaaatga

SEQ ID NO: 293076 - DNA, 150 bp, Morganella morganii
atggaagccgcgaccctctatgatggcttgtgtaagcacatcagcttcagtgaagctgctcatacggattatatcgtcgggtattacagcgcactcaggccgcacgaatataacggtggattaccaccaagcgaatcggaaaaactctaa

SEQ ID NO: 293077 - DNA, 474 bp, Morganella morganii
atgtataaacttctagagaacgactataattgtttgaatctatattgccatgcactacctttaagtaaaaaattaggttgtattttatttaggttaaaaatgaaaaaattatatgaaatagccaggaatcatgcgaaatcaattaagataagtaaatttattgatattgggcatgttgctgcagtaattgaaacagatgataactgtctgtatattggtattagtatagatacttcctgctcattaggcttttgtgctgaacatgctgcggtagctgaactgttgaaggatggtaaaacaagaattaaccggatgattgcggttgatagtgaaggccgtgttttgccaccttgcggaagatgccgagagttggttagtcagttatcaccattaaataaaaacatgatgatagctatagacaatgaccggacagccttattgtccgagctattgccttacgattggaagctctag

SEQ ID NO: 293078 - DNA, 477 bp, Morganella morganii
atgagtatccgaaccatcacatcatcaaaaaaagatattgccctgctttgggctctatctaaatcattaaataatgaatggtcagaattcccgcagtgggcttgctgtgatatcatccgagaacgattattggagagaataaacagctctaataaggaaagagtatttgtatatctggatgagaatggtcgattcctatctacggcgagtattatttggcgtgaaatagaaactacaaaaataagtcatgctgattggtggataggagaaatccttacagtaaaggccgccagggggcgaggtattggctcgagtataataaagcatatagtagatgtagcaattgaattaaatatttcagcacttaatctttatacacccgataaacaagagttgtattctcgattgggatggaaaaaaatgtataatgatataattaatgatgagagagtaacaataatgcagttggagctttaa

SEQ ID NO: 293079 - DNA, 477 bp, Morganella morganii
atggatgaagaagtttttgctgcatattactcagtggaagaatcccagcaaaattcaaaacagaaaaatgcaatagctatttcaaatttactcatagacgaaataagtaaatctgatttaattgcaattgccgcccccatgtataacttttccattccaagtcaattaaaaaactactttgaccttatcataagggcggggttaacatttcaatatataaataatgaaaaagttggtttgctggataataaaaaagtattaattcttgcaagtcagggagggggagaggcaccagaagaaactgatagcttcattggctatttaaaaaaattacttaacttcataggacttaaagatattactttaattcacattgataaattggctatagagactaattcaatagagaaaaaacatctttctgcggagaaagatattattgaattcacctctaacatttcatcaaaaaatatataa

SEQ ID NO: 293080 - DNA, 612 bp, Morganella morganii
gtggatatcaataaatctctttactataagaaacatataaaaaaaataatgacttttgaaactggcgccccaggcgagaacccctgggtaaacggaaagccaaaacaagaaataattgacgtggtgagctataacgaaagatggcctcttttatttgaaataattagattagatttaaataaatctttaggaaatcttgctttatctatagagcacgttggctctacggctgttcctggattatcagctaaacctgtaatagatatagacttaatcatatcaaaccctgataatgaaattgagtatgtatctttaatcgaggaattaggatttcagctaacagtaagagaaccctcctggtaccagcacaggatgtttcgctgtgaatccccaagagtgaacctgcatgtatttgggcctgagtgcccggaacatcttcgtcatactttgtttagagattggttatgcacccatccagaagacagggatttatacgaaaaagcaaagaccagtgccagcaccagcgcaaccgatgttcaggtttataacaaaaataaagaggcggttgttaaagaaatataccgcaagatattcaattcaattcgcaactaa

SEQ ID NO: 293081 - DNA, 864 bp, Morganella morganii
atgaaatatacagacttgcaaattgattggcttaaatgttttattgccgtagtgaacacggggtctgtatctgctgcggcgctcgaagttcatcgctcacaatcggctgtcagtatgcagttaaaaaaacttgaatcatcgcttggttgtcagctgatattaaggggggcgcgggttcatcaattgacgcatgagggacaaaaattactaggctttgccaggcgactattggatatacatgaggaaaccatatctgcttttcatggtgtggatttagaaggtcgtattaggctgggcgttcctgatgactatgcagaaagatatctaacccctgtgctcaaacgtttcgccgcataccattgtgcggtagagatagaactgaattgtgagcaatccaccactttgattcctaaggtagaaaaaggagagttggatttagcgttagtatctcgggaaaatagtgcacaaggagcgttattatttcatgagcctatggtatgggtcggttcgccacaatttgaaatttggcgccgagacccattgccaatagctgtttatgagcaaactagtttagctaaacgaagcgccataaattcgctatctttgcaagggcgcagatataaagtggtgtataacagctccagtctggctgggcaaattgctgctgttgaaagcggattagctgtcgcggtgcttacccaatgtagcgtaccacaacatttggatgttttaggtactaatcagtctttaggtcctctcgaaccgatggaggtggctgcgtataggagcaatcagtccattggtgatgaagctgtcgatggcttatataacctactggttcaaacgctaagacaagctaaataa

SEQ ID NO: 293082 - DNA, 1161 bp, Morganella morganii
atgaaaccaagaaaacgtatttactatacacctgaacagaaagcgattatttgggatagatataagcaaggtgattctttacatgagatcgccagaatgtttgatagataccattcttctattatgcctactatttatcaaacgggtggcttccgtcctcccgtccgtaaacgccacagattatcgctttcgcttgatgaacgagaagaaatatcgagaggattagcaaaaaagtgcagtatcagggagatagctaaaaagatatcaagagccccttcaactgttagtcgtgagatccgcaggcatggtggattaaccaactaccgtgcagcaaaagcggataaaaaagcatgggataatgccttgagacctaaagcttgtaaattaagtcaaaaccctacattgtgtaaaataatcgcagaaaaaatgcatcaaggctggtcacctgagcaaattgctggctggctaaaacgtaattatccagatgctcaggagatgaatgtgtctcacgaaacgatttataaaacactttttatacaaactcggggagctttaaaaaaagagctacagcaatatcttagaagcagaagaacggtacgaaaatctagaaccacatcacttaaaggaaaaggattaggctcaatccctaatgccgttcctataagcgaaagaccatcgactgttgcggatagagcaattcctggtcattgggaaggggatttaattcaaggctctaaaaattcttatattgtcactttagtagagcgccattcacggtatgttatgctagctaaaatcagtgataataaaacaacaacagtgatagccgctctcattaaacaggctcaacaattaccggcagaactatataaaacattaacttgggacagaggcgttgaaatgaccaatcatgcagtatttactgtagcgactgatattcaagtctacttctgcgatcctcagtctccgtggcaatgtggttcaaacgaaaatacgaacagattgctcagacaatattttccaaaaggtactgatttatccgttcatagccagcaaagattaaatagcatcgctagacaactcaacgaaaggccaagaaaaacgctaggttatgaatcaccagcagaacgatttaaccagtgtgttgcatcaaccgattga

SEQ ID NO: 293083 - DNA, 1773 bp, Morganella morganii
atggctattgtagcgagagggatgttaattacagaggcttatcgtgattataaaaatggtaagtttataataaacagacgataccaacgtaaattagtatggactgttgaagaaaagcaaaatttgatagatagcataatgcgaggctatccaatcccattaatacttttagctcatacaaaagatgataaatatgaagttattgatggaatgcaaaggcttgatgccattttcagttttattgataacaaatactcgctccccgatggttcctattttgatacaaatgaatttccaacatctaaactttataataaagatacaatgcctgaaggtactaaattaataagtcaacaggattgtgcaaacataacagagtatcagttggctgttactgtcttccctatagaagatgaaaactcagtaactgatatttttgggagaattaactcaggagggaggcagctaagtaatcaggaaaaaagacaagccggcgtagataatccactatcaaactttgtaagaaaggtatcctctaaaatgaggatggatattacagacgatataattgaattatcaaacatgccatctataagtattgatggtgttaagaaaagtgataaacaaggatatggtattaatgctgaggataccttttgggtatatcaaggaatattaacatcgaaagatttaagagattctgttgatgagcaaatcatagctgatattacagcttcaatcattgaaaaaactccgtttgcatcaagtaaagaaaagcttgatgaactatatgatgttgaaagtgacttatcaaaatcgattactactgctttatccgcatatcccgaaaacagattagaaaacgagataaacactactatatccactatattagatgttgttaatcaatataacagtggtaaatacgcctttaaaaatctagttataacagatggtaaggcaaactcatcacgcactcctttttatgctgttttcatggctttttatcgacttgttgttactgaaggtaaaaaaccaaatgattatgatgctatttgtaaagcacttctaggggttaatgataggttatctaaagacaaacatcacgtgaccccagaagatcgagatacaaatataaaactaacatatggactcatatctgatttcttcattgctgctgttccgagtttggttgggcatggccaagggttaatgatagaatttgaagcagcaataagccgctcaaaaggagaatctgcccgctatgaaatgaagcaaggtatacttgatatttcagaaaaaggaggtatcaacgaaaacttattgaaaaaaataaatgaaataatctgcagcatggcaaacataggtccttcaagtactggagggaatatattcataggtatagccgacaataaaaaagatgcagatagaattaaaaaaatttataatgaaaaaccttgcgaattttcagataagtatattttcggaattgacagagagtgtgaaaaattaacaatagatttagataaatacctcagaataattgttgataatatccgaaattctgaattatctcccgaagtaaaagctgatgtattaagtaatattgaccatatcaattacaaaggaaaaacagtggtatggattaaagtaccgcctcaaaaagttatggcttggatcggtgagaaaacattccatcgagaagattcaaatacagtcccagcatcaccaaaactttcgaccataattgacaagagatttcaactccaataa

SEQ ID NO: 293084 - DNA, 1203 bp, Morganella morganii
atgagtaatttgagctatttagagaagctattggatggggttgagatttattgggagcctttagataaggtgtttaatatttatgctggaggtgatgtacctacagatgctttatctgacattgaaactgaggaatttaatatccctattctttctaacggaattggtgataaatctctttatggttggacaaaccaagccaaaatcgaaaagccaagtttaactatatcagcaagaggaacaataggatggactagttatagagaccggccattttttcctatagttcgtttattggtgctgacacctaaagttgaattgaacctgaagtatgcttaccactttatgaaaatgattgaaaataattataaagttgctccggcaggtattcctcaacttacaaaaccaatgcttaaaaatgttgttatccccatcccctgcccagataaccccgaaaaatcgctggcaatccaatctgaaatcgtgcgaattttggataaattcactgccctgacagccgagctgacagccgagcttaacatgcggaaaaaacaatacaactactaccgcgaccagttgttaagttttgaagagggggaagttgagtggaagacgttgggtgatacagacttttttgaagttggctcaggtggtactccttcaaagagaaaaactgaatattgggataatggaaacatcccctggatcaaatcagagtcttgtaacaacgagtctgtttattctgctagcaattttataactgaacttggtcttgctaagtcaaatgcgaagcttttaaaggagagaactacattaatagcacttgttggggcaactatttttaagactgcatttttagagtttgaagctacgactaatcagaatattgcgagtatcaaatcaaagaaccctaaggtggtgaatgacaagtttattttttactacatcactaatttatatgatgtgctgaaatcagagatgcgaaactatggaatgttaaacctaacaacattaaggcagtttaatattcccatccctgctattgaggaacaagaacgcatcattactattctcgataaattcgacaccctaacgagttccatcactgaaggtctcccacgcgaaatcgagttacgtcaaaagcaatacgagtattatcgagacctattgttaagctttccgaaatcagatgaggcggcttaa

SEQ ID NO: 293085 - DNA, 426 bp, Morganella morganii
gtgaagccgttctatgtgattaatgacctgcgttggcatgttcgtggttttgaccgtaagaatagtgaattccgtgactttgtactaaccagaattaaagaagcgattgtgcttgaagattccacgctgcttgagacggagctagaaacccaagaccggcaatggagtcgttttgttgagttggagttagtgccacacccacgtattgagcatagcgaagcgattgagcaggattatggcatgaaggatggcgttttaaagattgatattagagcggctaccgctgcctatttgattcgccaatggcatgtggattgtaccaaagcacacagccttgaaggccctgaatatcagctttggttaaaaaacacccctacaccttacggggtcggaaatttgaatttagctccagggtttgacggatga

SEQ ID NO: 293086 - DNA, 873 bp, Morganella morganii
atgtctcaaaactctcaatttaaaaccctcctatcgactctaccagcttcattccagacctcttttttcaaccaaatcaataacttaattaaccactcccccaccattggactgatgggtaaaaccggggcaggaaaatccagtcttatcaatgcgctgttccaatcttcactatcacctgtgagtgatatttcaggctgtacacggcaggctcagcgcttcagtatgacgatgaacaaccatacgctcacctttatagatttacccggcgtaggggaaagcatcgaacgggataaagagtaccacctgctatatcgtaacttactgccggaactggatttaattatctgggtactcaaagccgatgatagagcgtggtcttctgatgaacagtgttatcgctttctcactgagcaatgtggctatcaaccaagtcgctttctatttgtgctgaaccaagccgacaaaatagaaccctgccgccagtggaatgaactgagccaccagccatccccagagcaagcggctaacttagaattgaagcaacaagcagcgataacggcatttaaacctcatcatcctgtgatgaccgtttctgcggtagaaggctttcaactcactgaattagcagagcaattaatacaggcgctaccggtgcaagccagtagcggggtagctaggcaactgaacaacacttaccggacgcaatccgtagaaacttcggcacgtaacgattttgggcaatgtgtcagtgatatcgtcgatactataatcgatatcattccattacccccattgataaaacatacgatcagcactgtcaaaaacagcatcgtttccgtcgctaaatccctgtggagcctattcttttaa

SEQ ID NO: 293087 - DNA, 669 bp, Morganella morganii
atgaaaagtatcgatttcgcgcgtaatgacaaagatctctaccccatattacatcaagccactcttaatgaaaaagctttcctagcggaaattatttccagtaaacactcttccagcatagatagaaacgaacgtgatactctgaaactggcaatcgagctacaaagcatggggggggatagtttgatgaacttatttcgtaggcgtggggtcgattaccgacaaattgtcgtcgatgttgccagtaaggtgggggtaaaaattaactcacaaggcgatataatgaagatggaagaattaatcgctgaaaaagtgattgaggattataaagaaaaactatcggaaaaagaacgagatgaattcgaagccatacttcgtgaaagcttagaagaccaaaagctggctatggatgctaaaaatgccgccgctcgtagtttgatggcgatgacaccagccctgttagctattggtggttttatattacgtcgtggagctgttgcagcgatccccgtagctggtcaattcctcggagtgctcacaggagttgctagcgtagttttagcattcacagggacggcttacagcgttactattccctccgtgttaattatcggtagcattcgttctcgtttggtagccgaaaagtttgcagcacaggtgaaactatga

SEQ ID NO: 293088 - DNA, 957 bp, Morganella morganii
atgaatatttcaatacttcttgaacgagcattgccactttccaagaatattcttgagcgtatagagtctggtgaattaactgtcttcggcggtacaattcgtgaccatgcaggcagaattgtcaaacatttagttttccctccagatgggcaacgtaatcaaaaaactaatctggacgaattatccgagcaaatcaatgcaacactaaatcagaaacatacagaaataatggggcagttatccaatcagacagccattctggcagctgtgaacattgtgagtgcacataatacaaatgaaaaaattggaaaaaagcttgaagagataagtgataaaattgatagactggataagaaaacagccgaaatacgagatgatattattcttaacaaaataattaaattcagtgagattaaaagttcatcgttagcctccattgaagaagcattatatgccaacaaggtccagacagaccctcaatttatccgattacatataattccccttagaaaaacttttaactctctccatgcaatgttgatggatatattgagtgagtttagtaataaaaaaattattgattgcattgaatttctaatgttgattgcagatcttaaaaataaatcgtcatttgtactagggcagacacacattcgcctcggtgaggatgatatagctcaagagtattttgacagaaatatagattcaaatattattttacgttctcgattggggttattaaagaaaactggtgcattcagccctcatgtaataaatgaagagaaattattaatcttaaaaaatgatgttgaaaaatttaaagagctagaaatacagtctcagctgctatcagttcaaaataaattatctcttgaactaaaattaccacattatcagctattgaataattcattcaacacaattcacatgcttgatcccgctcccttggagctctaa

SEQ ID NO: 293089 - DNA, 477 bp, Morganella morganii
  misc_feature (451)..(460): n is a, c, g, or t
atgaagcggaacacggcattatcacattatgaagattttattgcacgctatatggagcatgcgtcgagaattgcggcagtgatgcaggtttttatggcaccgaattcaacgctgatcacagaagaaaccttgaatgcggcattttatattacacagtggtatctcaatcactttattgctaaaactgatgaaacgagggagtcaagtgatgctgaaaaattaatcgattggcttgagagtcatttagtgagtaatgggtcttataattttagaacgaattatattattaaatatggaccaagagctgttagacatagtgagcgtttagagcctgctattaaccaattggaaagagaggggaaactgaaaaggtttattcaagatggtattggttatgtgggatttattggtgcaaaaatgacacctgaagagctagccgaacgattgaatnnnnnnnnnngtattcatactcaataa

SEQ ID NO: 293090 - DNA, 672 bp, Morganella morganii
atgtcatcttatgcattaagtgaaccagaatttaatcgcctgataactctcgcgagtgatcgttatggttcctccatatcgtattatattcttcgtcgattactggcagtagttgataatacactagaacactataaccgagtatttgcaatccgagtcgatttacgattcgctcaggatcatattcctgatgccccagatatgcccgtatgttttcaacgcacagatgagcgagctattacccgttttatcgagtcactgaaaagtcaactgaaagcagcacatcacagttctggacgttctggtacaccgacactcccttattatgtttgggtaagagaacgtaacgaaagtgaatacgcacactatcatctagttttgttattcaatgctgacgtttataattatcttggtaactatttacaagatgacgccaataatatggcgactagaatacaacgggcatggtgtagcgctattggcttggtttacccggactacgcgccattagttaactttccagagaatcccgtatttcgatttgatagactagatgccctgattcgtaattccaattattttgatttcctattacgaataacgtatctggctaaaatgaataccaaggagctcattactgactttagaaacttgggaacaagtcagatttaa

SEQ ID NO: 293091 - DNA, 462 bp, Morganella morganii
atgaatcttattcttcacaatatgaagattgattatgttttacatgccgttaatatgttcgactgcattttcaaagatactaaaaatagtcattctatcgatggactgcaagaggtattgcaagctgaaaaaataggagacatatctgccttagtgagtgtgcaacaagattctagtttgttagccacatacaaaaaactgcgaaaggttagaaataaattggctgggcatatggataataaacacaacctagaagatcttttaactttacttgatgaacttgactttgaagatgttttttgttttgttaatcgtcttgatagagctgtacatgatacagcacaaacacatatcgccattaaagtgcattacatgcataatcaaccaagagcatcaaatatcgatgatttaaatattattgaagttaatggtcttgaaaatgaaccatatttcaactcatga

SEQ ID NO: 293092 - DNA, 519 bp, Morganella morganii
gtgtatgtcgattttgcaccgagttcagcatcatcactaaataatcccatcatcacggacccgaataatttaacaatccttcgagcaattaaaatctacaacacactcattaccacaattacccacaatgaagatgacgaaaaagttgaatattattctcaaacgatctcaggcttattaagtgaggttaataccgctcttgaaaaacttgatgaccagctccattatattgatgatatttctagcgaacattttgccgatttaataattgaacaaaaggtactgacccgtcgagagctcactcaaaacctaattggcatcttaaatcattgtaccctaactaattgcattggctgcttacccgtgttaatgaaatatctgaaggcaccagatgaaaaacaagaagctatcgcttcttttatgggaatatctgaagacagtgaactcgaaagagacgtattaatagaaacgttacacatcgtacatgaaaagttagatcagaaagcctacaaacaataa

SEQ ID NO: 293093 - DNA, 357 bp, Morganella morganii
gtgcatgtcacccgttatgaagaggcacaaatcgggttagccggtaaaatgccggctatcaagctgtatgggattgatgaaaaatccggtgaactgaaaacgattatattccggccgaatgtttcccactattctgcgtttctgaccagtactgacagcgaaaatcaccgctttattacgttcctgaatgcctatatgcaacaaggccgggatgcggtctcccccgtggattatcaggcacgaaaacctttcctgtcgtttggtaaaaacccgctccccgaagactttgaacagcaggttgcacagattctggcagaatttgataaaaggaagcagcgtgatgcgcagtcagattaa

SEQ ID NO: 293094 - DNA, 513 bp, Morganella morganii; identical to SEQ ID NO: 286884

SEQ ID NO: 293095 - DNA, 738 bp, Morganella morganii
atggcaaagcaaaagtttaaaatcaccaactggtcagcttacaacaaggcactcagacagcgtggttcgctgacgatctggcttgatgaatctgctattgctgcatggactgactgcgcaaagcctgaaggtcgtggtcggactctccactacacctatatggcgatcaccacggttctgatgatgaagcgcgtgtttaatctgccactccgggcattacagggcttcgttgactcgatttttacgctgatggctctgccgctgcgttgcccggactactctctggtcagcaaacatgcaaagagcgttaacatcagcataaaaacgccaacccggggtgaaatctcgcatctggttatcgatgctactggcctgaaggtcttcggggaaggcgaatggaaagtcaggcaacatggggctgacaggcgcagagtatggcgcaaacttcatctggctgcagacggtgtgacgcatgagataatctgtgccgatttatcgctcagcggtacgacagatgcgcaggcactgccggggctgattaaccagacccaccgaaaaataagagaagcttcagcagacggcgcttatgacacgcgcaactgtcatgatgcgttgctgaggaaaaaaatcaggccacttatccctccacgaaacggggcgcaatactggccgggcagataccatgaacgtaaccatgcggtggctaatcagcatctgagcggtggcaatgatgtatga

SEQ ID NO: 293096 - DNA, 267 bp, Morganella morganii; identical to SEQ ID NO: 27347

SEQ ID NO: 293097 - DNA, 1035 bp, Morganella morganii
atggcaacgacccttaaccccgatcatccgttagtttctatttccttcaccgctgatactgattttactgtcctggctgaccattgcgccctgtttgctgaggttttgattgagtctgccgacccggtgcaaaaactggcattgtgcggcaggataagcaccggtctctctctgctgaaatccaggctcgctgatcccatcgctccccatcttgttgaatgtctgaccaccgatatcccccctgtcacttctcctccccgctttaatcccgacagcactgaactctgcaactattgtctggcgctgacgcaggttctggcagggcagggatttttgcctcatgagcaaaatccgtttcattacgcggtggtcagagcaggtaaaaagcggaaaaaaatcctgacgaaaagccagatggatgcgctgtaccggcgggttgatttttatctgaatatcgaaaaagctcacggttgctgtgtgctgtacaacggacgcgtcaatgccatgcatccggcgtggttctggggcacggccattaatgtgctgcgctatactgctatccggatgagtcaactgcttcatattcgtttgtgtgatgtcagcctggaagaccgctggatcgatctgagttcgggcgggtctaaaaaccacgatgaacaccgggttcctgttgtcacggcgctgtatccgtcgctggcctatttactggagcgggctgaagaagcagggatggagccggagcatcagctgtttaatgtgggctggtttgatctgcgccggaaatacaaatatccggaactgatggatgaacggccgttacgggcatttttccggcgcttatccagggaatgcaattttactatctctccgcaccggttcagacacactgtcgccactcacatgatgaaatcaccggagcgcaatctgtacgtggtaaagcgcctgctgggtcatgtcagtctggtatcaacactggaatacattgatgaaagtgttgacggattacgtaacatactggaaaccgagctgatgtag

SEQ ID NO: 293098 - DNA, 504 bp, Morganella morganii
atgtcactcatccgacgatcctttaaacggctgcactatccggtcgatatcatcgcgcaatatgtgcgttggtatttggcctatttcctgagcttgcgttatctggaagagatgatggcagagcgtggtatttatgttgaccattccactttacaccgctggattttacgtttagtgccagtaataacccaagtcgcaaagcgatataagcgtcctgtcagtcagaaatggcatatcgataagacatacatcaaaatcaaagggcaatggcattatctatatcgcgctattgattcacaaggcaacactgtcgattttatgctgactaagttccatgatatcaccgtcaccgtcgcaaaacgtttttttaaacaggccatccgtcatcatccgtgccctttgatagtcactatcgataaaagtggcgctaaccatgctgcgatagacagttttaatgccggctttacgcgctataagccggtgacgatacgtcaaaataagtag

SEQ ID NO: 293099 - DNA, 714 bp, Morganella morganii
  misc_feature (659)..(668): n is a, c, g, or t
ttggaaaaaataactagagttgagattgatggtttatttgaaagatttaattacacattagatttttctaattttgataaccctggcttatcaataataactgctcctaatgggtatggtaagacaacgatattaaagatgatagaaaattttgctcaaggagacttcttaatattttttaaagaaagatataaagaagtaaggtttttcatttcaaataatgttgaagttaaaattactaaaagtaaaaatgatgatgatgatgcggttgttactatatctgatggacaaaacgagtcagagttaacagacccattgggtgataatggatttatgcatgttgttaacatttttgaaaaatacttaccatatctacatagagttggtccgaagagatggagggatggtaaggttggagatattataaatttacaacaagttttaactaggtaccagaatcatcccgcattaaaaaaacggtggcggaggcgagaagaatgggttcagaaaataatatcatctctcaatgttttttctatcactacaaatagattaaggaataatattgaaagtatttctgatgatgaaaatgatggcctaatggtaaaaaaaatagctgaaaatataaaaaataaaatgagagaagctattcgagatcnnnnnnnnnntctgttttatcaagctctgattatccaaataaagaggatgttttaa

SEQ ID NO: 293100 - DNA, 522 bp, Morganella morganii
atgcatattcagtcatcatctaaaaatggtgctgggttattagtgttaaaaacatatcttgatgatgttatcgaaaaattcactcttctggaggggttggctaaaaaaatcgatatattcagttcatctttaaatagtttattagcatttaaagaaataacaacaacggttgatgagggtattgttgtttctattttagatggtgataaagatgatgtggaattagagtctctatcctcaggtgaacagcaccttcttgttcttataggtagacttatttttgaaacaacagaggaatctatggttttaattgatgagcctgaaatatcatttcatcctgagtggcaagaatcatttataggaattttgagtgaaataaaaaaacttaatggttttgatgttattttagcgactcactctcctatacttataggtaatgaatattgggataatgttatcgaactaggggtgcaatatattccaaatgaaaatataaacttatctggtcatatctatctttag

SEQ ID NO: 293101 - DNA, 879 bp, Morganella morganii
atggctagtagcctaagaaaatattttgacaaaaatatagtttcaacagctagaactatgtttacaggtgcaggaaagaaaaaaacaataattgttgaaggggttaatgattgccgattttttaatcaatggtttggtgataataataacattcgatttgttgcagttaatggaaaagataatgttattcatacatacaatgattttttaaataaccagatgatggttgaaaaaaaagcaatgttcttttgtgttgatgttgactgggattttattcatgggaaaataggatacagtaaagattttttcattctaaattcagcttgcctttttaaacaaaagcatttgtataatgatttggaaatatttctcattaatactgtagcattgaaaaaagtattgtcatcgtatgatattaatattgaaagtgataatttattaaaacttaaaagaaaattagaattggcatcgagaattataggtaaatatagagcagctgatgatgttacaaaaaaaaggctatttttatccaaaagcattttgaatggtttggatgcaatgtcattttttgatcctgaaaacatggaggtggatgaagataatttaatcaaatcaatgagtggatggtctaattatccgatacatatagatgacctgattgaagatgctgaagtattaaattctaaatatactttgccatggtcattatctaatggtcatgatgttacggaaatgcttgctaaacatatctgtagtataaaaggatgggcggaattgaaaaaagagaaaatagaagctgaattacgtataagttgtgaattagctgatttttcgactactcctatgtatgaaaaatttctagtggaagggttaatttaa

SEQ ID NO: 293102 - DNA, 1818 bp, Morganella morganii
atgccgtcgcgtagtgtcagtgcagcctatttggctcaggctgccgagctggccgagaatccgggccagttagccgcgtatcactcccgtgggcactgcgtggtactcgccgggccaggtagtggtaagaccaagacgctcgtgctgaagctggcccgaatcctggccgaggatgtccaggctccacgtggtgcggcatgtatcacatatagccaagaatgcgcacgcgagctaacccgtcgtctcgaagctctagggctaagagaggcaccgaatctctttattggaaccgttcatgggttctgcttgcgccatctgttgatgccctatggacgactggccgatctgccaatcccatttccgctgtcagttgcgtctcagcgcgcgagcgaacggttacttcgacaatccggtgaccgtctctttggcccaaaccatccctataaggctatggatctcggacggcatcgccgttcggtgttgaatcgcaacagcgttgcctggcgtgcaaagaaggaactcgctgcatgggccgaggcctacgaagctacattacggcaggaagggctaatagactacgacgatatggtgatattcggccagcgtctgatcatcgagcatgattgggttctgcccctggtacaggcgaaatttccgatccttgcggtggatgaatatcaggatttgggcgtggcgctccaccgtatggttaaacgcctagctttcgagggaggcgtacgcttatttgctgtgggtgatgcagaccaatcgatttacggtttcactggtgccgatggtgcgttactcctagaactggcagacaggagagacgttgaaacagtccggctccagttgaactatagatcaggagcgggcatcgtcaatgcgtcggagatggtgttgggtgaggctcgaggttatcgcgcaaacgacccgaaccgccagacaaccattgcgttccagctgtgtccgaatggcttgggggatcaggctgtccatgctgtcgcgcagattattcctgctgcgttggctgctaagcagggtcgaacgctgggtgacatcgctattttgtacaaagactaccgtgccggcgatgtggtggccgatgcggtgacagctggcggttttgattacattcgtgtggataccgcagcaccttatcgcaaggttgccttgacgagctgggtggaggattgcgcggcatggtgtgctggcggttggcgtatcgggcgccctcaactgcgaggactgatagaccgttatctggcatttcatcgggcaaggctgcatgatgcatgcgctcggcgtaaggggcaggagttaaccagactgctttgggcacttcgtgcagaccaacatcctgcgtgcgattttgtcgcgtctttgcgcaacggtctcgttgattccctgctggcaactgaaccgacgctttctgatcaagcggagcaactagaccgcatgactgctgcacttgccgaaggcggtgcgttagcgatgttggatatcacgagcctaggtggtcgtgacggttcccctgagcacctcaacttgctgacacttcactcagccaaaggttgcgaatatgacgtggtcatcatggtcggcttagatctggggaatttgccgtggcgtgatgagacgctagagaagctgcgtgaaagccgtcgtcttttctatgtagggctgacccgcgcacgggacgaggtgcatatgctgtattccggttttgttgatggtcgctacggccctatgcgtctagggcgttccccatttctggatgaactggaggagcgaatgagaggggcaggtttaaggtag

SEQ ID NO: 293103 - DNA, 1785 bp, Morganella morganii
atgcggatttctcgaatccggttaattaatttcgccaacttctccgacgttgatgttgaaacgggtgagagtattgttattgttggtgaaaacaaggttggcaagagcaattttattcgcggtctgcagctgattcttgaccccgggttgtctgagcgtgaccgtcaactgggttttgaacatttttgggatggattgggcgaagacaaattgggggagaccatcgaaatttcagtggatcttactgatttcaccgacgatccccgattgatggctcatctgaatgactgtgtcctaaatccggggcctccgatggtggcccgtcttacctaccgctttcagcccaaaaccgagttaaatcgagctcctgaatcgttaaaagattatgagtatgtgatctttggtggcgctgatcctgaaatgcatattggtggtgcgtttcgccgtatgttgcctatcgatgttcaaggcgcgttgcgtgatgccgagaaggatctttcaagctggcgtaattcacccttaagaccgcttattgaagaactatctgcatctctcgacgacgagactcgtgaggagattcaaactcaggttgatgaggctcagcgggaactggctgatcatgatgaggtggcagcgacagccgaacgaattagcgaacggttgattgctatagcaggtgagcaacatgccgttccggtatcgctcggacttgcaccgactcgcgttgatgcgttgctacgtagcctgcgcttgctgctcgacagtggcattcgtggcattggcgatgccagtctggggacggctaatctaatttttctggccctgaaaagcctcgaacttgatcgtcttgttgatgacggagaacgagaccatacttttttcgtcgtcgaggagccggaagcgcacctgcatccgcacgtacagcgcctagtctatcgttacttcctaggtactgacggggagaatagtgatgaagggacgccgctgacaacgatcctgaccacccattccccacatattgccagcgtcacgcctgtcagatctatcgttcttctgcgttatgacgcagaggacgagaagacgattgctgtttcaacggcgaacgcaccgtttacgcggcgggacgaagatgatttgcaacgctatatcgacgtcacccgcggcgaaatatttttttcacgtggggtgatcttggtggaaggtgatgccgaacgctttcttgtcccagcattcgctgatgctcttaatattcccctcgatatgcttgggatcacagtgtgctcgatcggtggaacaaatttcactccgtatgtgaagctcctggggccacggggacttaatattccgcatgtgattttgacagatcgcgatcctatggcggttggagagccgctggttcgtaggagacttatcaatatgttaggcgtgcttgagggagatgttgaccatgatgatatggataccgatgaagtgattgctcgtgcaggggagtatggatgctttgtcaatgagatcaccctggagcctgagctgtttaccggtggactggccgaagccatgcagtcggtcattgagcgggaactatctctggcgcaagtcaccttggatcggatacaggcatgggtggatgacacggaccagcttgatatagcccggttgttgaaactaattgagcgaattggaaaagggcggttcgcccaggcgctggcaccttctgtgtcggaggatgtttgtccggattacattcgcgaagcactggagcatatccgcgatgccgtcgcgtag

SEQ ID NO: 293104 - DNA, 1377 bp, Morganella morganii
atgaactgccttattaagcacagccagagctttgttattgaaagtatagtcaagcgactaatcgaagatgtcaatgagtactcttatttactgacaacggaagattggcggttactgatgagtttggataagtctgttagtgaacggaagatttgtcagaagcagtgtctgggctgcttggaattcgctaggacgatggctatgctatccaatttcattaatgggatctggagcgcaaacaaggaaagtgaagcgctcgtaactgagttatgccgtatctttgacattcaggatgattccgatcataccgtccttgcgctggacttagttgtttctcctgactatgtgaaatcaaaaattcctgaaaagtccttgccagactatgaaatatacgtaagaaaggtcaaaggggaggttattcgcttggcgttagatcattttcaacatgaacaggcgaagtgtaatgatacaattcttgcttatacgaatcttgagctagagcaaatcatcgcttatgagccaatagaaatgcctgtcggaaaggaattgttttacgttgatcaaaatgttgtcagcaaatatgggcgtgatgaaaattttagtcggcaggttgataattttaaaagcaaggtggattgcaagttcgtctatagcccctatgtgattgaagacggtattaaaatgagtcgtgttcggcttgccgagtacttagaggcgatcgaagcacttacagataacactatgctgatacccactgagagcggtgtgatgcttgcgagggaggatattaaggttacgttcgatcgtgttttgctctggagaaatgcaacgagagcggctgaggatttaaaagtgaaacggatgcactttaatcattgggggtatcctcattattcaagaaaatcaaggctgtcggatcgagccaataagaatattgatgagtttttggagtcgcttcgtccctatttagatgatagctgctgtgactttgatttcaatgactatgaaagtgatcaagcgttgtgccaaaggctgagtgcggcaactatagagaagtcattttccttggaggaacttattgataagtcgatcaagtatgagagtgacgctgaatgcatgacgcacattgagcatctttgcgacttctttgacttgataaattataagacggagtctctttctgaactgagcaaaattcgtagcagcctgcaggataccgagcacttgaaacatgcatggaaagccgattattttgtgactgatgacaatagactacgtacacgtggtgctttcatttattctgttcttgggttagatacaaaattcataagcatcaaagagcttaaagaaagggtcgttagtgaattcaataaatga

SEQ ID NO: 293105 - DNA, 123 bp, Morganella morganii
atgacctatgaagaattccttattaaggtggttaattatgataggtctaagctaccatacgaaattatttatggaaaattcaaaatggatctattagggttcatggaagaggtgaatcgctaa

SEQ ID NO: 293106 - DNA, 138 bp, Morganella morganii
atgaagcagattaaagagcttcagcggcctctgggtaagaaaaccattgaggctgaacttcttaaagaagccgtggagttcggtcgcgcaaaaaaatggatagcgtatgtgcccttgttgccaggggttactgactga

SEQ ID NO: 293107 - DNA, 135 bp, Morganella morganii
atgaccgtttcccacgttccccatctcaatggcgtcaacaccaatcaggtgtttgacagtaccagaacggtagtcttgccgctgtcagtgctggtgaggtggttgttcccgcctctgaactcactgcagccatga

SEQ ID NO: 293108 - DNA, 222 bp, Morganella morganii
atgacaaatcagactatccccgcaaccagcctgctgaatgaccaatttgttgatatgaaatttattacacggtttaccggcttaacagataagtggttctacaaacagatacagataaggaaatttccaaagccgattaaattgggctgttgctcccgctggttaaaaagtgaagtggaagcttggttgctggctcgtattactgaatcacggggagaatga

SEQ ID NO: 293109 - DNA, 348 bp, Morganella morganii
gtgttttacaacgacaaacacggtatattccgggtcaatcatcctaacggtgcactgacgggcacaacgcagttcggacaggtgcttcatgatatcggtgtcgatcttatctgcgccaacagcccgcaggcaaaaggctgggtcgaaccggctaatcagacgcctcaggataggcttatcaaagaaatgcgtctggaagatatcagcagcattgaggaagccaatgcctgggtggacatctttatccgtgattttaaccgccgctttgtccggatgccccgtaaccctaaaaatctgcacaggcccgtgactgaaggtgctgaggagcttgatgatatgttcgtctag

SEQ ID NO: 293110 - DNA, 537 bp, Morganella morganii
atgtcaattgatttcattactttagccgtagcaattattgccggagcaatatctattgttggcctagttattactaaagaaaataaaatatcagagttcagacaaaagtggatagatgatttaagagcgactttgataaaattaaataatgatttatttatcttacaacaaatgcacgtcgatgatgaatcaaaagataacatagcatcacaaaaagcagtggtaaacaaatcaataacagaagtttatttaagggtaaacaaattaagcccaaacgaacacgaaataaaacttatagaaactattgaaaatatcaaatcaatatttaatgacgccccaaaagccgatgtctatttcgcatttgaagcattattaatcgaatcatcctcatctgttttgaagcacgaatggataagagtaaaaaagggagagctaacctatcaattctggaaaacaatatttacactattattactaattacgatatcatcggtagtaataaagacgttttatgatttcattagcaataatatctaa

SEQ ID NO: 293111 - DNA, 384 bp, Morganella morganii
atgaacaaatatcgtgacaaatcagactttgagattaataaggctgtggctgagtattatttaacacgcgagtatagatttaacagtgctgatgaaatcgttgaattgatagatatagatttatcttgtgaatttggcggtaaaataaatctggtagatactcaggttgtcggcacattcgacccatgcaacaacgcagctgacgcaatgccgattgttattgagaatggaatatgcatgaattatatcgataaggatattggatggggagcgcgtcattttgatgaagaaaaaggcgagctggaaatttacgataaaaactattatcgcgcagctatgatttgtttcctgatgatgaaagaggcggagagtgaaaaagtatga

SEQ ID NO: 293112 - DNA, 846 bp, Morganella morganii
atgtctgcaatcacagtctcccgtccggaagtggtcaacgggcatacggacgttatctgctccacctcagtcagccacattctggctgtgcgaaagactacactgctgcaaatcgacacacttatccggcaactggctgaaatctcatcaatgacagaaagtattggaggtaaaacttctctggactgggccatgaaacaggattttcgctgtggctgctggctcatggagaaaccggaaaccgcaatgaaagccatcacccgcaatcttgaccgcgaaatctggcgtgacctgatgcaacgttccgggatgctgtcattaatggatgcgcaggcccgtgatacatggtaccgctcactggagtacgataactttccggaaatcagtgaagcgaacatttggagcacatttgagcaactgcaccagaataaggatgaagtgtttgagcgaggagtgatcaacgtcttcagagggctgagctggaattacaaaaccaactccccctgtaaatttggcagtaaaattatcgtcaacaatctggtgaggggggaccggtggggattgcatcttatcaccgggcaacaggcagatcgactcgccgacctggaaagaatgctgtatctgttcagtggcaaaccaatccctgacaaccgggaaaatatcatcattcggctggatgatcacatccgctccgttcagggcaaagcgtgctatgaagatgagatgttcaacatcagatactttaagaagggctccgcacacatcacgttcaggaaaccagaactggttgatcggctaaatgatattattgccaggcactattcggaaatgttaccttcattataa

SEQ ID NO: 293113 - DNA, 198 bp, Morganella morganii
atgaaattattaaccacagaaacggcgctggatattctgattgcgtggctgcaggacaatattgactgcgaatcagggattatcttcgacaacgatgaggataaaacggattcggcagcactgctgccctgtattgaacaggcctgggaagatatccgtaccctgcgccagttgcagcttccagaccagaaccggtga

SEQ ID NO: 293114 - DNA, 489 bp, Morganella morganii; identical to SEQ ID NO: 272906

SEQ ID NO: 293115 - DNA, 378 bp, Morganella morganii
atgaatacattacccgacactcacgtacgggaggcatcgggctgcccgtctcccgtcaccatctggcagacactgctcacccgactgctggaccagcactatggcctcacgctgaatgacacaccgttcgctgatgaacgtgtgattgagcagcatattgaggcagggatttcactgtgtgacgcggtgaactttctcgttgaaaaatacgcgctggtacgtaccgaccagccgggattcagcgcaggagccccatcgcagttaatcaacagcattgatattctccgggctcgcagggcgaccggcctgatgacccggaacaattacagaatggtaaataacattacccagggcaagcatccggaggcaaaacgatga

SEQ ID NO: 293116 - DNA, 378 bp, Morganella morganii
gtgtcagacacactttccgggacaacgcatcccgatgacaatgacgaccatccctggtggggactaccctgcacagtgacgccctgtttcggcgcccgtctggtgcaggagggtaaccggttgcattaccttgccgaccgtgccggtatcagaggccggttcagcgacgcggatgcataccacctggaccaggcctttccgctgctgatgaaacaactggaactcatgctcaccagcggtgaactgaatccccgccatcagcataccatcacactgtatgcgaaggggctgacctgcgaagccgatacccttggcagttgtggttacgcttatctggctgtttatccgacaccggcagagcccgcaatcaccgtataa

SEQ ID NO: 293117 - DNA, 222 bp, Morganella morganii; identical to SEQ ID NO: 12986

SEQ ID NO: 293118 - DNA, 477 bp, Morganella morganii
atgcaacagctttcctttctgcccggagagatgacgcccggcgagcgcagcctcattcaacgggccctgaaaaccctggaccgccatcttcatgaacccggcgtggccttcacctccacgcatgcggcacgggaatggctgattctgaacatggcgggactggagcgtgaagaattccgggtgctgtatctgaataaccagaatcagctgattgccggtgaaaccctcttcaccggcaccatcaaccgcacggaagtccatccccgtgaagtgattaaacgcgccctgtatcacaatgccgctgctgtggtgctggcacacaatcacccgtccggtgaagtcacacccagcaaggcagaccgccttatcacggaacgtctggcacaggcactgggcctggtggatatccgggtgccggaccatctgatagtcggtggcagccaggttttctcctttgccgaatatggtctgctttaa

SEQ ID NO: 293119 - DNA, 474 bp, Morganella morganii
atgaaaacattgtctcagaacaccacctcttcggcctgtgcaccggagactgacctgcaacaactggtagccactcccgtccctgatgaacggcgcatcagcttctggccgcagcactttggcctcattccacagtgggtgaccctggagccccgtatcttcggctggatggaccgtctgtgtgaagactactgcggtggtatctggaatctgtacaccctgaacaacggcggggcatttatggcacccgaaccggatgacgatgatgacgaaacatgggtactgttcaatgccatgaacggtaaccgcgctgaaatgagcccggaagccgccggcattgctgcctgtctgatgacgtacagtcatcatgcctgtcgtacggagtgttatgccatgacggtccattattaccggctgcgggattacgccctgcagcatccggaatgcagcgccattatgcgcatcatcgactga

SEQ ID NO: 293120 - DNA, 819 bp, Morganella morganii
atgcgactagccagtcgttttggttatgcgaaccagatacgccgtgaccgtccgctgacacacgaagaactgatgcactatgttcccagtattttcggtgaagaccggcatacttcccgcagtaaacgatatgcgtacattcccaccatcaccgtactggaaagcctgcagcgggaaggctttcagccattcttcgcctgccagacccgtgtgcgcgacccgggccgccggggatacacaaaacacatgctgcgtctgcggcgggccggagagataaacggagaacatgtccctgaaatcattctgctcaactcccatgacggtacctccagctaccagatgctgccgggttacttcaggttcgtctgtcagaacggatgcgtctgtggtcagtctctgggggaagtgcatgttccgcaccggggaaatgtggtggacagagtcattgaaggggcttacgaggtggtgggcgtgtttgaccggatagaggagaagcatgatgccatgcagtcgctggtcctgtcgccaccggcacgccaggcgctggcacaggcggcactgacttaccgttatggtgacgaacatcagccagtcaccaccgctgacattctgacaccacgacgcagggaggattacggtcaggacctgtggagcgcatatcagaccatccaggagaatatgctgaaaggcggaatttccggccgcagtgcaaaaggaaaacgtatccacacccgtgccattcacaacatcgacaccgatattaagctcaaccgcgcattgtgggtaatggcagaaacgctgctggagagcctgcgctga

SEQ ID NO: 293121 - DNA, 159 bp, Morganella morganii; identical to SEQ ID NO: 6188

SEQ ID NO: 293122 - DNA, 2847 bp, Morganella morganii
atgaaacgacatctgaacaccagctacaggctggtatggaatcacattacgggcaccctggtggtggcttccgaactggcgcgctcacggggaaaacgcaccggtgtggcgattgcgctgtctcttgctgctgtcacatcagttccggcactggctgctgacacggttgtacaggcgggagaaaccgtgagcggcggaacactgacaaatcatgacaaccagattgttctcggtacggccaacggaatgaccatcagtaccggtctggagtatgggccggataacgaggccaataccggcgggcaatggatacaaaatggcggtatcgccaacaacactactgtcaccggtggtggtcttcagagagtgaatgccggaggaagcgtttcagacacggttatcagtgccggaggcggacagagccttcaggggcaggcagtgaataccactctgaacggcggtgagcagtgggtacatgaaggcgggattgcaacgggtaccgtcattaatgagaagggctggcaggccgtcaaatccggcgcaatggcaaccgacacggttgtgaataccggcgcggaagggggaccagatgcagaaaatggtgataccgggcagtttgttcgcggaaatgccgtacgtaccaccatcaataaaaatggtcgtcagattgtggctgttgaaggaacagcaaataccactgtggtttatgccggcggcgaccagacggtacacgggcatgcgctggataccacactgaatggcggttaccagtatgtgcacaacggaggcacagcctctgacacggttgtaaacagtgacggctggcagattgtcaaggaaggtggtctggcggatttcaccaccgttaaccagaaaggcaaactgcaggtgaacgccggtggtacagccacgaatgtcaccctgaaacagggtggagcactggtcaccagtactgcggcaacggttcttggcagcaaccgtctgggcaatttcacggtggaaaacggtaaggctgacggcgttgttctggagtccggcggtcgcctggatgtactggaaggccattcagcgcagaaaacacgggtggatgacggcggaaccctggcagtgtctgccggtggtaaggcaacagatgtcaccatgacatccggtagtgccctgattgcagacagtggtgccactgttgaggggaccaatgccagcggtaagttcagtattgatggcacatccggtcaggccagcggactgctgctggaaaatggcggcagctttacggttaatgccgggggacaggccagcaacaccactgtcggacatcgtggaacactgatgctggctgccgggggaagtctgagtggcagaacacagctcagtaaaggcgccagcatggtactgaatggtgatgtggtcagtaccggcgatattgttaacgcaggggagatttactttgacaatcagacaacaccggatgccgtactgagccgtgctgttgcaaaaggcgactccccggtaacgttccataaactgaccaccagtaacctcaccggtcagggtggcaccatcaatatgcgtgttcgccttgatggcagcaatgcctctgaccagctggtgattaatggtggtcaggcaaccggcaaaacctggcttgcgtttacaaatgtcggaaacagcaacctcggggtggcaacctccggacagggtatccgggttgtggatgcacagaatggcgccaccacagaagaaggtgcgtttgccctgagtcgcccgcttcaggccggcgcctttaactacaccctgaaccgtgacagcgatgaagactggtacctgcgcagtgaaaatgcttatcgtgctgaagtccccctgtatacatccatgctgacacaggcaatggactatgaccggattctggcaggctcccgcagccatcagaccggtgtaaacggtgaaaataacagcgtccgtctcagcattcagggcggtcatctcggtcacgataacaacggcggtattgcccgtggagccacgccggaaagcagcggcagctatggcttcgtccgtctggagggtgacctgctcagaacagaggttgccggtatgtctctgacgacaggggtgcatggtgccgcaggccattcttccgttgatgttaaggatgatgacggttcccgcgccggcacggtccgggatgatgccggcagcctgggcggatacctgaatctgacacacacgtcctccggcctgtgggctgacattgtggcacagggaacccgccacagcatgaaagcgtcatcggacaataacgacttccgcgcccgcggctggggctggctgggctcactggaaaccggtctgcccttcagtatcactgacaacctgatgctggagccacaactgcagtatacctggcagggactttccctggatgacggccaggataacgccggttatgtgaagttcgggcatggcagtgcacaacatgtgcgtgccggcttccgtctgggcagccacaacgatatgacctttggcgaaggcacctcatcccgtgacactctgcgcgacagtacaaaacaccgtgtgagtgaactgccggtgaactggtgggtacagccttctgttatccgcactttcagctcccggggtgacatgagcatgggtacagccgccgccggcagtaacatgacgttctcaccgtcccggaatggcacgtcactggacctgcaggccggactggaagcccgtgtccgggaaaatatcaccctgggcgttcaggccggttatgcccacagcgtcagcggcagcagcgctgaaggttataacggtcaggccacgctgaatgtgactttttga

SEQ ID NO: 293123 - DNA, 873 bp, Morganella morganii
atgaatccgtctgatgccattgaggcaattgaaaaacccctctcctctctgccttactcactttcccgtcacatcctggaacatctgcgcaaactcaccagtcacgaacccgtgattggcattatgggtaaaagcggggccggtaaatcctcactctgtaatgcactgtttcagggggaggtcaccccggtcagtgatgttcacgccggcacccgggaagtgcggcgcttccgtctgagtggacatggtcacagcatggttatcactgacctgcccggggtgggcgagagccgggacagggatgcagagtatgaagccctgtaccgtgacattctgcctgaacttgacctggtactgtggctgattaaagccgatgaccgtgccctgtctgtggatgagtatttctggcgacacatcctgcaccggggacatcagcaggtgctgtttgtggtgacgcaggccgacaaaacggagccctgccatgaatgggatatggccggcattcagccttctcccgcacaggcacagaacattcgggagaaaacggaggcggtattccgtctgttccggcccgtacatccggttgttgccgtatcggcccgcaccggctgggaactggatacgctggtcagtgcgctaatgacagcacttcccgaccatgccgccagtcccctgatgacccgcctgcaggacgagctgcgcacggaatctgtccgcgctcaggcccgtgaacagtttaccggtgcggtggaccggatatttgacacggcggagagcgtctgtgttgcctctgttgcccgtacggttctgcgtgccgtccgtgacacggtggtctctgttgcccgcgctgtatggaactggattttcttctga

SEQ ID NO: 293124 - DNA, 873 bp, Morganella morganii; identical to SEQ ID NO: 6091

SEQ ID NO: 293125 - DNA, 213 bp, Morganella morganii; identical to SEQ ID NO: 6092

SEQ ID NO: 293126 - DNA, 603 bp, Morganella morganii; identical to SEQ ID NO: 6093

SEQ ID NO: 293127 - DNA, 207 bp, Morganella morganii; identical to SEQ ID NO: 6094

SEQ ID NO: 293128 - DNA, 198 bp, Morganella morganii; identical to SEQ ID NO: 272909

SEQ ID NO: 293129 - DNA, 570 bp, Morganella morganii; identical to SEQ ID NO: 272910

SEQ ID NO: 293130 - DNA, 384 bp, Morganella morganii
atgtacgcaaaatcttttctcgcacttgatggcaacggacgtctgaccggtgcccgtaccgcacagactgcaccttatgatcgctacacctgccacctttgcggcagtgcactcagataccacccgcaatacgacactgaacgtccctggtttgaacacactgacgacgggctgacagcgcacggtcagcagtgtccttatgtcagaccggaacgcagggaggtacgcttgattcagcgtctgcagcaattcgtaccggatgccttacccgtggtgcgtaaagccagctggcactgcagacaatgtcaccacgattattatggggagcggtactgcacacactgccagaccgggcgcttcagtgaggaggtggtagcaggatga

SEQ ID NO: 293131 - DNA, 210 bp, Morganella morganii
atgaacggcataaaaatggggctggggatcacgccgggtgagcacattatcagtgccaactctgcgctcagcagaaatatccggcattgtttctgcctttcctgtcgtggccggttgattttgcagacagatgctcaaggggcgtggtttgagcatgatttacatgccctgagtgcgcaacagaaggcggccttgcagcccctggattaa

SEQ ID NO: 293132 - DNA, 1056 bp, Morganella morganii
ttgagtcggtacggtatttatgttcagcccgagacgggttcaaagcctttttacctggacgatgaacaatgtcagccacttgcgaaactggggcagtttaaattttatttcccctatgaatctgcaaaattaaacagagtggagccacccggcgtgtgggaatacatccgtgaccgcaaagcatggcgtgctgtggttccgagtatgtcagactataactgttttattgtggtgaaaaaaggggcgcacgcggcgagaacaaacggtatgacaggagtaattcagttatggacagacagactatggctggaagaaccatacatatacgtttatgcagaatgcggggactactctgcctggggtgatgacccttacggcaagttttttgtgtacgatgtatatggcaccccaaaacccaaatccgctgcgggtaaatatggcatccagcttcgtggcatgaatggtgtcacaacgctgacagatttctctaagctgggatactgcgtatgggccggtacggtttacagtgacgggaaaaagggaagcggcgctaaaatacccggatatgacatcagcaacgaaagtcgctatacaatttatgtcaggccaaaatctcaggcatgcacgatgctgaggcgtggtaattcaatctggactgacgtccctgcctatctgaatgtactgttattcgatcacaaccctgatttatctgtgttgccaaaatacgggattcaaatttgtaaccagaatggaaagacaacctataccagcaaatattgcccgttgatgggagggcagttgctatcagcaatgtccggctattctcaatacaacaatccttattttaatcttggtaactatggcacgttcgtctcttccatcaataataaatactacgacctggcagcacttggcctgtatgttagtggtaattattacgatgtccggtttctggcaacagtggactccggctggatgggggacatgtggacaaataacggtaacgtgcagggaatttataacacccactgtattgatggtgatttatatttatag

SEQ ID NO: 293133 - DNA, 546 bp, Morganella morganii; identical to SEQ ID NO: 103797

SEQ ID NO: 293134 - DNA, 231 bp, Morganella morganii
atgatcaaagtgccgattgatgacaacacccgtgcggctatttattcatttgtctacaacgtcggccctggcgcattctcgcgttcgacgatgctgcgcaaactcaatgctggtgacatcgatggcgcatgtgacgaaatgaagcgctggacatttgccggaggtaaacagtggcagggactgattaaccggcgtgagacggagagagcgatatgtcacggaaccctttaa

SEQ ID NO: 293135 - DNA, 411 bp, Morganella morganii; identical to SEQ ID NO: 277239

SEQ ID NO: 293136 - DNA, 513 bp, Morganella morganii; identical to SEQ ID NO: 103757

SEQ ID NO: 293137 - DNA, 339 bp, Morganella morganii
atggctaaatcacctgcagaacgcaaagccgcgcagagagcgcggcaaaagaaaaccggtattgtcaaacttgaactgctggtggatgagcaggaactggaaatgctgcagcgcaattgtgtgttgcggcggccaggtcgggaaccttatgaactgaacgagtacctgacgatgctcatcagaatcgatgaccggtcgctaaaatctgaaattgaggaactgagtaagaaaacttgtcgtaaatgtggcgagaaactcccagtggcggaatgctgtatgtctggtgatgctgagtgctggaatactctcggatggcatgatttaaagctctgcatatag

SEQ ID NO: 293138 - DNA, 696 bp, Morganella morganii
gtgctcggctgggaaacggtattcaacccgaccagtgcggtattggggcgggttgccgaatctgatttacagtcccgccgccgccggaaactgacgctggcaaaaaataccgtcagtgtcggtgaggcgattacctccgcgttatatgatctggaaggtgtccgttcactggcataccgggaaaattataccaatatcccgatgacgctggacgggattacgctggtgccgcacagcgtatacgtgtgtattgagggcggggaaagcggggaaattgcgcgtgcattgttgcgtaccaaaacgatcggggctgcttttaacggcagtgaggaggttgaggtaccggagccggtcagcggccagacctatacagtcaaatttgaccgggcaaaagagattgtcctgttctgccgcgtgaccgtgaaaaaaacaccactggatgcgcagacggttattccggcggcggttgagtcatgggcccggggcgaaaccgaaggggatggcgggctggttgtcggccgcgaagtttccccgtttgaaatatcggccggtattaatgcttctgagccgcgcctgtttgtcacccgggtggagctgtccaccaacggtacggactggtcatccgatacttacccggtaaagctgactgaggttgccagaatcagccgcagtgcggtgcaggtggtatttgtatga

SEQ ID NO: 293139 - DNA, 657 bp, Morganella morganii; identical to SEQ ID NO: 198493

SEQ ID NO: 293140 - DNA, 510 bp, Morganella morganii; identical to SEQ ID NO: 9982

SEQ ID NO: 293141 - DNA, 369 bp, Morganella morganii
atgttcggaaatatacaccggattgcctcgcggtatattccgcagcaaaccgtactctggtaccgctttaaaagccgtgagactgatgaacggggccatgatcagaacacgtattatgacccggttgaggttcgcgggagctggcaggcggtggatactcaggacattcagtctatggggctggacaccagtcaggtataccgccgtttgtatacatcccacgatatcagcaccattcagcgcggatcttcaccggattatctggtcttcggcggcaaacgctacgatgtgaccggcgatgccgactggtatgcacaggacggctggaagtcggttatctgtattgaggcaggcaatcatgacggataa

SEQ ID NO: 293142 - DNA, 513 bp, Morganella morganii; identical to SEQ ID NO: 277237

SEQ ID NO: 293143 - DNA, 747 bp, Morganella morganii
atgaatttcatcgacggtaacgattcgatgattggccggatcctggataaatatcccggactgaaagccgtcattctggcgctgtgggacgttttcaaaaaactgtttaatttcattattgatgttgccgttattgtcggcaaagcggcagctgatgctttcaatctcattattgacgccggtaaatcgttgtggaactggctgctcggttttatcaaaagtctggggaactggggaaaaagctttcagggggttttcgataacgtctccaatgctgtggttggtattttcaaatggctgtggaaacagatagaagcttaccttggctggatcaacaaagggctgaataagattaaagagggctgggcggcctttaaaagctggtttggtgccggtgatgatgatattgaggttgaccagaccgttaaccgcacggtgaatgaacaggggcagattgggtacgacatgccacctgaaaaaacgatcagtgaggaggacgcggcaaaaatggcgcaggccatgaccgcacatctttacggtgtgtcaaatgacccgatgaaccctgtcaccagtcaggcgatcagcaatcagtcgacgaccagtaatgaaacaaacatcagtatcggtgaacttaaggtcgaaacacaggcaacggatgcacagggtatggcggcgggagccaaagatgcactcggatctcagttgcaggactttggacatcagacaaatacggggctggggaaatga

SEQ ID NO: 293144 - DNA, 168 bp, Morganella morganii; identical to SEQ ID NO: 278447

SEQ ID NO: 293145 - DNA, 225 bp, Morganella morganii
atgggtgagattaacgccgaaatcaccgccggggtgaaaaaaattaatgccccggtggtgttcagcccggcggacggctcgctgtctgcgaaggcaaaagcggaagccggtgatctggttatcggttttgtcagccgtcacattgagtcagcggaatcgccgcatctgtgcgtgatccgtctgaccgaaatcccgtacacagtggctgcgaaggaaggtgaataa

SEQ ID NO: 293146 - DNA, 294 bp, Morganella morganii; identical to SEQ ID NO: 290657

SEQ ID NO: 293147 - DNA, 507 bp, Morganella morganii
atgaataaaatattcaaagtcgtaaaaaatcaacggacagggaattctgttgtcgcatctgaattcgcaaagggtgcaaagaaaggaaaaaaactggcgctgttatcactggcaatgctgatgggctgcgggctgagcgtgtctgcaccagcagctgatcctgcgggccagtggttagaaactgagtatcgccctgcgcaatatgacagcacaactaaaacgtgggttaataattcaaatgaaaaagaacaatcccgggttattaatgacggcagcgttaaagatcttaatttaaataacgaaaagactaaattcaccaataatcttgattatcatgaaacctggttttcattgcaggaattatgggcaaaaaacacggatgcaaataaggttatttcgattaccgaataccgtgacggacagccgcttccggggaacgcttccctgaatgcgattgaagactggcaggtcccggacaacccgtctgcgatggaagaaattacctag

SEQ ID NO: 293148 - DNA, 486 bp, Morganella morganii
gtgattgcaccgccggtgatgttcggtggtgcattccgcatccttgagcggcaccagtggcgcgggatggatttccgcgctcaggcggaagccatcaaacaactgaccgaacgttacaacgtggaatacatcggtatcgacagtaccgggatcggccacggcgtttacaagtcggtgcaggagtttttcccgcaggtgcgggagttcgtctataacccggcggtaaaaaacgccctggtgctgaaagcatgggatgtcatcaacagcggacggctggaatttgatgccggcgatcgggacgtcattcagtcgtttatgtctatccgccgctcaaccaccgccagcggcaaccgcccgacctatgaagccagccgcagcgaggacgccagtcatgcggatctcgcctgggcggcaatgcatgccctgtacaacgaacctatcacgggtgagaacgcccaacatcataatatcgtggagctttattaa

SEQ ID NO: 293149 - DNA, 2028 bp, Morganella morganii
atgacagaattctcaggttcagctgcctcgcaggctgattttatttggaagaacgcagaagacctttggggtgattttaaacataccgatttcggtaagattattttaccctttactttattacgtcgattggagtgcgctcttgaatctacaagagaagcggtaagggaagcttacgacaattttaaggatgctgaagttgagcttgacccaattttacgccaaaccgctggctatcccttctataacacctctgagtattcgctttcaacgctcggtagtacaaaaactcgtcgcaatctcgaagattacatttctcttttttctgataatgccagagcaatttttgaagagtttgaattcggcaacacgataatacggcttgagaaagcagggttacttttcaccatctgcaaaaactttgctggtattgatttacaccctgacatcgtgccagacagagtgatgagcaatatctatgagcatttgattcgtcgttttggtgcagaggtcaatgaaggcgctgaagatttcatgaccccaagggatgtcgtgcatttagccacagcactcttgcttgatcctgatgatgcactgtttgaggcaagccctggccttattcgtaccctgtacgatcctacttgtgggacaggcggatttttaactgatgcaatgaaccatgttgccgactatggcaaccattataaaattccaccggtactggttccacacggccaagaacttgaacctgaaactcatgcggtttgtgtagctggtatgctcatccgtcgccttgagtcagatccaggtcgcgacctttccaaaaatatccttcagggtagtacactttcaaatgatcagtttgccggagagcgcttccactatggcttatctaatccaccttttggtaagaaatgggaaaaggacaaatcagcggtagaaaaagagcataaattgggtgagttaggccgctttggccctggcttgccacgtattaatgacggttctatgctgtttttgatgcacctggctagcaagctcgaattgccaaacaatggcggtggacgtgctgcaattgtcttatccggctcacctttattcaatggtggtgcaggctctggcgagtctgaaatacgccgctggttgcttgaaaatgaccttgttgaagccattgttgcactgcctacggatattttctttagaactaacattgctacctatctatggattttatccaacaagaaaactgataatcgcaaaggcatagtgcaacttatcaatgctactgacctttggacatctatcaagaatgagggtaataagcgtcgcattgtgagcgatgagcagcgccgtcagattttagatatctatgctgctgccgagagtgacgcactctctaaaatggtcgattatcgagtatttggcttccgccgtattaaagtgcttcgcccgttactaatgacacttaagcttgatgagcaaggtttatccacgctagaagcaacggatacctggcagaaactaccggttgagcataaagcattctggcgtgaggccattcagtcgcagttgggtgagaccaaggaatacagttgggcagaaaccttcaccaaagaagccgcgaaaacacctgatgccaagctgcttaaggtcaaaggcaacaagacctttattactgccttgttagctgcatttggccgcaaagaccctgaagcggagccggtgatcgatgcgcaaggcaatattgtgcctgacacagatttaaccgattatgaaaacgtaccttatttagaatcgattgaggattactttgcccgtgaagtgctgccgcatgttccagatgcttatatcgacgaaagctttgttgacaataaagacaagcagctaggtcgcgtgggttatgaaatcaacttcaaccgcttcttttatcagtaccaagcgccgcgtaagctgcatgatatcgatgcagaattgaaagaggttgaaggcgagattgcagcattattagcagaggtggcaacagaatga

SEQ ID NO: 293150 - DNA, 1356 bp, Morganella morganii
atgagccactataaagcctatccagaatataaagattctggtgttgaattcattgggaagattccaaaagattgggaattaaagcggttacgacatatagctattttcaataatagcaacgtagacaaaaaaagctatgagaaccaggcagatgttaaattatgtaattacacagacgtttattacaacgagtttataacgcctgatctggaatttatgaatgcaacagccaacgaggctgaaatagataaatttcgaattgcagaaggtgatgtaattatcactaaagactcagaagaccccaatgatataggcattcccgcactagttaagcaagatatgcatgatgtcgtgtgtggttatcatttaacagtcattaaatcgcatgaggttgatttatctggctaccttcatcgctcaattcagtctcacccaacgaaagcccacttctttgttgagtcgcctggaataactcgttacgggcttgaccaggatgctatcggtgatatacctgtttgtgtaccacctaaagagcttcgcgcaccaattattgacgctataaatgccgaaacaacgcgcattgacaccctagtcaccaagaaaacccgcttcatcgaactgctcaaagaaaagcgccaagcgttgattgcccatgcggttacaaaagggctaaatcctaatgtgaagatgaaagattctggagttgagtggattggtgaaattcctgagcactgggaatataaacgcttgcggcacgtggctagtttttacaatagtaacgtagataagaagagctatgatgatcaaattgaggttttgctttgtaactatacagatgtgtattacaacgagtttattaccactgatttggactttatgaaagcaactgcaagtgttaatgaaataagcaaattccggttaaggtgcggcgatataattataactaaagattccgaagatccaagagacataggaattccttcattggttttacaagacatgccaggcgtaatatgtggttatcacctaactataataaggactcatcaggatagccttagcggatttctgcatcgatctattcaagcaacgtctacaaaagctcacttttttgtagaatcacctgggataacacgttttgggcttggccaagatgaaattggtgacattccggtctgtgttccacctgaagatgaatgtctaaaaattgttagttttataaaccggcaaacaacccgcatagacactctaattaacaaaacacagaaaagcatagaattgcttaaagagcatcgttcagcctttattactgctgcggtaactgggcaaatagatttacgaggagagcccgcatga

SEQ ID NO: 293151 - DNA, 3240 bp, Morganella morganii
atgaatacatctgcccatcaggaaaagcactttcaaagttacatcattgatcgattggtagagcaaggttggaagctaggtgataccaaatactatgataccgaacgtgcactttacccagttgacctagaagcctggataaaagcgagcggccaaaaagataagtgggagaaactggaacggttaaatggcacaaaaaccatcgatgtggttatggagcgacttaccaaggcacttgagcaacaaggtacggttcaggtgctacgtcagggcttctcaattgctggctgtggtctgattgaaatgaccgaaactgcgcctgaagataagcgtaacgaagcggtgatagagcgctataaagccaatattctgcgcatagtgcccgagctgaaataccatcctgcgcgtgagtttgcgattgacttggtgttcttcatcaatggcctgcctgtcgcaacagttgagctaaaaacggacttcacccagtcagcagaagctgcgatggagcaataccaacaagatcgcttgccctttgatcccaaaaccaaacgcaaagagccgctattgaccttcaagcgcggggccgtcgtgcattttgctatgtcggattctgaaatcatgatggcgactaagttggatggggtcaataccttcttcctgccatttaataaggggcatgaggggcgagctggcaacccgcctggtgagaagaagccggatggtagcattgaataccccgtcgcttacttttgggaggatgtgtgccaacccgatgcatggttacgcatattccatagctttgtgtatgtagagaaaaaggatgtggttgatattcaaggcaactggtccaaaaaagaaacacttatttttccgcgttttcatcaatggacggcagtgaataacatgattgctgatgcccgcaagaacggtgcaggcatgacctatctggctgaccatagcgcaggatcaggcaagaccagcaccatttcctggacggcacatgatttagtgaaattacgggaagacaatggcgatgctgtatttaacagtgtcattattgtaactgaccgtaatgtattagatgggcaactacaagatgcagtaaagcaaattgaccaccagtttggtgtgattgctgcgatagatcgtcagaagtcatcgcaatcaaaaagcaagcaactttcagaagccttgatcaatggtacacctatagttgtcgtcaccattcagactttcccttacgccatggaagcagttattaccgacaaggcacttaagggtaagcgttttgctgtgattatcgatgaagcccataattctcaaacaggttctaccgctgccaaattacagaccgctctaggaatgagtggtcacggtaaaatgtccagcatgactgtggacgaactactagagcaattgcaaaaatcccgtgctcgccccgacaacattagctacttcgcgtttacaggcacgcctaaacacgcgaccttaatgctgtttggtcggcctgaagacacgtcaaatccggcatcaaaagaaaatccgcctaaagcctttcacaagtacaccatgcgacaagcaattgaagaaggctttatccttgatgttttaaaaggttacgtaccgtatcaaaccgcctttaatttgtcgaaacagcttgaagacagtaagcgtgtgagcggtaaggcagcaaaacgtgcattagctcaatggatggcactacatccgaccaatgttactcagaaagtccaattcattattgagcatttctctaaaaacgtggcgcaccgtttagatggtaaggcaaaggcaatggttgtaacgagttcacgagctgctgctattcgctacaagaaagcgtttgaccgttatattgaattgcatagcgaatacagtttcatccattcgttagtagccttttctggcaaaatgactggaaaacaggtgatgcacaatgatgatgaggcttttgaggaggttttcgttattgacgaaaacgaggaatttaccgaacaaagcatgaatcctgatgtacaaggtcaagacttacgctttgcgtttgatcgccctgaatatagagtgatgctagttgctgacaaattccaaacgggatttgatcaacccaaactggtggccatgtatgtggacaagaagatcgccaaccatgttgagattgtgcaaactttctcacgcttgaatcgtatggcgcccggcaaggatgaggtgttcatcatcgactttgtgaatgatcccgaaaatgttaggtatgccttttcactctatgacgacggcgcgcatatcgatgatgttcaagagctgaatgtggtttatgaaatcaaagagcggttggacgaacatagcctatacagcgacaaagacttgatcgctttcaaagaagcccgcttcaaaaccattcgcgatattactcactctcaaactccgcaacacaaggcgctttatgcggcaacagaagctgctactcgactctataatgaaaagatgaaaatgcttcgcgatgcgatggcgacttgggaaggcgcttttgaaaaggctcgttcacaaggtgatgaagcaggaatgaaatcagcagaccatcatcaagatgaatatgcagagcagattaaatccttattgggctttaaatcggatctagggcgtttctgccgaacctattcttatgtggcccaacttatagattttggagatccggagcttgagaattttgctgctttttctaagttattgcaaaagcgcttgcacaatgaagcacccgaaactgtagatttgaaaggactggttcttacaggttttgatattaaagggcgtgttgttgaacccattgaggatgaaggcaagccagttttggagcctgtcggaccaggtggaggtggcggtgcaggagacaagcccaaatttgtgcaggaaatcattgaaaaactcaatagtttgtttggagaggctacgcctattcgagatcaggttgcgttcgttaaccaaattaaatcaattgccggtgaaagtgacgtggttatggctcaggttgaaagcaactcgcgagaacaggcgctaaaaggaaatttgcctggcgcagttcaacaagccgttgttcgcgcgcttactagccatcaaaaacttgccactcaggtacttaagtcagatcgccaaggcatgtcagctctggtcgatgtgatttatgaaatgcttagagatggtaaaaatatagatttggatttggactag

SEQ ID NO: 293152 - DNA, 1269 bp, Morganella morganii
atgcttgatttactaaatctgccgggtattaaaccggtggatatgtataaagagagcaaggcgctaatcattgtagccgtggccgacgaggtcggtgcgccgatgtgcccagattgcaaaattccaatgcacaagcatggaactcgcaagaacaagttctcagacaccccactatatatggaaccagttcgacttgaagtgcaaagaccgcgttttcgctgtgagagctgcggaaaaatggctatgcctgaactgagttttctggatgataagcgtcgagcaactaaacggctggtcaatgttattcgtcaacagtgcctcggcaccacatttagggcgttagcagaccagactggcgtcgctgttaatacagtaaaaaatattgcgcatgacttgattgatgagttagaacagacggtttgttacgaaacaccggttatcatgggaattgatgaggttaacttggccggaggttatcggtgcgttattacaaatcttgctactaacaatgtatttgaaatgctggagcaacgtacgcaagatcatctgaaaccattttttagggatttgcctaatcgtgaaaaagtagaatgggtatgcactgatatgtggcgtccatttaaacgatcttttgctgaatttttaccaaacgcaaagttggtaattgataagtttcatgttgtaaaaatggcatctgaagcattagaagaagaacgtaaaaaatatcaggtacaacttagtaaggaagatagaattaatgtcaaaaaatcaatccgatggctgacgcttaagcgacctgctaacctgactcctgccgaacataaggctcttgctattgtgcgcgagcaaataccagaattgtccattgcttatgatttcaaagaaagcttctttgctatctatgatgaaccagacaagcaaaaagctcagaacgcatttgaagcatggaaaaacagtttacctgacgatggcatggagcctttcaaaaagctcgtcaaaactgtccacaaccactatgaagatatttttgcttattgggatgcaccgttcccaataactaatgcctatacagaaggcttgaacggattgatcaagatgtctaatcgacttggacgtggctatagctatgagatcattcgcgcaaagacgctttattcggccgaagctcgcaaggttggtagcggtatccgatctggtcgaggaaaggttgagtatgggccacatatacccacgcttgttaagcaggttgaaagtggtgaattggactaa

SEQ ID NO: 293153 - DNA, 372 bp, Morganella morganii
atggcgaataaaaaaacgatatttatagcttttgctattgaagacgagagacaacgggattttttaaagggtcaatcgttaaataccaactccccttttgaatatatcgatatgtccgtaaaagaagcttacgacactgattggaaggctaaagtaagaactcgcattaaaaggtctgacggtgtcattgcactcgttagcaataactcattgaagtcaagtggtcagaaatgggaaatagcttgtgcaaaagaagaaggcaaaaaggttttgggcgtttgggcatacacggatgacaggacaaatgtagaaggtgtcaaaactgttgtttggacctgggatgccattaaaaatttcatagacagtttataa

SEQ ID NO: 293154 - DNA, 975 bp, Morganella morganii
atgaggatcgctttgatagtgggtgttaaccattacgagcatgggggtcacctatatgggtgtgtgaatgacgcgcattccgtaaaagcaattttggaaagacacgatggcggttctgtgaattttgattgccgattgctgacaggaacaggacctagcgagacagttaaacgtggtaatttaaaagaccaaattactgaattatttaaagcagatgcagatattgctttgttctattttgctgggcatggtcatattgaggcgacaggaggttatttattaacatcggatgctgcaagaggcgatgaaggtgtttcacttacggaaatactgacaattgcgaacaactccccagccaaaaacaaactaattatacttgatagttgtcactcaggaattgctgggacacctcctgaagctggacaattagcgtcgcttgccgaaggtgtgacagttttaacagcctcaactaaagaccagtacgctacagagcaaaatggacgtggagtttttaccacgttgttggttgatgctctaagcggtagcgctgccaacttaacaggcgacattaccccagggagtatttatgctcatattgatcaatctcttggggcatgggaacaacgccctgttttcaaaacaaacgtgaagcaatttgtgtcgttaagaaaatcctcccctgctatatccattgaggatttaagaaagattacaacactgttccccactcctggatattcatttcctcttgatcctacgtttgaacctgaaatgaaaggtagggatgaaggaatgccaaacccagttgaagaaaacacaagaatattttctgtgcttcagaaatataaccgattaaacctccttgtgcctgacggagcggatcatatgtggaatgctgcgatggaaagtaaatcgtgcaggctaaccgctcttggtgaacattatagaaggttggttgaaaagaatcgaatctaa

SEQ ID NO: 293155 - DNA, 873 bp, Morganella morganii
gtgctcagcgccggtagccattacacggataactattatcagactccactgccgaaaacacactgcctgcactacagccccgatggttcctgttacgccagccttattccgcagatcccccacaccgtcttacaatggcgcagcgactgggatctgcgcaggctgacgccgctgtccggctcccattttctgacgcagcactaccgggtatccacccggtatgatgccgcgaatcaggcagccaataccttaacactgactgctaaaacgggttatcactatcaggatcaccatactttatggcaactgactccgctgctggagcagcatttttccgccgggcgccgtttttcctcagcttacggcttacaaacgtatctgaatcagcaactcagcccggagtggtctctcggcggattggctgcacttcgacagcaccgttatcagccttatctgcattcacataacggcactgaataccagttgataccacagataacctggcgtccgcatccggcagccacgctgtatttacaggcagaaaccaccgtccacaaaaaaaatgatccctataaacattaccagacggctgccctgcataccggcctgacctatctgtggcacccgtttgtgtcccagtctgttcatgccgtttacacccgtaaacgttatcaccatacacatccgttacaccgccaggccagggaggatctcacccgacagtacagtacaacactcgcgctctatccgccgtcattcgcgcaaatttcacctcagctttcactgatccacacccgcaaccgcagttctgtcccatggctttatagctaccggcagactgaaatcatgctgtgttttgaacggctgttttaa

SEQ ID NO: 293156 - DNA, 1014 bp, Morganella morganii
atgtcttcgcattcaccattatctggtcacccatataaaacaatcacactgcttctgcccgtgttatttatcccgctgccgggactggcggcagaggaaaaagatcagcacctgggcgatattacgctccgtaatgaacagaccgctgctgacagcgccaaagataaaatctatgacaaaaatgtctccaccctgatcctcaccaaagaagaaatagagcgctataaaggcgcctctgccgccgatattctcaaaggcgccaacggggtattcagcggtgatgcccgcaacggcaacgcgctggatgtcaatatccgtggaatacaggggccgggccgtgtaccggtcaccatcgacggcaccgaacaggccgtgacggtgtaccggggttataacggtgccaataaccgtaactaccttgacccgatgctgatcagtgaaattgagattgaaaaaggcccgtcccttaacccgctcctgaaaacgtcggtaggcggcggtgttgccatgaaaacacttactatcaatgacgtggtgaaaaacggtgaccagtttggtgctgcactgatgctggaaaacagcagtaacaccaccaaagcccggatacccaatctggggctcggggaagattaccgccttgtggataatatgcaatttgattggcttatcattgacgaccccggcacccatttaaccccggaaaatcgtgataatgcccccgcactgaataaaagcgactacgcctggcgtctggcagtgggtacccgtcaggaaaatatggatctgctgctggcttatgcttaccgcgaccggggaaactattttgccggtaaacgccacagcgaaaactataatgatgaaatgtctgacagtgatatcggtattttgcaaatgtcgaatatgacttacgacccgtatatgccgtttgtgtcccgtatttaccgcaagggtaatgaagttcccaatacatcggcaaaaacggaatcctggctgataaaaaatacctggtactga

SEQ ID NO: 293157 - DNA, 558 bp, Morganella morganii
atgggcatatttgccgataagcggtgtgatcagcagcggcagaataccgaccggcgcggaagccagtcccgcccaggtggcagtgtagccgaataccccctgcaacagctgcggcagcagaacaatggtgccgaaatagagcatataagccagactgaggctgaggcaacctatcgtgaagttcctgctcttaaacagagacaggtccaccacggggtgatcatccgtcagttcccagacgatcaggaaggcgatggcaaccacagctatcacggtcaggacaataatctccgtcgagttaaaccagtccagctctttgccctggtcgagcataatctgcagacaaccaacccccaccaccagcaggatcagcccgacagtatcaatcggacggatttccgttttggtttcccggccctccagggtttttgcggtcagcatcatgatcacaatcccgaacggcacgttgatgaagaaaatccagccccagtgatagttgtcactgatatagccgccgaggataggcccgcagatcggcgcgataacaatggtgactga

SEQ ID NO: 293158 - DNA, 396 bp, Morganella morganii; identical to SEQ ID NO: 277423

SEQ ID NO: 293159 - DNA, 381 bp, Morganella morganii
atgcgcaaggtatctgctcagattcagcaggcgcagtttgaacaggatgcactggtacagacactccggcgtgacctggcgcgtcagtatcaggtgttccgccacagcggcatacagctggcggcgctggagcaggccgcagcggctgcgcggttacaggtaacggcggcggaaaaagggtatgcggcggggcagaacagtcagccggaggtggcacatgcccgggatctgtattatcaggcggagcaggagctgataaaagcccgctatgacgggcttctggcctggttccggctgcgtcattacagcagcgcgccggaaaccgggcttttcaggcagattgaggactattttacagtgacggagaggccgtctcactga

SEQ ID NO: 293160 - DNA, 195 bp, Morganella morganii
atgaaacgctattataactggatctgccgccataagctgtacaccctgcttatcgcctttattgtgacggatatcattttgtgggcgattttgtctttcaccatgtggataacatcaccccggtatttcacgctgttttttatgacaaaacttgttaagataattcgcagaataataacagtaacccgtctgtga

SEQ ID NO: 293161 - DNA, 246 bp, Morganella morganii
atgaccattaaacaatttattaatgcattcacgccgagatttatcactgaaacagtagctttcgagttacttgacgatggatatcacatcattgcgccaatgtggctgcttgatgatggtgagtcctatgacgctactggcgaaatgagaagtttcaatcttttcgggtgggcgatattcccgaggcttttgggaaaaattgacactacgccaggacgtaaaaattcagattgtttaagccagtaa

SEQ ID NO: 293162 - DNA, 342 bp, Morganella morganii
atgttgggagaaaaaccacctactttagatgaaaaaataactaagattaggagcgacgtcgaaaaactatctatcatcctcgcctcaaaaaaagaagaggcttatcaactatcgcagggtgataattacgaggaataccacaaagtatgcgaacaaagggaaagcacaaaatcagaattatgtgacgcagaaagtgaattatcagcactgattagactcagtgatgagaaaaagtcacgaatctcgcaggaaaaaagcgataaagctgatcattttgtaaactcagccataatatttactgtggtttttgctattgtttatttcatatcaaggcactattag

SEQ ID NO: 293163 - DNA, 309 bp, Morganella morganii
atgaacaaatacagtgacaaatcagactttgagattaataaggctgttgctgaggaattgaagttaaattatgaaattgattatagcatgcgcattgttgttataggtgagcacatcatctataacccctgctcaaaccccagtcaggcaatgccgattattattgagaatgggatatccagtttattcaacggtgacgaatggatttgtagcgcctcggatggtgaatttctttccattaatgaaaatttataccgcgccgctatggaagtatttctgatgatgaaggatgcggagaatgaaaaatag

SEQ ID NO: 293164 - DNA, 237 bp, Morganella morganii
atgcctcagtcggacacgggcaaataccgagtccttacttgtcagtccccggtcgatatcttgggcgcttatacgctgcaagtgacgcttggagaaataagcagggatatcgatctgggatttgaaaatggcaatataatcgcgatgctcgacgatcagaaaatatccggttacccggtcgatcacactttgagtgccaggcagaaaagccggtgccttgtcaaactgaaagcataa

SEQ ID NO: 293165 - DNA, 246 bp, Morganella morganii
atgaaagatattaattttattgtagggcagaatatccgcgacttaagacaccgtaatggcttgactacaaagatgttagctaaaatgctgggggtctcacagcagcagttgtcaaggtatgaacgaggtgttaataaaatagatgtcagtgttgtatcttatgaatttctgtttcctgaaactcagaatgattatactgaatcagtaaaaagctcctttgtatatatggagcctttagcaatctga

SEQ ID NO: 293166 - DNA, 1467 bp, Morganella morganii; identical to SEQ ID NO: 277050

SEQ ID NO: 293167 - DNA, 327 bp, Morganella morganii
atggaaaatgcaaatccacgcaaatcgtttaaccggtttgtgtcaaatcatctgatggcaactgctcatcaggcactgagaagcaccacacagacagtggttgcaaaactgctcggtgtacacgattcaacagtcttacgcagaacagaaaagttaccggagatatgcgagacattagctgcagccggtatcacagattttgttttgccaggcgagaagaaaatcagcgaggaagagtaccggtttctgtggaagcagatcggcgaactctctctgatgagaacaaaagaaaacgccccggctgttggagcagcagaggcgcattaa

SEQ ID NO: 293168 - DNA, 291 bp, Morganella morganii
atgacgcatccgctctgcatgatcaatatcgttacagaaaacaatggttttatccatcgggttggtacgtttcaggtaatcggtgatagtcttcgccaccagcatagtacgctcatcaataaccagcgtgcggtcaaaatccttcagattgtatatacggtcttcaatctctttgccgtatttatccagctgacctttaaccggccgccagccctgaacatcgacatcgatatcaacacgcacgactttgtaaggggcgaggaaaccgtcttcaattccctctttcagtga

SEQ ID NO: 293169 - DNA, 180 bp, Morganella morganii
atgggcggcgcaggcagcggcgttaacgaagtgctgatggcgcatcgtaaagtcgttccggtactgaatatcggcctgccggacttctttatcccgcagggtacacaggacgaggcccgcgcggaactcggtctggatgccgccggaattgaggccaaaatcaaggactggctggcataa

SEQ ID NO: 293170 - DNA, 1443 bp, Morganella morganii
gtgtctatccttcatccaactttggaaaacatactccgtttaaaggttgctcccactcctggtgaacttcacttgttaaaccaccttacggagaacttggatgatagctacgaaattttctttaatccatttattgatggggatcgccctgattttatcattcttaaaaaacacacggcaatttttattgttgaagtgaaggactataacctagttaattatagtgtcgatgcttttaataaatggcaagttagttctgaaaaaggggtgtcgaagatttcatcacctcaatcacaagctttcaggtacaagtcaaatttatataatctacatttaccagtattaggtctgtcttatctaaaaaatcgcaatttttttaacattgtccagccgtttgtttacttacacaaaggtaaaaaagccaatatagatttgttatattctcacgcccagagtgaattgatggagcgatctaggtatattgatgcgcaatacaggaataaagaaattcctatagaaaaatacaatcaacaagcagaaaaaatctcgcagctaaaaagaaagttagctagagataagtccatggcttacggcgcagatcgaataaaagaactcgttaataaaattaaaagctttaagccacatgtcctgtttgacgatcgtgtgtatgacgattttaaaagacgcttgatgccaagcgaccatattttaaaacagggaaaaaaaatcttcttagataagcgccaaagtaagttggcggtaagcgtgtctggaaaagaaaaaattaaaggtgtagcaggctgtggaaaaactactatcattgcaaatcgagcggtaaatgcatttcatcgacatgatgatattgtattgattctgactttcaatattacactaaaaaacctcattaaagaccgaatcagcgatgctcttggttatcgagatgatcaacatttcgcagtgacaaattatcatcagtttttcatgtctcaattgattgagacagagcaagatgtcagtgaattaattgaaaaatacggatttgataaattatttaaccgtgatttattcagtggtttttctgttaataagtatcggacaattttgattgatgaaattcaggactttgaaaatgaatgggttaaaattattcgtgacaatttcctcaatcacgagggtgaaatgattctgtttggtgacgaatcacaaaatatttatgaaagaaatagcaaaagagctgccgttatcgcacagggatttggtgagtggaagaaattaaatcgttcctatcgtacaagcagtgactcgtctttgaatcgaatttttaaagaatatcaattgaagtatctggtcgaaaaacatgcagatatagatttatttgaacaacaaaatatccagccaggaatgaatttctatcgtctaatatttttcttgttcgtcgattga

SEQ ID NO: 293171 - DNA, 318 bp, Morganella morganii
atgagcaacatcatttggggcctgcagcgcgatatcacgccgcgcctgggaacacgtctggtgcaggagggcaaccagctgcactacctggctgaccgggcctgtatcacaggtaagttcagtgatgccgaatgtcttaagctggatgtggcatttccgcattttatcagccggatggaatccatgctgagcacgggtgaaatgaatcctcgccacgcccactgcgtcaccctgtaccacaacggttttacctgcgaagccgatacccttggcagttgtggctatgtatacgtcgctgtttattccactcagcgctaa

SEQ ID NO: 293172 - DNA, 237 bp, Morganella morganii
atgtctgaatctcacatgctgccaccgggaccttttacccgacagcaggccgaagcggttacccgcaggtatcgcaacatcagcattgaagacgaccagggcacacacttccgcctggtggttcgtgactctgaaggtcgaatgatctggcgggcgtggtgctttgaaccggatgccggtgaagggcttaaccgttatatccgcaactcaggcatgctcagagcatcctcctcctga

SEQ ID NO: 293173 - DNA, 864 bp, Morganella morganii
atgaatcaatttgaaggtttacagtcactgcagcattcgctttctaacctgccgcactgggcatcagagcgtattctgcagcagataaatcagcttactgactatgagccggtgattggcatcatgggtaaaactggctcgggcaagagcagcttatgtaatgccctgtttaccggtgagatttcaccggtcagcgatgtgaccgcctgcacacgcgaacccttacgctttcgcctgcaagtggggaagcgctttatgacgctggtggatttacccggcgtcggggagtctgagcgccgggatacagagtatgccacgctgtaccgtaaacagctcccccagctggatctggttctgtggttgattaagggtgatgatcgggcgctggccgtagatgaacatttttaccggcaggtgattggtgaagcataccggcataaggtgttgtttgttatcagccagtctgacaaggttgaacccacctgcggtggtgaaaagctgtctacagagcagaaacgaaatatcagcctcaaaatctgtctgctgcatgagttgttccaacctgtaaaccctgtctgtgcggtgtcgatacgtttgcagtgggggctgcggatgatggctgagcggatgattcgttgcttgccacgggaggccagtagtcaggtggcagtacaactcagtgcgccacttcgtaccgatgccgttaataaaaaagcccgtgacgattttggtgaaacggtcggctcggtactggatacagtaagttccatgcccctgataccggcccaggttcggtcagtcatccagtctgtgcgcgacatcgtggtatcagtcgcccgtgcagtctggaatttcttcttctga

SEQ ID NO: 293174 - DNA, 894 bp, Morganella morganii; identical to SEQ ID NO: 162012

SEQ ID NO: 293175 - DNA, 1161 bp, Morganella morganii
atgaaaattaaggtgaatggaacgggtatccacattgagcaacagggcagcggtgaaattgcactggtatttttgcattattatggcggttcatcccgtacatgggagagcgtgataagtcagttacctgaccactaccgcacagttgcaatcgaccaccggggctgggggggctcagacgcacctaaatcaggataccgaattggtgaccttgctcgggatgccgaaggggttatttcagcgcttgagcttaaacgctacattcttattggccattcgatggggggaaaagttgcccaactgatggcgtcgcgtcggcctgcaggtcttgaaggcctgatgcttatcgctccctctccaccttcacctatgcgtctcacgcctgagcagcgcgatacgttatccagcgcatataacagccgcgaatctgtcggctttgtgattgataatgtcctgacagcgggggcactaagttctgctctgcgtgaacaggtaatcgaggacagtttgagggcctcatccgaggccaaagaaggctggcctaatacggctatcggcgaagacattacccaggaagtggcctcaattaatgtccctgtgacggtcatttcaggggagttggatcgtgtagaccttccggctactctgcaaagagaattgctgccccttatttcacatgcatcaatgtatattattccagacgtcggacatctcttgcctctggaggcccctacagaggtcgccagccacctgttaaaatttacagccgccattgaaggggggacagcagtctaccattcgcctgtcgaaacgatagccgcgtttgatgatgctttcaatgcaggcagggttgatgacctgctggctctgttcagtaaccgtgccactatgaaaatgactgatggtgtggtcatcgaaagcgatcctgaaaagcttcgggacacttttttgtcactgacatcatcccagccagttatcagaaaccatatccgctcgatcctctccgccggtgaaattgctctgcttattattgactggactttgaccataaccaccaaggatagaacactgcacgaagagtccggtacagcaacgcaggtgttgttgcgaagcgttgacggaggttggcggctgctgatttcaaatccatcaggaacgtag

SEQ ID NO: 293176 - DNA, 1653 bp, Morganella morganii; identical to SEQ ID NO: 151810

SEQ ID NO: 293177 - DNA, 1128 bp, Morganella morganii; identical to SEQ ID NO: 151809

SEQ ID NO: 293178 - DNA, 192 bp, Morganella morganii
ttgaagtacgtgctggcggcgctcgccaagcgttttggaggcgatgaacatggtgaagactatgagaaggtgcgatcggttgccttcacacgtttctacggcgaggacgacgaagatggtcttgttagtctgcagcgtttcgcagttgggttagtccagagcttgatggctgagattgtgacctgctcctag

SEQ ID NO: 293179 - DNA, 153 bp, Morganella morganii
atgcaacctgaatacggggcacttgatggttatatcgcccggcaggatgacgatatcgactggccgctgaagcgcgataatccgacagaagatcatggctatgcagcattcatttcggagaaaattactggaggtcgctctgatggctattaa

SEQ ID NO: 293180 - DNA, 225 bp, Morganella morganii
atggctattaacggtaagagctggatttttctggggctcactatttctccttttgctacgcccgaccctttggtgaagtcagtactgaaaaatattcacgaaacactgggtaatgccggatatttcttcattgctttccatgcggcagcggcgttgcttcatcactatgtccagaaggacaacacactatgtagaatgcttcctgatcacaacaagccgatttaa

SEQ ID NO: 293181 - DNA, 1149 bp, Morganella morganii
atgtttgaggcgatccagccattggatatatacaataagaacatcaacatactgattggctcaggcgcttcagcagacttgttcccgacgctgtccctagccatcaagaatgcagagggacggcgagaaacgatcgaaacgctcgccacacagtttgaaaactcgccagagaagcgaaccgcgttattcatgcactactacaacacatgtatttttccagtgcagacattcaatccaagtttcgttacaacgaataaaggaaaagaaaatctcaagaattatgagatttttttaacaacccttttggggttgttggatagaaggaaagacctcaaccgcaaaatcaatatttttaccacaaactatgatggatgcctgtcccatacagctgacagccttctcatgaagggatcacatgattttgtggtgaatgatggtacctccggatttcacacaaagcatcttcattccaaaaacttcagtacgtttcaatgtcaaactggagtatttgaacgaagcaactatggcatcccgcagctaaacattatccatcttcacggttcggtttactggtcaaaaagcggtgataagattgaagtcaattaccgcaatgattttagtaaccttttgacagaagagacactcggaaatttaaatggatattccgaatttcttggtgtcgatggcaacagaactgaaggcattccatccttggcattcagtcaagaccagatagatattttctggggggagtacaataagctacctattgtcaaccccactaagtggaagttttacgaaactgtcttcgaagaacactactaccagatgctcaggctattaagctatgagcttgaaaaaccaaattctatactcataacatttggcttttcgtttgctgatgaacacattctcagacttatccaacgctccctctccaacccacaacttcatacttttatttgttgttatagcaacaatagtgcaaatagcatgcgggaagaattcaaatcttggaaaaacgtccaagtaattgggcccgctgaagatatgaatatggacttcaccaatttcaataaatatgttttctcactcacgccagacacttatgaacctccattaaaagctgaagaggaggatctgatatga

SEQ ID NO: 293182 - DNA, 1131 bp, Morganella morganii
gtggcaattactgtttattcgaggaaatttaaaagcgaactggataaagagcaattagaaagcttatatcttaaaaatgtctcaggcaacttagatgattttcgaagattcgtatatgaagatgcagaatgcccgatgtgcaatgttacaggtgcatattatgtatctgaaggttattcaaagataactagtaaaaaggtaaaacaggcacacttcgcatttagaaaacctgacggtacggatgcacataaggttttttgtgaccattatgttggccctgacaaagtcagagattcggggggggacgctttcattaagttcagaaaggatggttcaaaagttacgatattagtaagagaactggtttgccggggcattgaatataaggtcttcaaccagactgatatcagaaacatgagaaagtggtttgcggaactacgtgagtcaggaaatactattataaattatagcccgcatgttattaatcttctcagagcattattttatagtcggggtgatactggtaagtatgaaattcaggatgggatacaacatgaatcatggtttaatataaataatgaagtttataaatcactaatatacaaatatccatcgttatttaatcttagtttgaaaactacagaaaataggccgctcagttatttgtatgataaaagattggcacaccaggcacatcggattgttataaaagataaaggagtaagagtatttgatagacgagagttaaatgataagtatgtggcagcaatacgcttatcaaaagtaataatcaatcagtatgattttctcagaaaaaaattcactacttcgctttcaattatgaggaataatcagctacttgctatctctgcactgtttctatttgtttctgactggaatgaggaaatagctagagagaagtttattatgataaacaataccggcgcgtcgactatgtctgaagctgggaatgttattggtatgaacccattcattcattatgatgcatggaaaataattcattgcattcaggatttgattgattcattacctgattttgctaatcttgatgaagagtttcaggccgaaaagcagcgactatctgaactttacggattaaacaataaatag

SEQ ID NO: 293183 - DNA, 297 bp, Morganella morganii; identical to SEQ ID NO: 279968

SEQ ID NO: 293184 - DNA, 636 bp, Morganella morganii
atgtgggggttatcgctcagtaatttagatttaattaattctgttatcgggatactcagtgctgttatgggggctttttggaccatttttaaatatggatgccgacatttgaatttgaggaaaaataggcaattaaataaaaacaaagagtatttagataaatatggtgaatttttaagtgaggaagataaagaatgtataaagaaacgtataaatgctgctgttatgtctaatgttttacaagagaagaataaaactcttagagacctaaagattcttttttcaaagagtgattcaataccggaagccaatgtctggtatgtattaaagaaattaagaaggtatctttacattaaagatggaatcctgtcgataattttagatagaacatattttttcaattattggtttgaaaaagtattttcgattactttggctctttggggttttttacttattttggctgtgtacttaaataatcgagaggcttttgaaacctggagatattatgttttattagtggtggttttttctatcttagttgtttctatcggtttgttcacaaattcccccggtaaaaataaaataaataaaactattaaaatagttaacgaaatgatttcagataataaataa

SEQ ID NO: 293185 - DNA, 336 bp, Morganella morganii
atgattgaaattttcacctggtgtccccgtgttaatcccacggaggacatcacctataaaacccgcagggcgaagttcggtgatggttatgagcaggtgtctggtgacggtattaacgcccgcagccagaagtggtcactggaatttactggtcgcggggagtatatcgcggctatccgtcagtttatcgaccgtcacggcggcataaaggcttttcagtggaaacccccgcttgagccggtcggtctgtaccggtgcgacgagcataagctcaccccgctcggtggtgacaactattcactttctctcacttttactcaggcatttaaaccatga

SEQ ID NO: 293186 - DNA, 459 bp, Morganella morganii
atgctgattaaaccgaaagaagttcagatcaaagatgtggacggtattgagaagacatttatcatcagccgcctgcctgctgtgaccggccgggaaattctcgccaaatatccgttgtccaacgctccgaaaatcggggactacgagataagcaaagaggccatgctgaaaatgatggcgtatgtgtgtgctgtggctgacggtgaggaaatcccattaaagacacagacactgattgataaccacgtacccgatggtgaatccctgatccgtcttgaactggaaatgctgaagtacaacaccagttttttcgggacaggcgggagctccggcttcctgccattcctcatcagcaaggtcggcagttcactcccgtcagttataaaaacgctgatggcttctttgcagtcatcctcagcgaaggattcgccaccctcaccgaactcaaaaccacagtag

SEQ ID NO: 293187 - DNA, 417 bp, Morganella morganii; identical to SEQ ID NO: 292691

SEQ ID NO: 293188 - DNA, 654 bp, Morganella morganii
ttggggcgtgttgccgaatctgatttacagtcccgccgccgccggaaactgacgctggcaaaaaacactgtcagtgtcggtgaggcgattacctcggcattatatgagctgaatggtgttcgctcgctgtcataccgggaaaattataccgataccccgatgactttagacgggattacgctggtaccgcacagtatatacgtgtgtgttgagggcggggaaagcggggaaatcgcccgtgctttgttgcgtactaagacgatcggggcggcttttaacggtagtgaagagattaatgtaccggaacccgtcagcgggcagacctacactgtgaagtttgaccgggcaaaagagattgtattgttctgccgcgtgacggtgaaaaaaacatcattggatgcgcagactgtcattccggcggcagttgagtcatgggcgttgggggaaacggaagtggatgatgggttagcggtcggtcgtgaagtttctccgtttgaaatatcggccggtattaacgctacagaaccgcagctttttgttttccgcgtggagctttcaaccaacggcagtaactggtcatcggacacattccccgtaaagttaaatgaagtggctaaaatccaccgcagcgcggtacaggtagcgtttgtatga

SEQ ID NO: 293189 - DNA, 354 bp, Morganella morganii
atgtctctgtatatctattgcaccctgtccaacgaccagaactatgccacaccggacggtccggtatttatcgccggtcaggccaatgtcatgaccaaacacatgtacaccccgcgtggccgtgtgactgaaatcagtgatgaacagtacacgcagctgaaaaataaccacgtctttaagctgcataaggaaaacgggtttatcgcggtggaaaaccgcaaagaggatccggataaagtggcgaccgatatggaagccagtgacaaatccgccccgctgaccgaagaacaactgattgcggaggggaatgagccgccggtcagcaacaaagacaaaaagaacagtaaaaaataa

SEQ ID NO: 293190 - DNA, 429 bp, Morganella morganii
gtggacccgtccgactttccgttagtgtctttccgtgccatctataaggctttttccgcagtgcctgatgatgaaatttttatcattgcactggaagcactgaactacttctccccctgccgtggtgtctgcacaaattcggcgtggatgctggtcgtcgcgcatatgcttgacctaaaccggcgaattgctgacggggaatcaccgaccggtgtcgtgaccagtgtcacgattgataaagtcagcgtgtcctacaccgcgcccccggccggttccgactggtcgcactggttcaagatgagtacctatggccagcagtttctggcgctgatcaaacgatgcagtgtaccgcgttaccacggcggcggcggggaacgggcggcgtttcgcggcgcgttcgggcgcttcacgcggggaggtcaccggtga

SEQ ID NO: 293191 - DNA, 192 bp, Morganella morganii
atgcgcatgtctgacaaatattccagccctacagcatacgcctggggacttataacctctgcttttggcgttttatctctggaccagtgggctattgttgccgggatcatctgtactgtcgggacgttcctggtgaactggtattacaaacggaaagaattccagctgaaagccggagaacatcatgaataa

SEQ ID NO: 293192 - DNA, 168 bp, Morganella morganii; identical to SEQ ID NO: 281798

SEQ ID NO: 293193 - DNA, 624 bp, Morganella morganii; identical to SEQ ID NO: 277252

SEQ ID NO: 293194 - DNA, 402 bp, Morganella morganii; identical to SEQ ID NO: 277819

SEQ ID NO: 293195 - DNA, 1431 bp, Morganella morganii
atgaataccgcatggcgcaatgatttacaggatgcctcttaccgtggtgtgcgttttgatgtggttaatgctcaggacagtgtttcccgcgatacctctgtacatgaatacccgttcgttgatggcggtgacgttattgatctgggccgtaagccgcgtaatttccgttttaatgcgcttttctggggggatgattaccggactcatctggataattttgttgcggcactggaggaacccggctacggggagcttgttcatcctgtctggggttctgttgaaaaagcaaagtgcattgaatatcaggtaaagcacgaagcggaaggtgtcgacacctgcacggttgagctggttttccttgagggcaccaccggcacggttatcgcgcagtcccatccggaacagctcggtgacagtatttttgacaaaatcggtgaactcactgagcgggccgctgatctgtttgaacaggtcatggctccggttaacgaaggtctgcgttaccctgaaaaaggcaaagcggctttatccggcatgaccaataccattaccatcatgcgcggtgatatcagttctgccgtcagtcaggggatcagttatctgacttatccgcgtgcattcatcagtgacatggtggccgtgacggacatccgcaccggcggcatcggtgatttactcgaccttaaatacggtgatgtggtgaatacctcatccggccgctcaggttcgtcaccgctctcctctgcggttccccgcgtccagactaacggttaccttcccgatggtgcgtatgcaccgtcagtggcgcagaacggtgtcagtgccaccacactgctgtctgcgtggagtgactgcgtggcggttgctgatgaactggtctcgctgccggtgcagctggttcagggggaacgtgaggggccggtgccgatgccgggtaatgcacagcctgatgatgtccgtgatctgaccaccgccggttatattattgcatccggtacgctggctgccgtggtgacacaggtactgagcgatgatgtccagcctgataatctgtcgccggatgatatcgaaatgctggtcactaccatgcgggaatacacacagaaagccattgatgaagtccgtgaccattatggtgaccggacacagcagctgagtacggacagtcatcctgtggggctgctgtggcataacgtggtgtcacaactgaaaagcatcgcccttgatgtgcaggatttggggttgctggtgattacccgccgcccgccgctgacccgccggacagtggccgcagccgccaatctgcacttgctggcacatttctggtacggggattattcccgtgctgccgaactgtaccggctgaatccgcagatacgtgatccgaataacctgagcgcgggagatgttatcaatgcctatgccaaatga

SEQ ID NO: 293196 - DNA, 243 bp, Morganella morganii
atgaaaaccgatgccctgccgaaagagtttgtgccggattacgccagacctgtcagcgatgatgtgattgcggggctgatgctgccggtgcgtgagattgaaaccctgctgaaaaatcagcagaccgccccgcagccgatagaggttcgttccgtggtggaactggacggccatgtgattgcagaaaccgtgaacaatattaacggtaatgatgccggacgaaccacaggaggcggattatga

SEQ ID NO: 293197 - DNA, 429 bp, Morganella morganii
atgtacgcgacgaagaaagacatgattttagcgttcggtgagcgtgagtgtgtctccctgactgacactgagcaccccggtgatatcagcgatgaagtgatggatgccgcactgatgcgtgcctcagctgaaattgacggctatctcgtcgcgcgttaccggacaccgtttacggataccgcccgtatcctgaccggccgctgctgtgatatcgcccgttaccatctggcaacgtcccaccgtcttctgtctgaggaaatccggttgcgttatgaggatgccatccggttttttgaaaaggtggcggaaggccgtatcggactgggccgcactgacagcggggacattattcagtcctcgccgcagatgaagttcggcagcagcaaccgccagttcgggcgtaactcaaccggcggaggtgcattttga

SEQ ID NO: 293198 - DNA, 909 bp, Morganella morganii
atgattgtaaataaagcaaaccttaccccgctgtttaccggcatcaaactcgtgtttaacaacgcgctgaaagaagcagaaacaacgtgggaaaaaattgccatgaaagtaccgtccaccggtaaggcggagcagtacaactggctgaataatttcccggcaatgaagcgctgggtcggtgaaaaagcggttaaatcactggcggcccataaatacaccatcgagaacgatgactgggaagccacgattgaggtcgaccgtaacgatatcgaagatgatcagaccggtcagtatgccattcaggcaaaaggtgccggtcgttctgcggcgatgctgcctgatgaaatcgtgtatgacctggtgaatcagggttttgagcgtacctgttatgacggccagtatttctttgatacggatcaccctgtcggcagccgctctgtgtccaacaaaggcacgaaaaaactctctgttgagtcactggtaaaagcacaggcttcatttggcgctgcccgtaccgcaatgcgtaaggtgaccgatgaggaaggccgtccgctgaatatcaatcccggggtgctgctggtaccgcctgccctggaggatgtcgcccgtgccttaatgacggttgaccgtcttgaggacggtaaagccaatatctacaagggggctgctgaagtcgtggtctccgcgcgtattcagtcggatacacagtggttcctgctggataccacccagccggtgatgccgttcatttatcaggagcgtaaagcgccggtactggttgaacaggtcagtcttgagaatgatgacgtgtttatgcgcaaaaaattcaagttcggtgcggaagcgcgtgctgcaggcggttatgccttctggcagctggcttacggttcaaccggggaggaagcataa

SEQ ID NO: 293199 - DNA, 231 bp, Morganella morganii; identical to SEQ ID NO: 277845

SEQ ID NO: 293200 - DNA, 231 bp, Morganella morganii; identical to SEQ ID NO: 277845

SEQ ID NO: 293201 - DNA, 234 bp, Morganella morganii
gtggtctccgcgcgtattcagtcggatacacagtggttcctgctggacaccacccagccggtgatgccgttcatttaccaggagcgtaaagcgcctgtgctggttgagcagaccagcctggagaatgatgacgtatttatgcgcaaaaagttcaagttcggtgcggaagcgcgtgctgcaggcggttatgccttctggcagctggcttacggttcaaccggggaggaagcataa

SEQ ID NO: 293202 - DNA, 300 bp, Morganella morganii
atgtcagggttgagccaatcaaagttaataagtcggttgcttcagtggatcagcagtgcggcactgttacttttggcaattatattgattgtttttttgataaaagaaacaattatccttgctgctttgttatttaaaaaaaatgacccggtgtcgctgtattcattagttgatgggataattatatatttattaatcgtatattcaattacaattctgatattagtatttgctctttatgtagctaatactgaaaaaccaattcttaaaagaaaaaaggtaaactgcgaagctgagtaa

SEQ ID NO: 293203 - DNA, 192 bp, Morganella morganii; identical to SEQ ID NO: 278134

SEQ ID NO: 293204 - DNA, 477 bp, Morganella morganii; identical to SEQ ID NO: 278133

SEQ ID NO: 293205 - DNA, 129 bp, Morganella morganii
atgctgaaaaaactctcggatatcaaactgatggcggggaactgtaataagataaatttacattattttattattcagaaagcactccagccggagtgctttctgattattacaattactcaaaaataa

SEQ ID NO: 293206 - DNA, 150 bp, Morganella morganii
atgcttggtgtgctcccggcggctgtcgtcacggacccgggtctgacaggcaaagaacgggtaaaagccttctttctgcaggctctcaagcagggtaatggtgggaatataggtgtaacggtcactgcgggattcatgtttttccgctga

SEQ ID NO: 293207 - DNA, 255 bp, Morganella morganii
atggggcgcacagtggatgagctgaccagaacgatgagcgccggtgagctgaccatgtggatggcctttgaccgcctcagcccgatcggggacatccgcagtgacatacagacggcccatattgtctcatcgctgtacggcgcacagggcggcaaactcagcctgaatgatgcgatgctgcaatggggaaaaacgggtaacggtgaggcagatgacgggctggagggttttctgaaatcggtatctgaaacctga

SEQ ID NO: 293208 - DNA, 159 bp, Morganella morganii
atgccacggaaccctttaatgctgatcatcattgctatcatcctgctgactactgctctgttggcgggttgttatctgtattcactcccgaatcactgtaagccgctgccgggtaacccgctggacggtgtgatccattatgagtgtgaagcgctatga

SEQ ID NO: 293209 - DNA, 255 bp, Morganella morganii; identical to SEQ ID NO: 293207

SEQ ID NO: 293210 - DNA, 420 bp, Morganella morganii; identical to SEQ ID NO: 151712

SEQ ID NO: 293211 - DNA, 447 bp, Morganella morganii; identical to SEQ ID NO: 13744

SEQ ID NO: 293212 - DNA, 1053 bp, Morganella morganii; identical to SEQ ID NO: 151714

SEQ ID NO: 293213 - DNA, 318 bp, Morganella morganii; identical to SEQ ID NO: 10871

SEQ ID NO: 293214 - DNA, 252 bp, Morganella morganii; identical to SEQ ID NO: 16616

SEQ ID NO: 293215 - DNA, 234 bp, Morganella morganii; identical to SEQ ID NO: 10869

SEQ ID NO: 293216 - DNA, 1713 bp, Morganella morganii; identical to SEQ ID NO: 151718

SEQ ID NO: 293217 - DNA, 288 bp, Morganella morganii; identical to SEQ ID NO: 10867

SEQ ID NO: 293218 - DNA, 1026 bp, Morganella morganii
atggctatttctgcatatattggcatacccggctcaggaaaaagttatgaagccgtttgcaatgtcattattccggcatttaccagcggccggagagttgtgacgaatatttatggtttacaaaaagataaaatcaccgaacgttatcctgatgcaacgggagaaattattgttgtggataatgatgatgtgcttaaagcagatttctttccttttaaaggtggggatgggagcttttgccagtttggtgatttaattgttattgatgaagcatggcgaatcttcggtagcgataaggatatgacggctgagaagaaatcatttattgctgaacatcgtcattttacgcaccctgaaacgggtattagctgtgatttggttattgtaaatcagtcactttctaatattgctcgctttctgaaagacaaaatagaaacaacttaccggatgcgcaagctgaaagcgttgggcctgaataatcattactgcattgacgtatattcaggccacaaaatctataaaagcaacctcgtcaccagttatcgcaataaatataaccctgatatttttgaactttacaaaagttatgaaggaaataacggtaatgaaaagcagacagataaacgccagagcatctggaattctggcaaagtcaggttctttcttgtgctttttccattgatgtttatcgggtcaggctggctgatttactcatttttcagcacgtttggccgaagcgatccctcgccagatttgactacaacagatgtacgtgatgcggccatgtttcgttcttccgctgctactccagcaccagatactccctcagaaccagctgaaccgccactttcaaccgagtggcgtatatcagggagaatgaccagtgaaggcagggcgtttgtgattcttgttaacggtgccggtgttttgcgtgccgttcctgcatccagttttaattacaaagggatgttgatgagcggaattattgatggtgagcgtgtgacgctttatacggggaaaaaatag

SEQ ID NO: 293219 - DNA, 1245 bp, Morganella morganii; identical to SEQ ID NO: 151721

SEQ ID NO: 293220 - DNA, 249 bp, Morganella morganii; identical to SEQ ID NO: 11349

SEQ ID NO: 293221 - DNA, 864 bp, Morganella morganii
atgagcgatatgatactgaaagccccttccgcctggcggacactgagccgcaatcttttgttgtggtttgcgctggccgtggtggcactgctggtgctggccatgattgccgggccgtggatctccccgcatgatccggatctggtggagttatcaaaccggcttcaggaaccggatagtcagtactggcttggtactgaccatctcgggcgtgatattttttcccgtctgattgccggggcgcggatttctctcggcactgttgctatcacgctggtgattattatgacgctcggactggtgatcggcggcattgccgggtttaccggcggacggacggatcaaatcatcatgcggtttaccgatgtgttcctgacattcccgacactggtactggctctgtttttaatcggcatcctcggtaccgggctgacaaacgtgattatcgcgatcgcattgtcacactgggcgtggtatgcgcggattgtccgcgggatcatcctctcgctgcgccaccgggaatttctgctggcggcacgtctgagcggagccggtaatgtgcggatctttctccggcatctgtttccggccaccatttcccagctgatcgtgctggcgactctggatatcggccacatgatgctgcatgtctccgggctgtcattcctcgggctgggcgtggcggctcccaccgcagagtggggcgtgatgatcagtgatgcccgccagtttgtccggacatcaccgatgctgattttctggcctggtttaattttatttttcagtgtgatggcgtttaacatcctcggggatgctctgcgtgatcgtctggatccgacactgagggccgggacatgtcattaa

SEQ ID NO: 293222 - DNA, 270 bp, Morganella morganii
atgttttcaaactctttttctggtttactttccatgttttccggtaaatcacttgagtcatcagtcattaaccctttcccagataaaccagaaacaaccatagcactgacagaacgctctactgcttgtttaaccaatggtgttatcgagtcaataaatcgttggttaagttgtctttcaacattagatctgctagcgacatatctgacaaactcactgtctacatctcttaggcttgagctaattgtctttgtaaatacagaaagataa

SEQ ID NO: 293223 - DNA, 300 bp, Morganella morganii
atgattggtttagtcggtaaaaaagtgggtatgacccgcatcttcactgaagaaggtgtgtcaatccctgttactgttatcgaaatcgaaaataaccgcgttactcaggttaaatctgacgaaactgacggttatcgtgctattcaggttaccaccggcagcaaaaaagctaaccgcgtgaacaaacctgaagcaggacatttcgcaaaagctggtgttgaagctggtcgcctgttacgtgaattccgcctgtcagaaggtgaagagtttactgttggccagaacatcctcgctgattga

SEQ ID NO: 293224 - DNA, 867 bp, Morganella morganii
atgtcttgtactgtaattgcaagtgatcatgatgcaactaccgaaggttcttttgtaaagatagatagaatattagcaaataaaaaaatatccatggtgctcttgattgaaggaacaagaattcttgataaaagtaccatgccttccataagatcagaagatactgacgggaaaacatacctttcaaaagactcagtgccaccgagtgcaggttcttttatcttaggtggtgctatttttgctgcatttttcagttatatggtcatcagtatccaaacagaagacaaccctctcgcgggccccttgaaagcatataactacatgatttataacaatatgtacaattctgggctttcgattaatcctataggcaatggactgataactgaaaattacaatctaagagcgaatgaataccctattgaaataatagatgccaagatagaaaaaaatcaaataatgttcaaatttagaataattaacaaaacatcagaagtactgaaggtttcaggcggatggagaatatataaaaactttcaatatatttccgaacatgttgatacatttgattataaagatgaaaagaaaagagatgatgaagaaataagagtgtataaaaaatacaatgttgaatttgttaatgataatggatatcttatggaaaaaccgaaagaaagggttgaggttcctgcaaattcagttggctatattataataagcagaaaatactctccaagcattacttataatgacctaaacatcgagtttaactttagtggtggctcaggtgaaatataccaagaagcagatatgctttttacagctaagaattctaatataagcagtgctatattagacaaaaaataa

SEQ ID NO: 293225 - DNA, 990 bp, Morganella morganii
atgaaaaaccctaaactccagtacctcactgattattccccctctgacgcgccctgggacgcacacagaagcgtttctgacgacgtgggagggatttacctgcttgcggccgaatatgagcgctacggggctcgtatggcctcctgtggcggtttactgcgtttcgggtggtctaccctcaaggaaaccggagaaacgcgtctgaggctgcgtgaggcgcatttctgccgtgtccggcactgtcctgtctgccagtggaggcgctccctgatgtggcaagcccgtttctaccagtccctgccgcgtatcgtggcggattaccctgatgcccgctggatgttcctgaccctgaccgtgcgcaactgtgcgattggggaactgggcgagatgctgaaccggatgaatgcagcttttcagcgtatgaaggttcgcaaggagttcctgcctgttcagggctggatccgcacaacggaagttacccgcggcagcgacggcagctcgcatccccacttccacaccctgatgatggtgccgccctcaatgctatctggtgacgggtacgtaaaacatgctcgctgggttgaactctggcgggagtgcctgcgggtcagttacaacccgaatgttgatgtccgggcagtaaaaccccgtaagccaaaggatggcgagtccttagcctgcgcgaccgctgaactggtgcgcggcgcagtggccgaaaccctgaaatattccacgaagccggctgacatggtggccgatcctgaatggttcctcgaactgacccgccagacgcacaagcgccgctttgtggcgaccggcggcgcactcaaagacgtgctgaaactcgatcaggaaaccgacgtcgacatggtgatcggggatgatatttccgagggcgacgatgacggttcacgcatcgcgttcgagtggaaaactgaggtcagaaagtaccgtcgctcaccgacgaaagataaaactgaatcaggctag

SEQ ID NO: 293226 - DNA, 954 bp, Morganella morganii
ttgaaaaaaaacaaagctggtaatgaaaagctcattccctgtttttcaagagaagaatgggaaaacacaggactcgattttccgtcatcagataatgatgataccggtggctgttttaatatcaatgacattgaatatacgcatggctatctcgaccttaacacccggatttatgcactgacaacaccacagtcatacattaataaagataaactggaagcattagagcaggaaaactgggataatggtatccctgcactttttgttaactatttattttcggcagtaaatcgtcaacacaatggcgaaacaaaagacagctattatggaaatatccagaccagagtcaatctgggtgcatggcgttatcagaattattccacctggatgaatgatgacaataataaaaacaaatggaaaaatatcagtaataccttatcgagaaacataaattcactgaaaagtgagtttactgtcggtaatctgtattcatcatcacagttatttgattctgttaaatttcgtggtattcgtctgacaacagacagaaccatggatccggtcagtaaaacaaactatgttccgtcaatttccggcatggcaaattcagaagccgttgtcactgttgttcagaatggtgaaattatcctgagacaaagtgttcctgccggtccgtttaatctcaccgaatattacccgatgagtaatggcggaaacctgtatgttaatgttaaagaaactgatggtagtgagaaaaatttcatcgttcctttctcttcaatttccacactggaaaagaaaggaaatatgcgttacagcatttccggcggaacctatgacagcaataacaaaggtaacggaaagaaaatcgatcaggcagaaatattttatggcctgaccgattttgtcaccgttttcggcggagcatttgttgcttctattctcttcgagtag

SEQ ID NO: 293227 - DNA, 201 bp, Morganella morganii
atggcatacgtttacaagactgtacagataccaccgaatattgaaatgaataagcgcgaggccggtaacgaagcggccatctatcttcaaagcgtactgaacgaaaaggcagaggacggatgggagtttcaaagcgtggaaaccattggcgtggcagtaaggcctgggtgctttgaatcgctacgcgttacagaacaatag

SEQ ID NO: 293228 - DNA, 198 bp, Morganella morganii
atgaaagaacctcacatacaccagcttctcaccaatgacgaagccgataacctctgtgctcactacaggcgtaaaggatataacccggtgaagtcactgaatatcaatcctcagtatttcgacgttaccgtgtatctgccggtcgtcaaatatctgaaaccaacaccacgagcaatggttaacaggatgtggcgatga

SEQ ID NO: 293229 - DNA, 222 bp, Morganella morganii
gtgatttttaaattcactcagtcagatgaagaccgcgtgaaaatatctcacaaactgaaaatggttacaccgactaagcgcggtaaaaaatcggaagaggatacaaccgaaacaccgatgtgggtcggtaaaggcgggaaactcactattctaccggaagaccaagggcagttatttggtattgacggcagtatcgacgggaaattaaaagccattaattaa

SEQ ID NO: 293230 - DNA, 492 bp, Morganella morganii
atggttcacagtaataacctgccacgactgattcatcgcatccgacggatggtttttcagggtgaagattttacccggcatcagggcaaagcagttagtgcctgcggtgccggtctgacgctggttctgagattgttcgtagcgcagttgcgtgaatggtttacctgtctcgtcgtcgcgatagcggccatagctttcatacaccgggtgctgtttatgcacgttgccggtgacttcatgctggaacggataagacgggctatccgggttgtaatctttctggataatgacatcactgcacaattgttctgcatagcgccaggagaacgccgtgctgtcactgatatcggtatctgcctgcgggttataagccaggtctattccggcggtcatgccgaggtggttgtcgctgtaaaacagtttcgggccttcctcgaaccagaagttaattccttcctcaaaggccagacggcaccagaaatcaaaggctga

SEQ ID NO: 293231 - DNA, 249 bp, Morganella morganii
atgcagttcgtcctgataaaatttcaggtcatttttgacatgcgcttcatccagaagcgtggcgagaacttccggcacggattgtttctgaaagatacggctgtcctgattgagggtcatgatccacatttccgggcggatcagaaagtgataccaggttttgttgccgtcagtattaccctgttcggcagaggccagcagcccctgcacggtgcggactttaacgccgtcacgggtcacggtcagtga

SEQ ID NO: 293232 - DNA, 141 bp, Morganella morganii
atgtggcataaaaaaggatcatcagcatcgctgctgatgatccgtgatcgtctcttctttatatttatcagtccgcgtgacgcgatcctgtttctgtcaggcgttcagggcagccacgcttttcgcgcatttatcctctga

SEQ ID NO: 293233 - DNA, 435 bp, Morganella morganii
ttgcgtataaaattgtgtataactgagttcgatcttttttctatacacatgctgctatctgacatccaaataaaacgagcaaaaccaaaggataagccctacacgttgaacgatggcatggggttatcactacttatcgactcagcaggcagtaaaggctggcgttatcgctaccgctttgcagacaagcccaagatgatttccttcggcgtatacggtgatgtatcgcttgctcaggcgcgtgctaaacgtgacgaagctcgttcgatgcaggccaaagggttcaaccccagcgaggccaaaaaggccacctggtcagaagggtactcgaaagaggctctcaactgcatggaaagaatattttccctttcatcggccaacgcccaatcgaacagattgaaccgctggagctactcaccgttctgcaaaagatag

SEQ ID NO: 293234 - DNA, 255 bp, Morganella morganii
atgagtgaagccagcatcaacaaagtgataaagctgcttggctatcatggtcggttaacgggtcatggcttcaggcatactatgagtcccatcttgcacgaacacggatttgagagtgcatggattgaaatgcaatttgcgcatgttgataaaaacttaatccgcgggatatataatcatgctaactatataccccaacggaaaaatatgatgcaatggtactccaattatattaattccttacagaatatctaa

SEQ ID NO: 293235 - DNA, 2139 bp, Morganella morganii
atggtagataacaaacggaattcgggcaggaaaattgaaataaaaatagaaatggatctggattcttttaatttagttagcagtattgataatccaagtgaagtggataaggttcaatctaatattcatagggctattgttaaatcaataaaagatgaattcctcagtaaggctgatactcttgttgacgaagttaatgctttaattgatgaagagagttatagcgatgcgtacgagtatttgtttgggaacggcttaatattcagtaaggttgaagatgtccgtatattagattcaatcagtcttcttctagaaaaagagagtaatatctatagaaaaactgaccttttagctgtcaaacttcactttatgtttatgtttgaattgtatgaacaagttcctgatgttgtagatgacattttaaatagattcaatgatgagtttgatagtgattttataattaacgttaaccttgaaaaagcagaagcatatagattgcaaggaatggataatatagctcttgctatatatagagaagctatttctaatacgtcagatccagaaataaaagggtattgttatcatagtatatctaaattgacaaaagaaaataaggaaaggaatcttgagttggcatcagattattattctatcagtgggaattctaaacaaagaattagatgcttgcgtgatttgtcagaatatcactttggtattaacttccaggattcactggttagtttaaacaaagcattggaggtatatgtttctaccactgaaaccttagagagagaatattatgctgaactcctacataaaaaatctctacttttattgacgatgagggattttaaatcagctattgaaccgatatctcaagcgtgtcagctcagaaaaggagttgtgggggtagaaggaaaatattatgtaactttgaaactagcacaggatattagctatcatttaaaggactataaaaaatcggaggagtataaacgtgaagctgaggaagtgtttgagtttgtagatgataaaaatattatgttacaagaggaggtgtttacttttattaccacaaaacaaactccaaataaagaaatggagtctaaggtgatgcaatcaaaaaatccttatttatgtaagaattatttaatatattgttctcaaatattagacggaaattatcatcaaaagttaattgttctggataaggccctttctattgaatcagaaggggaggtggatgatttaatatataatgctatagctgatgtttatttggataatgaaaaatatgacgaagcgctgcaagcatttaaaaaatcattggaaattaatccatataatattcaagtatatcaacagtgctgctattttttgaaaattaatgaaggttggagcgatattagagagttattgcttcctgctgagaataagattgggtttagacctaacataaactatgtgcttgccgaagccatgtttaaccttgggcaatttgaacaggcattaaagagattcgtacaactgaaagggctcagtgatgtaagcccagataaaattaatgattatattgggcgttgcatttcttctttaggcccagaagaggtaagtcaagcttttaaagagcagaaagaaattgtaagagagataagcctttcagaatttgaaaacgcaatatctgaattctccaaatcaattgcgtcagattcaagaatgagcttctggaagagagataaggaaagtggtagctataagtggatcaattcaccagaagagcactctaaacagttatttatcgcatttatgaatggtaaatttggacgtggcagcattgaattaattcaagaaccacgtgctggtgctggttttattgatctgtacgttatattaagtggtggtttgaaagtggtcgttgagttaaaaatgtgcggtgaacgatatagttcaacgtatgcaaaatcaggttgcgatcagattttgcattatctagacaacaaagaaactaaagtcggttacttaattgtatttgattctagaaaaaaagactatgcaactggattcaaacgtaaagtgttaattgataattacaatataataacagaagtagttgatgttagatattctgtaaggaattaa

SEQ ID NO: 293236 - DNA, 501 bp, Morganella morganii
atgttgtttttatttgttttgacctatacacttagatatacacatgaattaaagcttgtgtttctactagggctggaggcattctcaacgcctccagcctccagcctccagcctccagcctccagcctccagcctttgcttacaaaacctttaaatcaacgatgttacacgttcagaggaaggggaagggaaccaaaattcctttctctggcaggcaaaagaggaacaatgatgcgagtgttgaaaattttatgtccggagtgtgcatccgtggccgcagtgaagaaaacgaacaggaaacaccctaaattgtcagatgtatattgctattgctcaaatgttgagtgtggacatacgttcgtaatgaatatctgcttttcacacaccataagccccagcgctctgagctgtcagggaagggtaaaagagctaatggatgctttgccaccggacgagaggcaaaaggagttagagctactgctggaggctcaaggacgttaa

SEQ ID NO: 293237 - DNA, 672 bp, Morganella morganii
atgattgagattaactggggttttgttgaaaaggttgtttatattaacctggaaaaaagaaccgatcgacgggaaagcattgaattccagatgaaaaaaatgggcattcctccggataaaattatccggtttgaagccattgagaatgggaatggagcattaggatgtgttctttctcatattgatgtactgaagatggcgaaaaaaaacaactggaataatattcttattttggaggatgatatgattttcaatgatgatgatgaatcatcggagagaataaactattactttgatagtcttaaatcggtatcgtgggatgccggattgttatccggaagctatttttggcttaaaaaaatacatggctgtttttatcatgtccggtattcatacttatctaacagctatatagtcaatatgcattattatgataaattaatcgatgtttttttattatcagctgataatcttatccgggaaaaagacagaaatgattgtggcctggatgtcagctggaatacactaatgaaaaaagatcgctggtatgctatttatccgagcgttggttatcaaatgaccggggtcagtgatattgagagtgaaataatggacagagaataccattttaaaaggccattagaagatatatggccgacacgtaaagagtaa

SEQ ID NO: 293238 - DNA, 564 bp, Morganella morganii
atgaggttaggaacgtatgaacgaccaaaatactggggtgttgatggtgttatcggtgatatctactactatccggattatagattattctttagattaaaatataatggcagtccatctgataaaaactggtattatccgaaaaaagaagtcaataatcagttctgggattgggttgggtgttaccccggaacgatgtcagagcccaaaacttggcgtgaacccggaatcgagggttgcatttactatgagccggaatatggttatttacgtttgaaaaaagacggtaatccgtctgaacataaatggtattttccatctgatggcaactcaaatgaatattgggattttatcgactttagggcaggtaatcctgtggatcctaaatcttgggatgtagatgaaggccaggaaggtgattatttctatagtgcgagactgaattctttttttatttttaaaaaaaatggtaagccatcttcttttaactggtattttccggaaaatggacaggataatgcttattggcactatatgggacctttgaaaaaaaatgttggctga

SEQ ID NO: 293239 - DNA, 249 bp, Morganella morganii
atgaatagtaaaaatgttgagctgaatgctgccaaagaaaaactggctaaactgattgatgatttgatcgtgttagagcgtgaatacgacaaagcgcttgaacatgctgcaagctatcttggacatgatgagaatatagaaaatgccagagatgaaagggctggaagtgtgttcaagaatatgaatgaagttaaaaatcagataatgaatcaaactaaattcattgaagcgctagtaactgattattga

SEQ ID NO: 293240 - DNA, 231 bp, Morganella morganii
atgcttttatctaaatatgcacttttaattatcgatatgcagcaggggctttttcatggcccggtttccccgtattctgcaaaccaggttctgtcaaatatttgtctgctgattgaaaaagcccggcaggcgcaggtgcctgtttttttttgcccggcacacaggccccgacaattcccctttcgcggagcagagtccgctgacacaactgatatacgaagtgaacgttaa

SEQ ID NO: 293241 - DNA, 240 bp, Morganella morganii
atgtgtgaagtaaaaagaaaggatacatttgagtcagcggataacattccttcaggttactatcagttctataaaaacaaactatcctcacctgaattttactttgacaatattattgtttcagatagtccggatgaaccctgtgatatggcaggagcggcatatcgtattgttgaccctgttttgtatgatagtatcgaaaatggtgacattgtatctgtcaataacaaaaaaatgtga

SEQ ID NO: 293242 - DNA, 657 bp, Morganella morganii
atgaaaatgataaagattaaaaaaaacaaggagcctaattcattagtttcatacaaaaaaaaagaaggtgcatgttatgatggtcctgattttacagatgtgaaaaatgacattaaagagtctttactccaagagcaaggctatatatgcgcatattgtatgtgccgaatttcaaagagttcaatgaaagtagagcattgggcgtgtcgaagcaaacatcctgaagaacagttagaatataaaaatttattggggtgctgtaaaggtggtgaagggttttcacctatgcaacagacatgcgatacccataagggaaatttggatataatctattctcctactgacgatgtattttccgtagataattttattagatatactcctagagggaaaatagcttcaaataatgaaaagtttgacttagaaataaatgatgttttacatcttaatgacccaagattaatatcaaatagaaaaataatgttagataaaatacaaaaagagctgcatgagagaaaaggcggtataaaagaaacagaaataaataaattaataacaaagtataaacaaaaaaattgcaatgatgagcaccttgagtattttggagtcatagtatcatatttaatggcaaagaaaaaaaagccaataaataggtga

SEQ ID NO: 293243 - DNA, 645 bp, Morganella morganii
atggatggttattccaacttggaaatagaaattgaaccagtagtcaaacttaccattactaaaaaaaatcataaattaaatatacttcaattatctcaaggtgagaaaagcttgctatcactggtattagatattgcaagaagaatgcttattttaaatcctaacgagaattatccacttcattcaccagggattgtagttatagatgaaatagacctgcatttacaccctcaatggcaaaggaatatagttgaaagtctttatgaagtgtttagaaactgtcagtttattgtatccacccattccccccaagtaattagtgaagttaaacataaacaaatattcatattaactgaaaatgcaaatggaacgattaatacctataatcccaagcagtcttatggattaacctctaatgaaatacttaatgaacttatgagcactgatcaaaagcaattaattaggtcatattcagttgaatgtaagttagatgaaatttttgatttaattgaacaaggaaatattggcttggctaaagatgaaattagtgatttggaatctcaagttaatggagatattccagaattattaagtgctaaaatggagatagaactacaggaatgggatgaaaatgataaagattaa

SEQ ID NO: 293244 - DNA, 450 bp, Morganella morganii
atgaaatggcctgtttatcttcctgttattgttttttccgccacgctgccattcagtgtggcatttgctgatgatgatgacgacgacgattatgaatttaacccggcctttattaaaaactatgcggtcagcggggatgtcgatttacgccgcctgaccaccgataatgatcagatgcccgggttataccgtactgatgtttatgtcaacgatcagaataccgggaaattcctgattaagctggaaaataataaagctgaaaaattgcaggtctacttaacaccagaattggttgattcaatgggattaatcaattcactcgttgatgcctttcataaacaggctgaaacgcaggatgaaaacagctgcttttatttatctgatctgatccctgaatctgcatttgaatttattttcagtaaacagcaactgcatctttctgtcccgtaa

SEQ ID NO: 293245 - DNA, 378 bp, Morganella morganii
atgctcctgcttaccctcaaccgaggtgcggtaccatttcagctgcactttcggcagcatctcaccggcggccagggcgttatacagcagcggaaccgctttattcagtgcaacggtaaatttgaacggacggtgcgctcgctggccggatggctgaccggactgcgggtctgtcggaacagtaacgatatggtcaaactgctgcaccagcatctcatcttcatgaccctgcacatagatgttaccgacggattcagcggtaaacgcaccggcagtgatattgccctgagttttaccttcgatggagatatagcatggagttggcatgataaaattccttatttattaacaggtaacaaatcgttaccggacgagtga

SEQ ID NO: 293246 - DNA, 255 bp, Morganella morganii
atgatgcaaaaaacagcactgacaaacgtcatctgcggcgtacttttagtgaattcaatgacagcgtcagcggcgataagctatctgtatgaaaaggatgttactgacctgactgtgactgataaccgggccggtattaagccgggcgcaggtgatgacgggaagcaaattcccggtcagggcgggatattgttgatcctgatgaaactgttgagtgaattgaaattaataaaggtaatgctgaatttaaactaa

SEQ ID NO: 293247 - DNA, 225 bp, Morganella morganii
atgaatagtatcttcgctcatcttaatggcaaatttagtaggtattacacttggtggtcgtgggatctcgatccacaaggacgaaatagagttcctaataattggggagatgatggttctgtctggtcatctatgaatagtcgagataataacagcatattcgctgcaatcagtgaaacaatagatatattctataaagaaatggacatgaataatttcaaataa

SEQ ID NO: 293248 - DNA, 318 bp, Morganella morganii
atgcggatggataatggtccggagcttatatcactgacactggcacactgggcggaagagcatggagtaatactggaatttattaaaccgggtaaaccgactcagaatgcctttatcgaacgttttaaccggacataccggatcgaaatactggatttttatctgttccggacactgaatgaagtacgggagatcacggaacactggctgaaggaatataaccgggagcgtccacatgaatccctgaataatctgacaccggaagaataccggttattagctgaaaataacgaaatctcaaaaagtgtgtggaactaa

SEQ ID NO: 293249 - DNA, 390 bp, Morganella morganii
gtgatacaggcgcagacagaggcggcagaacgttatccccgttacgggtttaaaaagctgtttcagatcctgcgcaggcaggacaacgtttggaatcataagcgcattcaccggatctattgtctgctgaagctgaactttcgccgtaaaggcaaacaacgtctgcctgtgcgtaatccggcaccactggcaacgccggaggcactgaatcagagctggtcggttggttttatgcatgatgcgttgatctgcggcaggcgtttccgtacgttcaatatcgtggatgactttaatcgtgaagctctggcgatagaaattgacctgaatatcccggcccaacgtgttgtccgggtattagacagaatagttgcaaccgcggatacccggtga

SEQ ID NO: 293250 - DNA, 1263 bp, Morganella morganii
atgagtctacaagcccctttagaatacaataaaatattacgtgaaattatatcatcctcatcaaaaggacatgctataaaatcaatcgatcttgatgaaatagactcaatcctaagagactccttatcgattaaaaatatgagagaggctggtagtttctttactgggcttaaacttgcgacaaagactcttgattcatttcttgagccaataaaaataaattcggtggtgctagatcccacgtgtggtgctggaaatctactagtggcctgttcacgtagattctctatctatcctactttaacacagacattaagaatatggggacaacagcttaaggggttcgatctctatgagatttttgttgaaagtgcaaaacttagaataataattgatgctttgaatagaggagcaaaaaaagattgtgatatcgatatagcattaaccctgcttccaaacataaaagtaaaaaatgcattagatgtatgcgaaatggatttgaaagatattactcatgttgtaatgaatcctccctttacaataacgccatctcctaataactattattggaaaaaagggaaagttaactcagccggtatcttcatggataagtacatcagattgctacctgcaggttgctgtgtcagtgctattttaccggatgtactaagatcaggcagtcgatatgaagaatttagaacattcattgattgcaatttgataggtacttgcaatatatggggtagatttaatgcaaaaactgatgtagatgtctttatcttatcagggaaaataaaacgctatcttaatagtcggctgccatggtcaccaaaccttggtaaatacatgcaattatcatcccaatacgatgttcgagtaggaccattagttgcttatagggatcaccaagaaggtgaagaacatccttattttcaccccaaaaactctcctgcatgggaaataatatcaaaagttagtgaaactagaaagtttaagggtacgacaataatccctcctttcatagttgttaaaaggacatccagtccaacagataaatttagagcatcagcgaccataataaatttagatcttcctgttgctgtagaaaaccatatgatagtaataagacctaaagactcatcattcgagtcttgtttgaaattaatgaaaatacttaaatcagaaaagacaaataattttctcaataatcgaattagaacacgccacctaactgttggagtgattaaagaaattcccatttaa

SEQ ID NO: 293251 - DNA, 1368 bp, Morganella morganii
atggctaaaaggttgatcgataggaaaccctttgatttttctgccagagtaacattacaacttggtagagaaagtatttccagctctacagttgctgtatctgaacttataaaaaattcctacgatgcagatgccgaaactgttcgcataaatttttatctacgtgagcaaggagctatatctactttaatcatccaggatgatggattagggatgaatactgatactcttgccgaccattggttaaaaatagggactaataacaaagctgtaaccgaatactcttcaaacaaacgtagaattttaactggagcaaaaggtcttgggcggttaggtatagatcgactatgtaaaaaaatgattctatatactaagcaggcaggagaaaaacatgccactcaacttagtgttgattggagaaagtacgaaaacacagataaatcgctaagccagattaaacatgatatctatgaagttgacatacccaataaaggtaaatacggcaatatttttacaacttcagaagaacatggaacatatctcatcttaattggattaagagatgattggaataatgattttatcaatgctctatctaatgaactacgtttacttatctctccatatagagcaattaatgatttctctattacattaaaaacaactaacaactcaggcacaatagagaaagaaattgattctcaagacattttatctggagctgtatggaaagttaatgcctttatcgataaatataataatgttaaaacttgttttactaataatataactggcgaaaaagttgaacataagcctataccgtggagtaggtggatagtaaatcaaggtaaggcaccattatttgggcctattaggtttgatttttattacctaccaagattaaaagagtctttagctaaagttaatctttcagtaaaagactggtcgaaatttatggagctaaatagaggtgttagaatctaccgagatgatttccgtgtcagaccctatggcgaaccaagtgggaaaggcgattggttagatattgggtacaggaaagctcaaagtcccggtggtattagtcaaggaggatggcgaatcggtccaggccaattaattggagcaattagtatttctcgtcaaaataatgaaatactgaatgatcaggctaatcgcgaaggtattgttgaaaatgacgctttttttcaaatgaggacgtttgcaattaaggtcattgaaatgttcgaggaattagctcataaacaagcatcaggtaatgaagagttagatctatcccaagagttagagaaaattctaaataagtcctcagcagatctcactgaagcttttgataatgtaaaaaaatag

SEQ ID NO: 293252 - DNA, 633 bp, Morganella morganii
gtgaatgactatattattgatggtattgaaatcccccagcgcgatcttaaaagtatcagcaaaattcttaaagaaagcatttcatatattaataaattctcgcagttagcaattgaaaacataaagccagataaaagaacacgcaaaaaaacaaatgttccatctgtatttgagtacattttcaacttgatggaaaaaagcttatctcagatgggggtagtccataaatttaactacgccagaattagtaaagaagattttaatgttcgctcatttgaaattgactgggaaagtattgccataaattttataactaattccttatgggcttttaacgataaaaatagaaatgaacgaaatatagaagttacattcgaaagagtcgggggcacgaagcttaggatatcgttcgaagactcggggtgtgggctagaagaatcacaagaagaaaatatatttcttccgatgaaaagttcaaaacgagatcgaactggaaacgtcgttggtaccggaatgggtttagcaattgtccgaaaccaagttgttgataatatggccggaaatatatttgctaaaggctcttctcctcttggaggagctggtttttatatcgaagttaatcaggatgtttaa

SEQ ID NO: 293253 - DNA, 630 bp, Morganella morganii
atgatggcaaaaattatttttattgacgatcgtgaagatgtacgtaccacttatagaatgaacttaagtcgaatattccgtaatgttgctgaagtgatggctttggaaccgttagcacttcttgatgatatgattgctcatcttgatagcatcgacaataaagttatgtatgttatcgatgaagatcttaaacatttcggacaagctcaatattctggagccgagttaattaaagcgataagaatatatgatagaaagatacccatatatattttaactggatatatcttaactattgataaaaacctcgctgatgttgagttcgtaatcgataaaggggaatggaatgataattctgaaaaatttgcaaagaaatttcttaggcatattgatacttacaatgaagttaaggatgctcaagaaaaaagattcgacgagttattatgcaaatctttaatttaccctttagatgaaaatgaacaagaagaatattcggcgctgaatttcaaccgtagcaaaacattatctactgaatcagtaattacagttaaagatatcgaacaactaaacgaaaaaacaaataaattaatagatatccaaaaaaggctaagcgagttagatcatgaataa

SEQ ID NO: 293254 - DNA, 1335 bp, Morganella morganii
atgaacatcgaacattggacaagaagaaaacggaatgatgatgaaggatatccagtcaaggcatttaactcagatactgatgataaccaatatcaaagagaccgcgccagaataatacactcagctgcattcaggcgcctacaaacaaaaactcaggttctgggattaggcgaaagcgatttctatcgtacacgtctaactcattccttggaagttgctcaaattggttctgccatatgtgagcgcctacatcaatcttatgaaaatgactcagaaaaaaaaatatggataccatcactaagtctcattgaagctattggattaagccacgatataggtcatccaccattcggtcacggcggggaagtagctcttaattattcaatggcaaattacggtgggtttgaaggtaatggacaaactctaaggatcgtcagccgactggcagaatattctcctaataatggaatggatttaacaagacgaactcttcttggtttaataaaataccctaaaaaatatagtgaagtcgtaaataataaaaacataaagaaaagtatagatattgctccccttaaccttgatgattggaatccaccaaaatgttacttagatgatgaggaagatatagttaactggatatttgacaaacttcccaaagaggatgtaaaaaaattcaaatcaattaaaaaagaaaaaggtcagcatcataagacaatttataagtcatttgacacatccatcatggagttggctgatgatatatcttatggtgttcatgatttggaggatggcattgcactaaatcttataagtaaagacatgtgggttaatgatgtaattaacactataaaagatattaattgtgacataacaaataacattgatttttataataaaaaattatttagtgattcaggaaaggatagaaaacacgccattagcaaattagtgggttttttcatatcacaaatagaaataattaatcacaataaatttaaaacaccactattcgatctccaagccgttataaataatgatgccaaaataatattaaaagcactgaaaaatcttataaaaaacagagtaataaaatcacctgaagtacaaatactagaatacaaagggcaacagataattcttaaaatatttgaggtgctaaaagaaaacccagaaagattacttccaagaaaaaccttttccttatataaaacctctgaaaacaaggatagaattttatgtgattacgtatccggaatgacagatagttacgccacaaaactttatcacaaattatttactcctgacaccggttctatttttgatagattataa

SEQ ID NO: 293255 - DNA, 705 bp, Morganella morganii
atgaagatagataatatcgcactgcatagtttctttattaaaaataaaatatacactttgcatcatgctaatagcgtcggaacatcaatttcatttataaatagctctggattattatctcggggagatatagaaagatatggattatttcaaacagaacaaatatcagaccaagaagacaaaacatatgacgtttgggatgatatatttttagatactgtagaccttcatggtttttttccacgacaaaatatctatggaccagtgtcctttaaattcagcattgatttcctattagaaaacaatctggatgtatggataacaaaacaaaatcctatgtactggaaccctcaaaaaaaagatactgacaaatattttcaagacatgaatgatgtaatagaaaactgggataactacgcccgacaagatactatgataactattaaaaagccaagagcccccaaattatttaatcaattgcaatccatcttacttgatgaccctaatatagtgctaaataatatagtgctctataatgaatctgaaaaatcactactagattctctacaaaaaaatggattacctttacatctcttatctaaaagaacctgcgaacaatgtttttgtaaaaataattacttatatcaattaactgagcctagcctaaaaaaaatgtttttatcaccaaaccattctctctggtaa

SEQ ID NO: 293256 - DNA, 315 bp, Morganella morganii
atgaacaaatatcgtgacaaatcagactttgagattaataaggctgtggcaattgcgcatggctataaagttatgtcgtgcgaagagtcagtcatggcatacattgatagcggatataagccattcgacccctgcaacaacccggcggacgccatgcctatttttattgataataaaatgggagttatatttttaggtgatttagttcagattagtgatttctctggtggcactgttaattttggtagaaatttttatcgcacaatagctgagttattcctgatgatgaaggatgcggagaatgaaaaagtatga

SEQ ID NO: 293257 - DNA, 219 bp, Morganella morganii
atgaaggttaagttattgaacaacggcggcttcatatttgctcttggtgcaattaaattcccggtgattgttgaagcaagtaattatcgagatgtaggattcgatgtattaggcgatgagctaataaaagctggcggaagccctgatagtataactccagacgctgattactttttcactaatgacgaatgcgaggtaatcaatgaacaaatatcgtga

SEQ ID NO: 293258 - DNA, 588 bp, Morganella morganii
ttgatactaattaaacttaatgagaccttgattaaccaaaaaaaattaatgtcttggtgggtaatgaataactttatagaagctttggatgcgtctatcaaaacaaaaaactggtattcagtgttatttatatctctaacactacctgatatctgtgggaagatagatagaccggatttaaaatcatcaaaattaagaacaatagaatggtacgataaatatctactaccagcgtatacctcatttattggtccatcaaagactaagcatgtgtttttaagtgggtctgatttctacgccttaaggtgcgcatgcctacatgaaggcagcgatgatatatcagaacaaagtgccagggagactctgcaaaacttcatattcatccagccaatggacagtagcctttatatccattgcaaccaaatcaataactccctgcaactccaggttgatcagttcgggacagatgttttgtctgccgtaaaatgctggatgaaagatatatcttcggatcataataaaatcagtaaaatagaaagcatgttatttattaaaatgattgacccgtcaaaagggttttcaatttaa

SEQ ID NO: 293259 - DNA, 144 bp, Morganella morganii
atgtctctccatagtcacgccgcttcttctccggtagctgacgttgccacctacaccggtagtaatttaaccgtgaattcgttgtttttgattctcagcatgcgctacccgagtaaaggatctggggttatggctaacatgtga

SEQ ID NO: 293260 - DNA, 381 bp, Morganella morganii
atgattaggatagacaaaaaaaccggctcacagcttatgaggttgtggggtgttttgtcgtggccggaaatcgatgcggaatactggctttggcatgggtgttgtattttcgtgaccattgaccacggcgacagcgttgatctccatatggcaatgagacaaagcgacagaaggcgctgccgggatgcggtttctgacatgttgcacaagattggtaatcgtactgttaatgccccaatacgcattgagcataaacaggtttgtaacctggcaaaaaaatttggatttacagaatattggcgaggaattgttgaatacatcgacgatagtcgcggagagcttattttaatgaagaggtgtgctgatgggcggtatagctaa

SEQ ID NO: 293261 - DNA, 660 bp, Morganella morganii
atgggcggtatagctaaaggtatcggtaacattgtcggctctattacaggggctaatcaggcggctgatgctcaggtttctgctgctaattcatctaacgaaaacgcctggcgcatatatcaggatcaaaaacaaacactgtccccgtttttggatgctggcaagactgcgctatcaggattgcagggtctggccgggtcaacgctggacagggggaaggcgcttacagattactttaatagcgctgaataccagcaattagctaatcaggccagataccaggggcttacagctgctgaagctactggtggccttgggtcaacagcgatgagtaaccaactggcatctatcgccccgactctcgggcaaaactatctcaattatctggatcaggatcagcagagacgttatagccaactgcttggcttgaccaacgtaggtcttactgccggaggtgcgacaaatgccgcagctggtaattacgcgagtaattacggcaacaatatgtctcagattggtgcgtctaatgctggtgcatatctggcttccggtaatgcccttaccagtgggattgggtatttagcaggaactcaaacagttaaaaacctcggtagtagcgctgtcaccggtataggaaactggctttccggattgttttaa

SEQ ID NO: 293262 - DNA, 1281 bp, Morganella morganii
atggccgtagtgcaacctattgattacacgtcatggaatggtttcgcccaagggctgcaactgaaagggttgcaggatgagattcagcaacgagcaattgccgctgaacaggcgcagattgaccgcgataataacgccaaatttcagcaggagtggcagcagtcttttggcgacccggggaaaatgacatcacttgcagccaaatacccggggcagatggatttaataaagtcagggataggatttcagaatgagcagcatcagttagccctgggtaatgcagccagagatctgcgtgttgccattgctacaaataatccgcaggccgtccagcaggtcgctgtaaaacatgcatcggttctgaattctgttggctcatctccggaagagataatgcagcagctacagcaagatccaggcggtctttctcgcatagttgacactgttggcatgagtgctctcggtgttaaggaatattacgatgttgctggggcaaaagaaaccagggaagaaacagcacggtcaaatcgggctggtgaagcgttaactgcccgtcgtgatgagcagtctaatgcgcgtggttgggctggtattagcattcaaaagcaaaatgcagatatcgccagagaacgccttaacctcgacagagaacttaaaggccttgaatataaagaaaaggctttggatcgacaggtgtcaaaagaaactaacgaactcaaaaaggctgaacttgaacaaaagcttgatggtattcgagcccaaaaagaagcagccaaggcagagcggtatgacactgttgcaagtcaggtggattcggcagacagggcaataaaaacggcacagagcatcattaattcacctggttttacagggtattttggtgtgaacgtaaacccgtttggtagccggttcttaccaggtactgatgcatccgacacttcggccatggttgatactctgaaatctcagggctttatgtctggtattcagcagatgcgaggtatgggcgcactttctgatgccgagggtcggaaggttatggatgcaattggtagccttgattccggcatgtcagaaaagcaggcaaagaaatcaattgagggaattatcgaaactttcgagcagggcaaaaaacggttggaaagcagatatcctgatgaattcagtaaatactcaggcgaacttaaccagagtaaatacggcttgccgataggccaccaagaaggcgggtatacgtataaaggcggagacccttcagataaaaataactggagcaaataa

SEQ ID NO: 293263 - DNA, 372 bp, Morganella morganii
atgttaagaaaattaatattgtctatcacctctgtgtctttgctttctgcatgcgttcacacaacgcctatgcctattcagaaatcacagcctggtgatgcaatgatgtcttgtgaatcaatagtttcagaaatggaggagatgagtaatttagtaaaaacaaaagacagtgagttaaatggtcagatcgctaaaaactctgcacttggcgtaactggtatattcttggtcgtgcctctttttttcatggacaccagtgacgccaaaaccgtggaaggtaaggcagctaaagatagatttaataaactgcagcagctttattctgataagaaatgctcatcagaaaaaatggaagcgcagcctagcagttaa

SEQ ID NO: 293264 - DNA, 540 bp, Morganella morganii
atgttacatacaattcactttatctgtccagtaacgactaatacagttagtcagttgcaaggtaattgcctgaccgccatgaaccaaggggcgacagaaataaacattcatatatcaagccgaggcggcgagacagattgcggatttgctgcatattcctttttaaaatcacttcccatcactgtaagaactcataacatcagtaatgtagaatcaatagctaatatcattttcttggcagggtcagaaaggattgcaagcccaatttccagatttttattgcaccctttagcttggactcctccagggggaatcattgaccactataggttaaatgaaatgggtaaatgccttgataacgacctgaagagatttgctgatatttttaacactgagatatcaaacaggcacgactggatttcaatgatagaaaaatcaacaattctaacggctgaagatgcattggcttatggaatcataaacaaccaagcgccagcaaaacttcagccgaatggtgcaaactggtggattaactgctag

SEQ ID NO: 293265 - DNA, 843 bp, Morganella morganii
atgaatagtatatcaacaatcaacgtacctttccacggcgacaatctgtatgtcgtcaattacaacggtcagccgtatgtgccgatgaagccaattgttgaaggtatggggatggcatggggtgctcaatttgctaaattaaaacaacgctttagttcaagtgtttcggaaatcgaaatggttgctgaagatggcaaattgcgcaacatggtttgcattgcgcttagaaaattatccggctggctccacaccatcagcccgaacaaagttaaacctgaaatccgcgacaaggtaatccgctatcaggaagaatgtgacgatgttctgtatgagtactggactaccggcgaagtgaaagataagcgcagggctcagaaagctttacccggtaaaatcaccgccgagcagcaggaagccatcaagcaattagtaatgacacgcggcaaagcactgccgaaggaaaaacaggcgaaagccatgattacgatgtggtcgtcgctgaaaagtcacttcggctgcacatacaaagaaatcgggagtgataaattcaccgaagcgctttcgctggccgcacgtgttccgcttgagggtgaatacattcctaagcaggaaatgacagcgcctaagtttaataagcatcagactatttatacgctggagggtgccgtcattcatataagagccatgaaggaatactggaacaacgggcttaaagactcattgaaacaactcggctatcaacatacaggggcaataactgaacatatgatagacgttttatttcatctagattgggcagttcatgaaataaaaggcgacaactctagcaagttaccagcataa

SEQ ID NO: 293266 - DNA, 1149 bp, Morganella morganii
atgtttgccgatggtgacgggttaagtgtgagagtatctaagctgggggtgatcagctgggtttttgcgtaccggctgggtggacggggagtgaagctggagcggctaaaacttggtaactatccagacatgtcactaaaactggcaagagaaaaacgggaacaatgccgttcttggcttgcagacagcaaaaatccaaagcatcaattaaatttagttgctcaggcacaattaaagcccgttacggtgaaagatgcgattgattattggataagggaatatgccacagatcaccgtgttaatgtcaccaggcatgaatcacaattagagaaacacatatatccgtatattggaaatttacccttggctgagtgtgaaacacgctattggcttgagtgttttgatcgcatgaaaaaaacaactccagttgcggcaggttatgtttttcagatgtgtaaacaggcattgaaattttgcagggttcgccgttatgcaataagtaatgctttggatgatttatccattccggatgtcggtaaaaaacaagaaaaaggtgacagggttcattctgatgatgagttgggaattatatggaaatctacagatgagcattgtttcaaaccttattattcatcatttttaaaactgctacttttgttcggatgccgttctcaggaattacgattatcgaaatggtctgaatgggatttaaaatcatgggtatggactgtaccaaaagagcatagtaaaggtggtggtaaaataataaggccaattcctgatggaataaaggatatagtaacccacttacatgatgaaaataagcatagtggttttttgttgggtgaaataaaagaaccgccagcagttagccagtgggggcgtaatatatggaagcgtctcgggcaatcagagtcgtggtcactacatgatttaagacgctcgttttccacaaaacttaacgatctaggcattgctccgcatattgttgagcaattattagggcactctatgccgggagtgatggctgtatataatcacagccaatacatgcctgataaattggatgcgctgaataaatggtatgacagattatgcctgttagccaatccgcatggaaatataattttattaaaggtggctaaatga

SEQ ID NO: 293267 - DNA, 750 bp, Morganella morganii
atgatattacctgaaaggttatactatccattgcctgacgctgcaaaaaaattagattgcacgattcaggatgttatccactttggcgcgataggtgctattaatatatgtatttatatagataatcacagagcaaaagataatggttactttcacttaaatatgcccaaaagcatggtgggcgaaatagatgatttcggtagcttatggggcgacggctggagtttatatgatgtagaagaacgaaatattgatgatacgttaaggttagatgggtatttttcaaaaagaataaatggatttttctatataaacaactttgagttaacaaaaattgaatttgacgcatctagtgatttaaatttaatgtccgtatcaactggtagtgagtcaggttataatgattgtattgatgttaattttttaacggaaagtttatctatcgatagtaaatttctatgtgttaaaaatgaagatatatataattttaaagaagtaacgaaagtaccggtaaaagaacataaaatctctgatgaggcaccaaaaacagtagcaaaaaaaaccgagcttatcattgcattattgaaattgattcctgagttttctgatgttgacccatatgagatgtcggctaaaaaaatcgcagaattaattgaggtagtagcggcacagaaagggataataatacctaaaatccatagccaaactttggctagttaccttggaagggaaagaaaaagtagaaaatag

SEQ ID NO: 293268 - DNA, 798 bp, Morganella morganii
atggaaggcttaattaggtattgttacaataaaattgatgaaaaaaaacgtttaaaatgtaattcatctttaggtcgtgattgttttaactgcttcagtaatatgtattatggtaataatgagattaattacgaatgtaagaataaaagatatatatatattgtgcggtatctacctgttcattcttatgaaatccgtaatgcactaagagaattgttactccggttttattgtgaaataaatggtaagaaaaaaattgtattcgcaagttttggtgcggggccaggagtggatacatatgctttccatcgttggcttgatattaatcataacaatataaattgtaaaaatattactgcatataggatagagtcttacgatgagtggactgcgttagctaaaaaagttatgttttcaaattgtccatctaattttgaaggaaggtattataggcatattaaagatgtcacgacagaagatgtaaaaatcagaaaaaagtttgatattgcaacattatcatatattatttctgagctagatgattctggggttgataaattgattgagaatattaaaaataataaaaatgattgttcgtatattataataaatgatcgtaatgaggttgacgtaaaaaataaaataattaaggttatgactgaggtggcaaatgcagattataaagaatatcttcatgacaaagaacattgtagtttttcatatcctaatgatatatatttaaaagcctatccaaaggtttattgtagttctatatattttgtgggtaaattgaaatga

SEQ ID NO: 293269 - DNA, 936 bp, Morganella morganii
atgataatcagtgccagtagacgaacagatatccctgctttttaccatgactggtttatgaatcgcattagagaaggttttttgttaatacgcaatccttataattatcatcaagtgaaaagagtatcattgctacctgaagatgttgacgctattgttttttggacgagaaatcctggcaagatgctatctgaacttgctcttcttaaggagtttaaatattatttccaatacaccattacaggttatccgaaggtattggatgctcatgggttaaaccctcatcgtgcaatatcaactttcttatcgcttagtaaggcaattggtcgtaataaagtagtatggcgctatgacccgattattatttcaagtgcaacgccagtttctgagcataaacggcttttccagaagatagcctctaatcttgctggtcatactgaccgtgtagtgattagtttcgccgacttatatcaaaaaacaaagcgaaatctcaatctcatccctgacttttcatatcgagatattacgaattctcatgaggagctttatgatttatgctcattttttgcagatgttgctcggggctacgatattgaaatatcaacatgtgctgaatcgcttgatttggaaaaatttggaatcgtaaaagggaaatgtattgatgatagattgttaaaggagttattcggactatatgtttcaggtgtgaaagacactgggcaacgagaagcatgtggatgtattaaaagtattgatattggtcaatataatacctgtttacatggttgcagatattgttatgcaacatttaacgaacacacagtgaaatcaaatatgaaaaaacataatcctgctagcccgtttcttttaggtgatgcatctgatgttgataatgatcttttgaataatgtaattgttcagcaaaagttgttttaa

SEQ ID NO: 293270 - DNA, 276 bp, Morganella morganii
atggccacagtaaccggtactgtggcaaagccacctcggcgggttaagacagcaaccggtaaagtaatggcaacactgaccattcaggcagaaagcgaacgccgcaacccttatccattaacgctggtggcatttgatataaacgcactggaactgatggcctgtcagaaaggaagccgtgctattgccactggtcggcataaatggtttaacgggtatcaactcaccggggcgcggatagttatctgcgagcagccacggtatctcaactactga

SEQ ID NO: 293271 - DNA, 549 bp, Morganella morganii
atgaggatcggtaataagggtagtattgaattaataaattttgaggagccgctcgttttgaaaggctatgatgctaaattgattgatgtccctaaatatagcgaaattcatgatcataatggtcatgtttcaattggtaattttaaagaattatctttttctgtggttacaatgtctggaaaaattatcagttgtgatgtagaaagcccagttacactaaaaaattttgaagaccgtttagttaagagggttgtggtttttaacaatatagtattgactggtaatatggggtttattttcacatatcgcattggagatgaagttattaatgtgatttttgataagagtggttttatatcaggatatacgccatttaaatataatttattcccagaaatgtcaacggaaacctttggggactttttaatatctaatggttatcatgatttttatgaagattatgctcttactaaggtacaagataatctaggtacagtagaagttttaaataaatccatgatgaaattaaaatgcaaggctgttgactaa

SEQ ID NO: 293272 - DNA, 1008 bp, Morganella morganii
atgaacaataattcatcactacatggcctgacaatttttcgctttattgccgcattttacgtgtttatttttcattgccatctaagatttccttttgaaggccctgtatggctaaccgatttcattggcaacggcgcaattggcatgacatttttctttgccttatcaggttttgttatggcttggtcatcaagaaatggattaagaaaagattatataaaggcaaggatagcaagaatttatccggcatatctttttatgggattaataacattgccatttatatttcagtatgatttgaagacagcatcagcatcattgcttttatttctttcctcaatgcaatcctggatacctcaatctttcttcatctggaactttggtggttcatggtctgtatcgactgagttatttttttatttttcctttccattattactcccaataatacttttaagaccattaaaatcattattaatatcaatatcaatatcaggtctattcatcccaacgatgttggcatttaatggaaaaaatatatttccgtcatattatatcaatccaatatatcgactaccagaatttgtttccggtgtatctcttggtgtgcttttcataaatagaaagctaacgacgattaaatttaaaaaaaatctcatttttatatcaatgctgtcattaatattaatatcaccaaaaaataatattgcattcattaaaaataacattatcaccctcccggccacactatgtttaatttatgtattggcagcatcgaaaataaaaataaacttaataacaaagccaatcatctacttaggtaaaacaagctactcattctatttaatgcaactaccaattttaatggcaatggataaatatcatctatatcttagtaactataataaattttatatttttatttttgctgtaataattaattgtattttggcatcagtttcctatcattttgtggaagaaaaatttaaagtaatgcaaaaaacttaa

SEQ ID NO: 293273 - DNA, 426 bp, Morganella morganii
atgtatcagttaaatgaaggacagtttttgtctctgccggcccattggctggataccagcatgaatgtattccgggatcctgattctcagcgctcatttattgttgcccgcgcaacaataaaaccggggcgatctctgcctgatgaaatgcggtttcagtgtgagcaactgacaaaggttgctgcgaatattcatatttctgattttgaacctgtacaccttgctttggttcctgaagccgaagcgctggaaacgcaactgagcttttttcgcagcggcagtcagttttatcagaaacaactggcagttttaggagcgggaagccggcaaattttattattcagttatacatcggcagatccgttcaatacagatgatgacagctactggttgcgattaaaaaatacattgacgttgaattcatga

SEQ ID NO: 293274 - DNA, 717 bp, Morganella morganii
ttgcacgattcattcatatcatatgcagaagaagataatgactttgtgtcgaaattggtaactggattaaaggataatggattagatatttggtatgcaccgatatctcttaaagtaggagatcaattacttgatgcgatagaaaaggggttgagtgaatcgcgagttggaatattaattttaagtccatcgtatctttccaaaggttggacatcttatgaaatggatatactcattagacaacgagttgaaaataaaaagaaaatactccctatttggcttggtgttacaaaaaaagatatcgaaaataaacatactgggctaagtgggatagtaggaattacggatacaacggacgttaatgacgtagtttctcgtttggtagaagtactttcagatgaagcgccttaccgtggtgtaattccctcatgggaaaatccagtatatcgttttttatcaggtgttggggaggtaaatcttcaaactattaaaggtcaaacaacaactatttttgagctattaattcatcatagagacgaccagtttcctttttggctggctggaaagtcatattctaagatggagcttctatctgaagttgctcacataataaaagctgatcctgatagggtaaaaaagtgggtttctgatgagcattatcaaaaactatgggatatgtgtgaggaatatggtttaaacccagattggtattgctaa

SEQ ID NO: 293275 - DNA, 801 bp, Morganella morganii
atgaaaataacaatgtgcgataaaaaattatggagagaatacacgggtaaattatcaattattagtgtttttttatcatatatacttatcgtggctaaagtgcctgatggattttggtgcaaaactacagcaacaataatactgtcaatatttttggtatgtttctttctatatacgtggtgctctgcaaataaaaagagagaaacagaggttgttatcaacggctttaaagttaatataatatttggtgatatctttttacaggatggtttaaaggttattccgttcaatgagcattttgatactcaggtagatggcatcatagtaacacctaccagcctgaatgggatttatttagataggtactgtgaaataaaggataggattgaagatgaaataagtaaaataaaacctatcggacagaaaaaaagagtgaatggacggaaggataaatataaacttggaacgatatgtaaagttgatgaatatcttttaatggcattaactaattttgataatgaaaacagagctaatttagatagaaaaaaatattttgactgcatgatgaatttctggaatgagctggatgttattcatggtggctatcctgtatcaattccgcttttaggatcagggattaccagattcaatgatgggtatatttcaaagcaagagctgttgaatttgatactatattctttgaaactaagcaggtttcaaattccggctgattcgcagctgacaatcgttatacacaattcattatttaatgatatcaatttatataaactaatggagtga

SEQ ID NO: 293276 - DNA, 513 bp, Morganella morganii
atggtatatcgtacaaaaacatatattgcaggtgaatgggatggagataaggatgccatcgaaaaattacatgactggaataagaggaattattggagtttatcttttactgacgctcatgatttaactcaggcaagagatagtagcctgaactgcagcataaaggcatccctggcaacaagatttaattcatctaagacatttgtattgattgtaggtaaaaatactaaaagtgccaggagcggaggatgtcgctactgtcccagctataacagctatacaggacattgtgtaaaaggtaaatctgtagatcatcgcagctatattgagtatgaatgtgataaagcagtaaaagatgggttgaaaattattgtattatataatgcagcatctgtagataaatccaaatgtcctgatgcggtaaagagcatcggccagcatgttgcaatgtgtacttacatcaatggacaatattattgggattatcagtcggtaaagaatgctctgaactga

SEQ ID NO: 293277 - DNA, 189 bp, Morganella morganii
atgaccgaaaaaaagacctgctctaaggaattaactcaggcaggtttgtcggtcatagccgcctgccggttagtttcactgtccagaacctctttttaccggataatcactgactggaaaattaaggatactccggttattgaagcgatttatgctgaactgaaattatcaccacgggccggattctga

SEQ ID NO: 293278 - DNA, 177 bp, Morganella morganii
atggctggaggatttgatattaaaaatggtgatgttatttacggggtaatggaagataaatttggtaattctgctctcatcgtacagaagtctgactatagtaaagttttagctgaaattgaacttgatagtggagataagaattatgttaataaaactcatgaatatcttaagtga

SEQ ID NO: 293279 - DNA, 885 bp, Morganella morganii
atggaactaaaaataataccttttgaatattgttctttagaaagagcagctagattttttaattgtgaaatagatgatttttttcattggtataccaccggtaaaatagagttgtgtatgctgatggatgaaatgaaagctactattctgtctattaactctcagcattgtgaattaaaaataccatatcttggtgctgataattttgaatatgatattgaaaaatcgacagggaatgaatactcctatgctagtgatttagcagcatttgttgcatgcgggttaacatatgacaatcttaatgaaatatatagagtctatggctatgcatatggtttttggaagccttgtgattttattttagatatattgagatctggtgatatagtaagagatagtttttatatttctcctttggaggggaataaagactatagagttatgattaaagtatcggagggcatgcaagatatagatccggataaaccactaatgtattacacgcctaattttactattgataatttacttttatgtaaaaaggatttggaaagggttaaccatattcttgcaggtattgattatccagtagaaacaactaatgatagtgagattaatgataccattgtagatggcgcatgtacttggggtttagacaatttcccagggaaggaaactgcgttaaagcttattgcagggttatcactgtctttatataaaacatctcaaaaatataaatatgggaataatataaaccggagtgcggtagtagttgacgcagtgaaaagtattcttgaacaaggggtggattttaatattacagataaacaactaagcaacttgattaaagaatcgttagagttgtacgcccctaaagcaaaataa

SEQ ID NO: 293280 - DNA, 819 bp, Morganella morganii
atggcaaacattgatttaatccgtgaggttaagcggagcgccgtaaatcactggggcagtgtcctgtccgcatgtggtgttgatgtgccggaacggggaaagcatggtgcctgtccgatctgcggcgggactgaccgcttccattttattgatgatcaccataacggtaactggttctgccgtcagtgtgatgaaccgaaccacggggacgggctggatttaatcgcaaaggtgaaagggatatccgttttcgatgcggctaaagaggtatcacaggcgttatcactgccgttaccggaaccggccgggcaggaggctccgaaatcagcggcacaaccgatagcggaaaaggtccgtaagctggtggcacagacgactaccggacaatctgcctatctgactgcaaaggggcatacgtgccccgtcagtctgctggaggatggttctctgctgctggttatccggtgcggtgatgaagtgactggtgcacagattatccgcccggacggagagaaacggctggttgccggcacacggaagaaaggtagttttatcccgctgtcagagctgccggaaacggcggatacgatactgattgcggagggctatgcgaccgcgtttaccgtggcacaactgcatgacgggcttgttctggcggccattgatgaggggaatttattaccggtggctgagtgggctgccggacgctacccggaggcgaaaattatcattgcggcggataacgatattaagcccggtcagccgaatgtggggaaaatctcagcagagaaagcggtaaaaagttttcaccgcggctga

SEQ ID NO: 293281 - DNA, 381 bp, Morganella morganii
atggaagtgacaacagaaaaagagttagctcacgcattaaaaaacaatgaagatacaatagttattgaaggtaacttagctaaaaaaacgataaaaatcaaagctacgggtaagttagcatgggtcgttgcaatcggagctattagtgtctcagtagttgctatattagccactgcagggacaggtggtgctgcaacacctgtatctggtgttgtaggtttgggagcatcaggtgcggctgttgggattttaggtacgtcagctacatatagtgcaatcgctatagctgtagctgcaggtggtgttggtgttttaaataaattgcgtcgttatgacatagttaaaaaatcagacaatagggtcatcctgaaacgcaaataa

SEQ ID NO: 293282 - DNA, 330 bp, Morganella morganii
atgaattcaataatggctattcgtgattttatggctggaaatagtctcactggtgatgaggttggaaatgtaagatttgaggcattagttgcttatagaagtcgagctggaaattctacagagttaacccaggttcaaataactaggaatggttacaatgatggtgatatagaaattagggaatgtggcgacctgaaaacgacggattatcatttgggattcacaacacagtatcagacatatagttttattaatgggaatctggtgatcaacggtaattcacctaaaatgggcggtgactacatggtaaccatatcggtttctaaatag

SEQ ID NO: 293283 - DNA, 3519 bp, Morganella morganii
atgccaataacacctaaagacataattgcagatattaatgaggcatcaacagcgggatttcgcggacgtcttatcgctcgtggacaggccagagcaattatttggcgtgatggtgtattgccgcctgatgctcctgaattctcagctcaactcagccacgagctccattcctatgcttatgcactgatcgggcttggccttcggcttcgtgaattgggcggtgatgcttcaaaggcgcgcatcgcttttgaacaagcagctacagctcttgaggctgttattgcaaagggcaatagagaagatgttgatcgtgactttcactttgtcatggccgctgcgagttaccatcttgcacatctctctgctcgttcttactctctgctaactattgtcaaaaacgatgataatttctcaccgatagagctggtcattgctcgattgatacggagagattttagtacgctccgtaccagcgtgcttaattatcgtgccaacgatgaaggtagtgatgagtacattaccactgctattcaagccagtctcgacgagattaacagtggcaaaaattttactggatctggcaacgactttctttttgatggtcttgatacggcactgactgatgcctttatggcagcaacatcactttttctcctagccatagaacgcggtgagaggccattactccatcaagcaattacaatactcaggaagagtctcacaatttgtggcgagttgaacatgttgccacaatggtgggtgcatattatcgcaattcacctcatgtcagatctctggtcgactacttttcacgagaaactaccacttctgtcagaggatggggaaacacccgagtggaccaagcttagaaaattgttcattgcactgcttcagtgtcgccataaagctgagattgacctttggccgtcgcaaatagaagctgcggcccgtgctgttaaccaatctgatgacttggtcgtatccctgcctacaagtgctggtaaaacacgtattgctgaactgtgcatattacgttgcctagcaggtggtaagcgagtcgtattcatcacacctctgcgtgctctatcagcgcaaacggaggccatgttattgaggtcattcggcccattaggtaagacgatctcggcactttacggcagtatcggtgtcagcagattcgacgaggacgcaatcaggaagcgggatatagtggtagcaacaccagagaaactcgatttcgcgttgcgcaacgatccaacactactaaatgacgtcggtctacttatcttcgacgaaggacatatgatcggccttaatgagcgcgaggttcggtacgaagtacaaattcagcgccttctccgacgagcggatgctcatgagcgacggattgtctgcctatcggccatcttacctgatggcgatcaacttaacgatttcgcagcatggctacgtcgtgatcaacctggtgaggtggttaaaaaggattggcgtcctacacgtttgaggtttggtgaagtggtttgggcttctcctactgggcgactaaatctccgtgttggagacgaacgtccttgggtacagcggtttatctctggtacagtaccgccaaactgggtttatcccaagaggcgtcggaagcgtatttttcccgataaccaacgtgaactctgtttggcaactgcctggagattaattgaagatggacaaacagtccttattttctgcccgcaacgtcgaagtgtcgaaccttacgcggaagtaattgttgatcttcatgaacggggagctatatgttctctgttggatgttgatcctatcgtcctgaatacagccatcacgcttggtgaggaatggctgggagcgaatagcactattctcaaatgtcttcgtttgggggtggctttacatcatggtgccctccctacagcctaccgtaaagaggttgagcggctcttacgtgataatgtacttaaagtgactatttcatcgccgacgctagcacaggggcttaacctatcagccacagctattgtcatgcattctcttcatcgtaatggtgaagttattgaagtctctgaatttaaaaatgttattggacgtgctggtagggcatatgtcgatgttgaaggcattgttctctttcctatattcgacaaaatcgcgcgacggcaaagtcagtgggaagctctcatcaccgatctcggagcacggcaaatggagagtggattgatactattagtttcaacacttttattgcgtatgcacgcccgcataggtggtgatatcaatgagctcactgaatatgtaaccaacaatgcttcagcttggatattcccagaggtcgaaaacgaaaaatctgaagaacaagagcgtgctcgtgctgattgggagcaacatgttgcaatacttgatacggcgatccttagtcttattggggaaaatgatgtccccgatgaagctattgaggatactctagatagtattcttcaatcctccctttggcagcgccgtctacttcgttataacgaacagcagcaacaagtcctcaaagcagggttagtctcccgtagtaaatttatatggagtaattcaacagccgtacttcggcgaggttacttcctggctggagtggggcttgaaactggtcatgcgttagacgctattgcagtgaacgttaatctgcttttactcgaagctaataacgcaattcttcatgatgatgttgaggtagcgattgccacaataacagccctagcagaacaagtttttacttttcatccctttaagccagacatctttcccgatagctggcgagatattctgcgagcttggctcctcggacaacctttaactggtatagccaccgggcaggaatcggatatgttacggtttatcgagggggggctggtatatcgtttaccttgggctatggaggccatccgagttcgtgccgtggcgaacaatgatgtggtaggagaattaggtttgcaactagatgactatgaactaggccaagctgtgctctccgtcgaaactggtacgctcaatcgttcagcttcgatacttattcaagccggtttcaattcaaggcttgctgcgatcaaggttgtaaccgataccggtgccacttttcataacaatcatgagcttcgacaatggctcaattctgaaattgttgtagggttgagtgtacaaccagattggccaacggctgaaaccaaaacgatatggactgattttgtgcaatgttttagcccgatagaaaataatacgtgggaagaacgtagatactggacaaacgtaacttggttcggtgttccgccgccgccgggtacgccggtacaaatttatcatggaatggggcaagcaagtgttttagctgccgatggtaaaccacttggttctatagcggcagcactcaatcccgcgagaagtgggctactccgtgcacaagtggctcaagacgtcacacggatcgaccttacttacttaggacctgcagatctattgcagatataa

SEQ ID NO: 293284 - DNA, 780 bp, Morganella morganii
gtggtgcaattcaatgattggtgcgactcggttgataatcctgttgggcaacactttctccgtgtgatgaccggccgtgcggcaaacctcgctgttggtattcaagcagcagctgcagctattccagcacactacgcatctgaagaacacgtagctcgagcacttcgacgcttaggaaaaccagctgctgcagcgttaatagagggcaagcttcctacaacaaagaatattcgttcgggagatcttggtgaaatctttgctactgaatggatcgattcccaaagcggtggctatcacgttccgataaaacggttacgctggaaagatcatcgcaacatggcgatgcgtggtgaagatgtgattggcatttttcaagatccgcaaacacatcgtttaaactttttaaaaactgaggccaaaagccgagcgactttaacaacacaagttgtaacagaagcccgagcgaatttagacaaagatggaggacttccctccggacacgcgctctcatttatttctgcacgtctactcgaactaggtaatgtctctttggctgacgcaattgatgacgctttgcttaaatacggcattcctgcagctagtgtccggcaccttcttttcactttctctggtaattcacctgagactatgctgacagcctcgcttcgagcttaccctggtttatttaatcaaattggtgttggcctgcgagttgaaggtcatgctgattttattggcgctatctatgagcaggtgattacaaatgccaataacacctaa

SEQ ID NO: 293285 - DNA, 1362 bp, Morganella morganii
atgaatattttggttttgaaagagttgctacggcctgtggtggggaatttgaaggatcattgtgtggacaccaaaatccccgagttctgccgtggtcttggtctacccatacccgagaaaggtggctcaaagcgtgaacgaatgcttgcatctttcgatgcgcttaatgactccgaccttcctaagcttgcgcagacactattggatcgacgaattctcaacataatgacacgtaatcagacccaagagctactatggagcgacgaacctaaaatcgagatacctaagcggtatcgtcgagaattggcacgagctttgcaaccatttgagctctttcgccactgggagcactttaagcttttgctacaagaaatttttataattcccgatgatttaagcgcacttttattggggaccgagacgggcattctggcagaaatctaccagcattttgtacgaaatcctgaggacgccgacgtcgagtggttatttgagaaattgcaggtatttgatctctccgaaccgcgttttcgacggtggcttgagggattagtctcctctgacgtacagatagatgctgaggcgcagtttaccttagttacggctataaatgtggtgttgagaatatgtggttctgaaatgcgtcatgtgtccgatctaggcggctatccagtctttggccttgtactcttacgggctgctagaggcagtcctaagaacattatttttgcatccttcagcaaacctgatattcggcttagcgactcgatagagaatgatatcgagatactttctagcccagatgatgtactggtttacgacaagcccttaagtagtgatggattgcgctggcgtgaactccagtcgtggtgggcagagctaaagcaggaagatgatttcacatgtgcaaaaaagactctctatcgacgtttacaacagagtttacctctttcatcaccacctcagcagatgttatttgaatcatactttcgcagttttggtcctgcaattcacgacttaccagcgctgttaccggaggtttggctacattgggatccgaagacagtttccgaacgaggagcccaggctttgcttaatcatcggatggattttctcatgctgctgcctgctggcggtagggtggtaatagaaatcgatggaattcaacattactcggatgatatgcagcgggcaaacacgcgtaagtacgctcaattggtcgctggtgaccgtgagttgaaactagcaggttacgacgtctatcgttttagtggtaccgagtttcaggggaaaaatgctccatccaaaataaaagctttctttgttgcgttgttgaagcgtcatgggatcaacgttaattga

SEQ ID NO: 293286 - DNA, 300 bp, Morganella morganii
atgatgcgaaagttaataaatatagtacattacctgatcagggttgacgaggaattttcattccgcagatggactgctgcggaatttatcatacgtgatgaatccgggctgagattaaataaagatgcagtgatgcactttgtacatgaaatgaaattatccagaccgggagaaactgatagtgatctggttaaattctataaaaatggcatagattcaatcaaaagaggtcttcttgagaaggtgagaactgaatttgaaattgattttgcagctaagatggatcataaaaaagaatag

SEQ ID NO: 293287 - DNA, 1284 bp, Morganella morganii
gtgcatcagcagcacagcacctttgaaagctacgggcgttttcagcaggatgtgccggggcaaccttttactcaactgcgctacgaacaatctcagaatcagcgccagaccggtaccgcaggtactaactgctttgcgctgatgccgggcaagatttttaccctgaaaaattacccgtctgacagcatgaataaggcctggcaggtgattatggtgaatcatcacggtatccagccgctggcggataacagtggcggagaaggaaccaaattcagtaacaccgttcagtttatccccggtacgcaggaatggcggccaccgttccgttataaaccgacagctgacggcgatgagctggcaacggttgccgggccgccgggcgaggaaatctataccaattcagaaggcgctgtcacggtccggttccactgggacagacgcggcaggcctgatcacagcgcatcctgctggatccgcgtagctcacggctggaactgtgatggttttggttttatgtcgatcccgcgtatcggccaggaagtgattgtgtcgtatctcaacggggatattgaccgtccgatcatcaccggctgcacgtataacggacgcaaccgcccgccgctggagttaccgaaagaaaaaacccgcaccaccttccggaccaaaactcacaaaggggacggatttaatgagctgcggtttgaggatgaaggcgggcgtgaagaaatttatctgcatgctcagcgggataataatatccacattaaccacaataaaactcagcatgtcgggcatgacgagatgcataccgttgtcaatgaccgcaaacatgaagtatgtcatgacgaatttattcatgttgtaaatgagcagacactggaaatcggtgttaatcagtttgagcacatcggcaaagatcgtatcacccgtattgataacagccggaaggaagtgatccatgccagtcacttccaggaagtgggcgaaaataagcagtgtgatgtacagaatgactacaaattaaccgctgcaggcggcattcatacacacacaaaggtgcatacactgcaggcgagcgaaaccgttattattaaaggaaaagcgggctccattcagctggatgcgcagggagtcacgatcaccggcaatattacgctgaaaggtaatgtatcaatcacggggggcgctcctgattctgttgctttattggatgctgccgttaatgaaggactgccgctggcggaagactgcagggccaaagccatgaagaaagaggtgtcctga

SEQ ID NO: 293288 - DNA, 738 bp, Morganella morganii
gtgtctattccgcgtatcggtcaggaagtgattgtctcgtatctcagcggcgacatagaccggccgattattaccggctgtacctataacgggcgcaataatccgccgctgaacctgccgaaagagaaaacccgcaccaccttccgcacgcggactcataaaggtgagggatttaacgagctgcgttttgaggattcagcaggggaagaagaaatttatattcatgcccagaaagatatgaatgcgcatattgaacatgatgccacctggcatatacagcatgatttaaagcggcggattgataacaacagtcacaccgaactgaccggtgatgagcatgtcatcatcaaaggctcgcagaaacaccagaccagcggggatgtctcgatgcatatcaaaggggaacaacacacccgcgcggacaaaaacctggtaacggaaagcggacagcagacccatcacctcagtgacggtaaaattatcatcgaagccggaacggagatcactctcaaggtcggcgatagttttgtccgcatcacgcccggtgctatttttacctccggtaacctgaatatcggtgacagcggcccgggcaacggcgtcccggtcagactgatgcccccggagggggtaccaccggccccggaaccgtatccggtgaaaaaatactgtgcggtggcggcgcagacagaaggaagctgggttatcaaatccggaggcggaaatggaaaagcgtaa

SEQ ID NO: 293289 - DNA, 960 bp, Morganella morganii
atgaataagcatttgacaacatatttagattactataggactcaggaaaatccgggatatgcggtattaattactggtggttggggaagcggtaaaacatatcaaattaaaaaatattttaaagaacatgaaatttgttatgtgagccttttctccataaattctattgatgatatctatgcaacggtttttgctaagatgtttcccgggaaagtcgccatcaaaaaattgattggtagtattggtgatataaaagcaaaggtgttagattcagttactttagggttgggggggattttaagccgtataggaagtaccttaataaaggaaaatatcgataataaaaaaataatcgtatttgatgatttagaaagatcggttaacaaaaatataataagtataagtgaggttttaggtgttattaataactatattgaacatgcgggatgtaaggtaattgttatcgcacatgatgaaaaaataaaaaaagaatttgaaagtgaaaaggaaaaattcatagggcaaacaattaaagtaagatcagatgttgatgatgcattaaattcatttttagctaatagtgaattaagaaggaaacatccgaagataaaggatgtcttattgtcagtatttaatcaatcaggttactcatccctcaggattttaaaatacgcaataaaagactgcgatagactttatgacatagtgaaaaatagcaaattaggcagcaatgataaatacatgtgtgattttttttactactttataatattatgcatagaattcaagaatggaaatctcagtgttgaagaatatcttaaatatgataaaattcacagagaatatcagtatgctatattctcaaaaacggaaattaacacaccaaatattatcattgtccagggtgaatatacggggtttgttttttttagtgagctactcagcctacccatttcataa

SEQ ID NO: 293290 - DNA, 546 bp, Morganella morganii
atgatcacttatgcttctgattttaatgaaatacctgttgccttaagcaacaacaaagaacttcgggaaaaaatgttatctctcattgctactaaaaagattgcgggtaaagcgattgaaggtgcaggtagaatggaagagtttaggacaattctatctcagctcacaaaaggtgaattgcgcttagatggagcaattagggctgttgaagagcaccttccacgttatgcatcaattcattcgggggataatagagtttttgctagtggttgggcagaacgtttaacaagaacgcagtttagtcggttctacaaccaagccgtattagaaatcgagatagcaagagaacacaacgaatgctttgttcctccatcttcacaggagcaagcatcatcgccgtgctcacaagttcttgctggtcgttctcatgacgtcagctatttactcaaattactagttacctcatatgaggatggcaactgggagaaaacaccgaagattcctgatcaccctcattgcacccacgtgattaagccaatgtcttaa

SEQ ID NO: 293291 - DNA, 270 bp, Morganella morganii
atgcgcagtcagattaacggccgtaaaatcattttaaaaaatgataccaccaataccggaggaacggttctcagaggttcctctgccgccagacaaaggcaggaaattgcctgtctgggcgatccggtgtattgcccgtcgtgtgatcaaacgggggctatagctgaaggtgacggtttaatgaaaatcaagggaataccggttgctctggagggacataaagtgacgtgcgggtgttccggcggatgtgtgcttgttgcggcagattaa

SEQ ID NO: 293292 - DNA, 192 bp, Morganella morganii
atgaatataactggcctgcgcacaggcgatcatcagctgctcgtcgggattttcggtgaaaccgcagatattttctcggatcgagccggaaaacagtttgtcgtcctgcatcacgcaggcgatcattttgtggtagttattgaccccgagctggcggatatcaatgttatcaatgaataccttgccgtctga

SEQ ID NO: 293293 - DNA, 630 bp, Morganella morganii
gtgcaggctcatgatgcgcagttgcagcaggaactcaatgatggacgccgcgcggtcggaaaactgctcgcggtaggcgctgaacgcaacaaacatcccgagggtcatggcgttgtcgatcaccagacccgcgccaatccacagaatggcaatctggtcacaggccatgataaaggtattcaccccgccgaacatcaggttcatcttggtcaggcggataccggtgttgatggaatcgactttcagattcagccagtgattaccccggcggtcgctcatgccctgggttttcaccgtggtgatgccgtagagggattccataaaatacgacccggcgcgtgcctctttgatcagcgattcctccgacagctggcggtaataacggtaggtcgccagccgcagcccgatatacacggcggtaaacccgagcacaatccaggtgagatggccgccgtagaggatcatcatgataaacacgccgatcagcatgataccgtccatgatcgccccgaccacgctggtggtaaaggtggtgcgcaggatatccagcgagccgaaacgggactgaatatccccgagcttgcgccgctcaaaatagctgagcggcagccgcagcagatgagtgaataa

SEQ ID NO: 293294 - DNA, 558 bp, Morganella morganii
atgcacgtcgccggtgacttcatgtttaaacggatacgacgggcgatccgggttgtaatctttctggatgatgacatcgctgcacagctgttcggcgtagcgccaggagaacgcggtgctgtcactgatatcggtatccgcctgcgggttataggtcagattgatgccggcggtcatgccgaggtggttgtcgctgtaaaacagtttcggaccttcttcgaaccagaagttaattccttcctcaaaggccagacggcaccagaaatcataggcggattcgcgcttctgagtgatgtaatcccgcttctgatgcaattcgtcctggtagagtttcagctcatttttgacgtgtgcttcattaagcagcgttgccagaacttccggcacggattgtttctgaaagatacggctgtcctgattgagggtcataatccacatttccgggcggatcagaaagtgataccaggttttgttaccgtcggtattgccctgttcggcagaggccagcaatccctgcacggtgcggactttaacgccgtcacgggtcacggtcagtga

SEQ ID NO: 293295 - DNA, 270 bp, Morganella morganii
atgcgcagtcagattaacggccgtaaaatcattttaaaaaatgataccaccaataccggaggaaccgttctcagaggttcttctgccgccagacaaaggcaggaaattgcctgtctgggcgatccggtgtattgcccgtcgtgtgatcaaacgggaactatagctgaaggtgacagtttaatgaagataaagggaataccggttgctctggagggacataaagtgacgtgcgggtgttccggcggatgtgtgcttgttgcggcagattaa

SEQ ID NO: 293296 - DNA, 195 bp, Morganella morganii
atgttaaaacagaatgatatgacagaggaagcaaagcgggttttttgttcagtaacaagtgaaccagccacatcgggtgaaatcggctgggtaaataatttaacagattcctgctgcctgctaatactgacacagttagtgatggcgggattaatcaaagaaaacatcaaagaaagaacatatcaaaatatctga

SEQ ID NO: 293297 - DNA, 183 bp, Morganella morganii
atgccagattttaaaactctagagaacgatatattaaaaaatgtgtttaggaatgccgacgatgcacaggaagcagttaacgatgcatttgcaaggaacgaaatatcagaagctgaaagagacgcgctcttaaaaataattaaggacaaatacaaacataagccaagcaaacccaaaatctaa

SEQ ID NO: 293298 - DNA, 780 bp, Morganella morganii
atgggcgcatcaccaaaagcaaagacccaagaaattctggggcttttaaccagttacataaacacgggtgagaaaatcgaccagttcacctttgttcgtcttttgcatgaagctaagcggttacctgatgaggtgcatcaaattgtatgtacggcactggtttatggtgcaaacaaggagtcagaaaaagcaattaaaatcttctctgatggattggaattgcatcgtagcgtatttttagcgacaaattacttggcatttttagcaagaaccgggcacaacaatttgcatacttgcgagtcaattaaattggccggcatctatgatacagacaggtcgcttcaattactggcagttggttctgcatttttgtcaggtaatgaagtggcgctatctcgatttgctgaacggctttataagttgtctaatgaagaccaaattgctggtatctgggagttatctgtgtggagtaataaaattaaatcctttagagatgcttctggcttaagccccagtgagttgacggaattaacccagttaatgggtggtttggcaactgaatttaatcaacctattgtttccgctgattattatattgataatcatggcacagatagtgcttatgttactcatgtgctgcatgatgacccagaaattatctcagatatgaatattgagttagctatgcgtttagctgtgtcaggactgatggataataagaaagcaacagcatggtttaaggctctgggtaagcaattaaaggatgaggtgtcacaatga

SEQ ID NO: 293299 - DNA, 390 bp, Morganella morganii
atgagtgtatccggagatgatttttttaaatttgctaatgattgcatgcaatatgacactgaaatagcttacagaaatgttattggtcggtcatattatgggttgtatcatgaagtgtgctctattttaaaaaattgtccagaaactactcatcagggagtcgctgagtatcttttgtaccgatcatggaaaggtaatgaagattacgataagtttgatttgaagtgtctgggtaccatgttgcaacaacagcacagtaagcgaaaatgggctgattatgatttatcccgtagtataacaaaaagtgaagcaattgagagtattagggtcgttgaaaaaatgatgaacaaaattaagctaatgaccaacgtggatagagcaacgtcttaa

SEQ ID NO: 293300 - DNA, 453 bp, Morganella morganii
atgctgtcagctgaacaaatggaaggcaaacacaaagacaaggttatcactgaccagcaaaaggtgattgataacgcctacaccagcatcgatatctttgaccgcgtagccacagcgaacgctaaccgtaatatgcgtgctgaggcacaatcacaggagaagcagattgaataccgtaccattatccggaaagagcctacctgtaatttgtatattcctcagtctgtttctgacgggctgctcagccacgcttacgccatccgtgaatcagcaatgcgttccgatcccagcatcactggcacagccagtcttggctccgctaccacccgccgactgacatattgccaggtggtagagtggatagaacccctgctgacggcgctggataaggctaacgagcagttgatggatatccggaaagtgaatgcagagcggaatggaaagccacaataa

SEQ ID NO: 293301 - DNA, 240 bp, Morganella morganii
atgaaaagtaagcgtatttactataagcaagtccataaagacgatgaagattatatttttttggatttagataatggggtttactctgtaagaatgggcaaatcgcaggaaactggattcaaccgatgggaaaattcagatgaaacaacaatgactcttaccgaattccttgcatcaagccctcaataccgtgacagagttgacacgttaattgctgagtttgagtccgaagataattga

SEQ ID NO: 293302 - DNA, 309 bp, Morganella morganii
atgacttgggaaactatttttgatggcaccgtgatgagtgaccacataactgtagaaaggtacattgatgatgtacatgacgataattatcctgtccgagttaaggcaacagataaaactcccccacaattaacaacacctatcgtagagcctgggtctatcataattccgttgccaccacatgacccgacaaaattctacacatttgagtacgataacattgatgatatgtatgacaattttgctgatgagtcaggtagaaacaaacaatttatggatgaattagaaaaagccattttaggcgactaa

SEQ ID NO: 293303 - DNA, 342 bp, Morganella morganii
atggcgggtaaaaaaaatacgccggagaaaccacaggaaccgggcggcctgccgcccgaactgatggtaaacggtcagagtaacccggaatcacagcagagcgattccggtgatgagcagcgttcagatcttgagcatgggactgataacgtgtatgtggtgactaaaggccgctgtgtacagcatgacggcgagctgtaccgggaaaaccagcagatcctgctggatgataccgatgctgtccgcctgattgacctgggtgtggtaatgacgctggaggcagtgcgggaaatgctggcgaaagccaatccgcccggcactgtaaccattaatgggcgttga

SEQ ID NO: 293304 - DNA, 408 bp, Morganella morganii
atgaaaaaaataacggttttaattttaactatgggtgtgctgctgtttagttcaatgaccctggcttctaaggttagccttactaggccttttgtgtgccctgatgtgtcacctttgcctcagcatgttaccggaagcggggacttggttatcgagggaaaaacatatcacttgtatcgtgctaatgcagcagatccgtcggcaccattgactactacaatatggcgttctgatgatggaaaaacagaagtagatatttatcaatataataacggtgatttcactcaagcatttattgtattttcaataaaaattgaacaattaccgtttaatgataatgaaataaaacaatatataaaagtatacaaagattcatactcggatagcgggcgtggttgccataattaa

SEQ ID NO: 293305 - DNA, 807 bp, Morganella morganii
atggtagataagcttaaaagtttgtaccctactgcactttttcattttacaaaaaaaatcgagtctttagaatctattttgacatgcaagtactttgaggtttcatatgcaaaagaaattattttttcgtcaaagtctcgatttgttatgggtattcctatggtttcattttgtgatataaggctatcacaattaaatgaacatacgattaaatatggaagtttcgggttgggaatgcataaatcgtggggagagcggatggggttaaaccctgtattatatatgagcaagcaatgttcattatttaaaaaatataatgacagaatgcttggtctaagtcagagtgttgggaagtttgttaatgaagagggtaaatcacatcctgattttcttcgtaaagttaagaattatagagaaacagcaaatccaataagatatatgaaaaattatcaaggaactcttaatcgggttggtaaaaagccaatcagtaactatagatttgcagatgaaaatgagtggcgttatgttccgggtgtaatggagactgaacattttgttgtttcggttccttctgaaaaaagaactagaagagatcataagcactggaaatctaaatttaatgatgaactaaaaaataaaaaattgaggttgccgtttaatataaatgatataaaatatataatagtagagggtgaagaggaacttgatttagttataagtattttaaaaaaatcctttcctgaaggtgaagttgataagctaataagtcggcttttttgttctaaacaaatatatgatgatctgtga

SEQ ID NO: 293306 - DNA, 639 bp, Morganella morganii
atgactaatccgcaatcatcagcctggtcgccgctgcgtaaccgtatattttttgtgttatggatggcgacattattttctaacatcggaacatggatgaatgatgtcggtgcgggatggctgatgacaaatctgagtcctgatcctgtcatgattgccaccattcaggcgatgaccacactaccggtctttttattagccttaccggccggggcgattgctgatattttcgataagcgtaagctgcttatttttgtcaatatcatgatgttttttgccgccgcattactggctgttctggtttatttcaatgtggtcagtatcggctggttattgttaattacctttattctcggatccggtgcggcctttttaggcccggcatggcaggcgattgtcccgggtattgtggcaccgcatgaattaaaagcggggatcgcactgaacagtatggggattaatatcagccgtgccatcggtccggcgctggctggtgtgctgatttcgcaggtggggctttatcttccttttatgcttaatgcactcagctttattgccatattgtggcggtatggtggtggaaaggggataaacacaaggaaaataccttaccggcggaatctgttgtcgctgcgatga

SEQ ID NO: 293307 - DNA, 1953 bp, Morganella morganii
atgagcaagaaggagttgaaacctgaactgttaacagtaggcaagctattcactgacaattatctgattcctatttatcaacggaactatgcttggcgggccgaacagattgagcaacttattagcgatattcaagactcggtggtagggggccaggacaactattttcttgggaaccttgttgtaatcaagcggggtagagaggatgagttcgaggtcatagatggacaacaacgacttacaaccctctatctgcttctgaccttcctggagcaagacggtgagggtgagaagccgtcggttggccatgcaggccacttgcaatatgagtcgcgcgcacgggcaactgaggccctgctgcgagtagcacaggaggcggctaaggagcacgttcgaccgcagggctccacgagtaatgcagatgctggcattcatgaaggctacagcatcatcaatcagttcttcaaacaaaatgaaaaccttaatcgctcacgcgaaaaattctccgatttcttgctaacgaaggtgactgtcgtccgtgcctcgctgccacccaataccgacctcaatcgctacttcgagatcatgaacactcgtgggcagcaactcaagcaggttgatattgttaaggctcgcctgatgagcaaactgcccaatcaatatgaacgcgaatgcttcgcgtgggtttgggattcctgtgctgacatggattcttatgtccagatgtctctgactcgtggtgacacaagtttgcgaaacaaagtgtttggtgatgaatggtcctggctggaggtgaccagcttcgcttcgctaatggaaagtcgtccgcaatccggcatcaattcatcaaggcaatcctccgaaggggtatcgttgtccttggatgaggcgttgtcaaaatacgctaaagaactagagtcaaattccaccgaagacgagggcaacgagcggtttcgttcgactattgagtttccggcctttctgctacacgttctaagaattatgaaaggcgatgaggtcgaagacgaaggcctgcttgacgacaagcgcctcatcaagtcatttgacgacgccgtaaataatgtacccgatgctaaagccgattgggtgcgtagttttgcatttatgcttctcaagtgccgcaacctcttcgatggcttcgtcttgaagcgtcaattcacggcaaacatcggtgacgatggcgattggtctctccagcgactgaaaaaaggaggcggggacaagaagccaaccccgacgtacatccatgttttctcggccagcaatggaagcttagaggaggacgggagtgctgacccacatacccgagatgtattgctgcttcagtccatgcttcggattacctacacttctccgcgaacgatgcactggattaccaaagttcttcgctggctctccgttaaagcccctcgagacgtgaaacatgcggatcttgccgatttgttgaagggatatgcccgcagcaaggttaaagagacattctcctttgagaaagatcagcaaccacaagggtttggtatcagccgtatcgtcttttcgtatctcgactatcttctgttgagtgactcctcaaaacgagatttcaaatttcagttcagaacttccattgagcacttctatccacagcatcctgacaaagaacagtcgggcgcggttgtttcaggttctagccttaacctgcttggcaacctcgcgctcgtaagcgtcagcgcgaactcaaaattcagcaatagcctccccagagtgaaggctgaaaacttcaaggatacaattgaacttcaaagccccaagctcaagagaatggcggaaatcacccgaaatacaaactgggacgatcaacagataacagcacatcatgaagcgatggtgacattgcttcgtgatgatgtaagtctggtggaggcaagcggaagatccaacccagggcgttga

SEQ ID NO: 293308 - DNA, 1281 bp, Morganella morganii
atggcgattaacggagagaacggtgttagtgcagtcaccgtggatgaactactcaagcaaggccttcggataccgaactatcagcgcccatacagttgggaggtatcgactgctctacaactggtggatgatatcagcgaagctcttcgagataccgaacgaaaagatattccctatgttttgggtgcaatcattcttcacgatgatggtgagtatctcaatgtagtcgacgggcagcagcgcctgctgactttgcgaatgattcttgcggccttagatccgataaatcatcaaatttcgatgtctgataacagcgaaacccctgtctccctagtttggatagagcttcaaaggcgcctgtcgcagttggaagataaaaaagagtttttggattttatctgtcacaaatgtcagttggtgcgtattgtgacggacgatattgatgaggcatttcgtgtctttgattcccagaactatcgcggcaaaccgcttgcccctcacgacttgctcaaagcacaccacctgcgcgaaatgcacgatgagtccgctgctatgaaagtggctgtcgttgaggcttgggaagccgtaaacgatgaggatctgggcaggcttttttctacttttttataccggatatccaagtggtcacgaggcgaaagctcgctcgaatttactattcgggacatcggcatgttcaagggcatatcatcacgatcccacaggtcattttcgccaaatctgcgatatcaccttgcagcacaagccgctatgccacttctaagtgcatggtcggtatcctctacacatgatgcacgaaatgccgggcgcagccgctttcagcttgatgccccgataatcgcaggacgctcatttttcgagatggtgacattcatgcttgacgaattgaagatactggaacaagaggttattgacagaggtttcaaaaactttggcccatctcaaagtcgctaccgctacgtgtacgaattgttcattgccgcgctgctttgctatacaaacaagtttggcgatgaagatgtagatgaagtgcgaaataggttattcgcatgggcatatgccttgcgggtcgagttacttcgtgtgcaatttgtatctgctgacaaccgagcgcgaggtaaaaacgatgcaaataaatcgccttttgttttgctacgtaacgcgatgactggaagtgttgtccgcaaacttccaatagcaagtaagccatacagcgataaccacgaaaaggaactcgttgcttttatcaaggggctacaatga

SEQ ID NO: 293309 - DNA, 1113 bp, Morganella morganii
atggaaatgattttatcaaaacatgttctccgatttgatgaggagtcacctgagataaatttaggtgtgctaggagaaagatgtatcttttgtaataaagattatgttgataacttatttaatattaaggctcatgcagtatcagaatttttatataataaatcaatttatcatcataatgaatgcaatgattgcaataataaatttaataaaattgaaagagagttctctgctttagttgagatagatagagctctattatcaatgtgtggtaaagatggggttgctcaagtaaatctttccaaaacgaaggattcgtctagaataacatttaataaaaaatataaaataccagttcttaataatgcaactccagatgaaggttatctaagtatagatccttctgatgatggtatcgtaataaaaaacatcagaaatagttaccataacactaatattttcaagtgtttaacaaaatatgctttatcgattatgccaatggacctgatccataaatatagtattttggctgagtttgtgttgcaagatactgatcatccttatccttattgttattctgtttacgaaaatgaattgccaaatggtgttattggggtgacaccaataatttttatttttaatggttatatgcatattaagaaaacatattttctatctaccatgcctttcaatggacttgaaataaaacttattaatgataaaaatatggatggtttggctatattctctattttttttggtaattcagcatttcaaatatttattccaaatgatgatttcatctgttctattgcagagggaagttttaataaagaaaagttaaatatatctctacctgaattttcaactacagaatttaaatataattccgaagccgtagagataatagatattgattgtagcactcataaaaaaattgtaaaagaaattgatgagagacatttctcaggtgtttgtattccattgaatacggaaaaactgagtcttgatgaaaaaaaagaacttgttatcaatgaattagagcaaaaattaaatttatcatatgacttatttaatttatggaatttaagactaacattgtcatggtattaa

SEQ ID NO: 293310 - DNA, 327 bp, Morganella morganii
atgaataaagaattaaacgaaacacggaagaatagcacgcctataaaagtttattgtttgcgaagtgaaaaagagaatattgaatctcaagctagaaaagcaggtatgagtgttgctaaatatttacgggaagtaggtcaaggctatcgaataacaggaatagttgattatgaatgtgttagagagctagcaaaaataaatggtgatttaggtcggttaggagggctattaaaattatggctaactataagagcagtattaaacaaaatagaatctaataaaaatgaaatagaaagaataatgaaagatattgcaatgcgaaaataa

SEQ ID NO: 293311 - DNA, 780 bp, Morganella morganii
atgacgataactggtaagaggcttgttccaacaagcacagttttacaggcgagagtggttatttatcagccgagtaaaaagcctttagagcgtaaaggtcagtggattgatacttcatttggcaggtgcagagtgacaggaagactgggtcaacggcacgctgatattgttgaaagtatgcttttcgtggcagaacgtaggcgagacataaatgatggcggaatagaattgctggtcgatcctgcaaaactgaggaaagtattatcagacaatcaatatagtggaggaaggttaaataaattacttctggagttgaaggctgcaacagtcgaaattgtgactccaaaacttgatcaaattggggagcgtattattggtggcttaattgatcatgttattccgtcaccaatgacaaggaataatcctcttccggatagtcagggaggagttcgcaggctttggaaggtaagactaggtatcgcgcttgttatgttactggagcgtgatttgtctttatattatcggcctgaattaattgcacgactgaaacatggaattagccaggcagtagctcgccatgtactaacacataataataacccgcctggtggttggtatctcgatacattatttgtcgcagtaagtggcaatgatgttagcgcaaagacaatgagtaattatcgaaccagaattaaagatgatatagaaagtttgcgcgttataggcgttgatatcaattcagaaaatcgggtcaaacgactcacaggggcccgagagtaa

SEQ ID NO: 293312 - DNA, 741 bp, Morganella morganii
ttgcttccgcctttttctgaatccgatccgtggcttccggaccttaccgggctgctcgtgctaccgcaggatatcaggctatccgggcttgcacttgcagccggcggaacagcaatagcacacgcatggcctctgccgtccggcggttcactgcggagtataacaaaaggcatgggacgcaaacgccagaccgggttcctggcgggacgcctttgcgcttgccggtcgctgtcggaaatgaacataactgccgcgtttccgctgcctgtacgtgaccgcatgccggtctggccatttggtgtgctgggcagcatcagtcattgtgcttcactggccgtggcaatgacggcgccggcatcccggtatcgtgtattgggggtcgatgtggagaccgtgatcgacccggccaccgcgctgagcatacagcacagcatttgcagtgatgacgagctgactgtagcggaaagcatcattccggatcgcgcacatgcactgaccctgattttttcggcaaaagaagcgctctacaaagcactttacccgctcgtgggccggtacaaggatttccatgctgcgcaagttaccggctgctgcgccgggacactgctgttgagactgacggaggactggaatgcacagtggcgatccggcacgcatgtgcaggtgagatttgcgtggcccggtcatgaggtactgactgcggtgtggttacctgtggtcacaaacagaccgggctgctga

SEQ ID NO: 293313 - DNA, 2928 bp, Morganella morganii
atgtccgccgatatttccgtttcgggcgtcaaaaaatatgatacatcattgcctctggggcgctgtctgtcccgatgggcgcaagactatggtgatcgcatcgccctgatcaatcaggaaggcaaaagcctgagctacgcacagttgcaggagcgcacggaacgtattgcgggagggctgtatgctgccggtttacgtgccggagacctcgcgatggtgcatatgccgaacactcagggcttcttttacaccgtgttcgcactgctgcggctgggagccgttccggtgatggccttgccgggtcagcgtgaacaggacatcgatgcgctgatgacgctggcccgtccggccgcgtatttcatcccggatgtgcacggctacccggcactggcgcaacggatgcagactaaacatgaaagcctgcggctcgtcgtgatagatggtgatgatgagtgcgggtcacacgatgccctgattctgcaaacgctgcagggttccggatgccccctgcctgaacaggcggcgggcgataccgcgcttctgctgctgtcgggcggcacgacaggcacccccaagctgatcccccgcacacacggggattacttccgcaattttactgcatctgccggactgtgcggattcaatcgtgatatggttttcctggcagtgctgcccattgcccacaatttcacgctggcatgtcccggagtgctgggtgttttccattgcggtggcacggtagtaacgacaacctcggccggttgtgatgaagccatgcccctgatcgaaaagtacggcgtcacccatgtggccttggtgccgccactggcggggctgtggatgcagggccgcgactgggaaaacagtgacctgtccagcctcagactgattcaggtgggtggagcccggccggaagcggatatggcccggcaaatactgaaaatcttcgggtgtaatttgcagcaggtctacggcatggccgagggcctgctgtgcttcactcgtccggacgacccgccggaaaccatcatcggcacgcagggccgcccgctgtctcctgatgatgagatccgtatcgtcgatgaagatggccatgacgtaccacaagggcaatccggacaattgctgacccggggtccctgcacgatccggggctatttccgggcacccgcgcagaacttactgaattttaccgcggacggattctaccgctccggcgatctggtgcgccgtgatccggatggcaacctgatcgtggaaggccggctcagggaacaaatcaaccgctgcggtgaaaagatctccgctgccgaagtcggagatgctatcagctcactgcacggtattcatgccgccgtggcagtcggggttcccgacgatttatcgggtgaacgtatctgtgctttcatcaaacccggagagcggaccatcgacccggcgggtatcagggcggagctgcgcgagggcggcctgagcgactataagataccggatcagattgaaatcatcaccgaatggccgttgaccgccgccggaaaaatcgacaggcagcgtctgatagccattgccggtcagcggacgcccgccatccccggaacaatgccgttgcactatctgcaggaggtcatgacgacaggttcgcaggcattcgggctggcggtaaaagtagcggtaatcatcagcagggagactcccggctacatcctttatgaacaccatggtgaatggacgctgggattggatagtgccatagaaatcatagttgatgccggcgggatcgttcgccgcagtgatggcaaaacctggcgggctgcctccgtcagcgaagggatcgaacaggcactggccgatattccgttccggcattggcgtgcctatggccgggccgacttcgagcttgcgtatctgacccatggtgtggacaaccctcatagcggcgggccgctgatgcgcctcgtgatcccccgcagcgaaatccgcttccggcacaattcggtgcaattacgggctccggatgccggaaccatgagccggctgaaagcgctcattgagacagccggtaagaaagaacttccgcgctgcgatgcacctgttccgctcgacgtgcgttcagcaggtggcctgcaataccgcaaaagtgtagcctcggccgtgcaggacatacaggaggggctttatcaaaaggtcattctctcccggaccgtggagattccgccgaacgtggatatggtgaccagctactatgcaggccgcaagtccaacacacctgcacgctctttcctgttgcaggatggtcaatttcaggcttatggcttcagtccggaaattgtcgtgactgtcgatgctcagcgcaatgtgacaacccaaccgctggccggcacacgtgccctgacgggacataaagaaacggatcaacggttgcgcagcgaactggaatccgatgtgaaggaaatcgctgaacatgcggtttcagtgaaactcgccatccgggaaatgcagcaggcctgcgcagagggttccgtgatcgtcggtgagttcatgaatgtgctggagcggggcagcgttcagcacctggcatcacatatcaaaggggtgctggcgtctcacgccagtgcatggacggtgttcgaaaagctgttcccggccgtgacagcatccgggattccgaaaaagcaggcactcgaaagtatcagccgccatgaaaaccgcaggcgcgggctgtacagcggttgcgtgatgattgccgacagcgatggcgcactggacgcgaccctggtactgcgatcagcgtaccggatggcgggccggacatggctgcaggccggtgccgggctggtgccggattcagtgccgcagcgcgaatgggaagagacctgcgaaaagctggcttccgtcgggtcttacctgttcgccgcggaggagcgctga

SEQ ID NO: 293314 - DNA, 1116 bp, Morganella morganii
atgatcagatccgcaatcagaaagaaccggcgtgtgctggttgttggtgccaaatttggtgaggtgtatctcaacgccttcctgcacccgcggcccgggcttgagctggccgggttaatggcacacggcagccgcagagcgcaacaactggcgcgtgacttcggcattccgctctataccagcccggagcaggttcccggcgacatcggcatcgcctgtattgtggtccgctcaacagtgctgcagggagagggcacccggttggcggcggcattcctgaaccggggtatccatgtggtgcaggagcatcccctgcacccggatgatattgtgcggcttcaggcgcttgcagaagagcgcggcctgcggtactgggtcaacagcttttatccccatgttcccgccggccgctgctggatagaccgggccacccgtatctgtcgttttctcgatggccggacacccgacacggcgcacctgaccaccagccgccagttgctgtattccgcactggatttgctgttgcaggcatgcggcgtatctgcctgcgacgaagtgcaggttcagataacggatggcgctgatgtgaattttacaccaatcggactgaacctgccgggtggatgccgggctgtgttacgccttcagacctatctggacccgtccgatcccgacatgtacaacctggtaatgcatcaggccagtttgatctggccatccggctatctgacgctggaagccagctacgggccggtgctgtggaccggcttattccatgatgcacaacacagcaaccgtgatcgcacgatgtaccgctatgcccgggaggaagatgcctatgcacggccctcgtcggtagtggtgcacagtgctcccgatacctggctggacgctttcgggactgagggcgcggcaggtattggccgcgtactggatgaactttgccgcgtactggatggcggtggcgtgccatccggattcagtcccgcataccaattgatgctggcccgattgtggctcactatcctgcgcgtcgcaccgccggtgactgagcggcacctttcaccgccgaaagctgttaccgggagggaactggagccgcgcaggaatgactga

SEQ ID NO: 293315 - DNA, 8481 bp, Morganella morganii
atgaataccgaagaacaactgaaccgccattacccggacggcgagccgatcgcggtgattggctacgccggccgctttccggacgccgctgacagcgatgcctactgggccaatcttctggccggacgtgaatgcaaccggcaattctcccgccgggaactgctggatgcgggaatttctgccgccgtcatcgatgacccggcctatgtaccgtgcggaaccgtcgtgcccggtgctgacaccttcgacgcagaactgttcggctactcacgtcaggaggccgagcttatcgatccgcagcagcgactgtttctgcaaatagcctggcatgcgcttgaacatgcaggctatgcccccggggctgtgccgcacaagaccggggtattcggttcgggacggatcagcacctacccgggacgtgaagccatcgatattgccggggtggcgcatgtgcgcagtcttcagtcactgatgggcaacgacaaggactatgtagcgacacgcgtggcttacaagctgaatttgcacggtccggcaatcagtgtgcagacggcctgctccagctcgctggtggcaatacacatggcttgcgagagcctgcgggcgggcgaatgcgacatggcgattgccggtggcgtggcagtgtccttcccgcaggtgagtggttatctgtaccagccgggcatgattttctcgccggacggacattgccggcccttcgacgtgcaggccgggggaacctacagcggcaacggcgcggctgcggtggtactccggcgcctgccggacgccctgcgcgacggcgatccgatagcagcgttagtgcccgggagcgccatcaacaacgacggcggccggaaggtcggttataccgcgccgtccgcagcggggcagcgcgaggtgattgctgatgcctggagcctggccggggtcagcagccggcagttcgggatgatcgaagcgcacggcacggcgacgccgctgggggattccattgaattacaggcgctgcacagcgtgtttcatgcgaacggacagggaccacgctgcgcgctggggtcagtcaagagcaacatcgggcatctggacaccgcagcgggcatcgccgggtttctcaaggcagtaatggccgtcgaacgtggcgtgatcccgccgtgcgtgaattttctccgggccaatccggatctgaatctggaaaacgggcctttctgcgtgcccgccggggcgcaaccctgggatgtgcccgaccgcgtggcaggcgtgtcatccttcggtatcggcgggaccaactgccatgtggtcgtcgcgtccctgccaccggatttgcaaccgccgccgcagccggatgtcacggccggtgccacgctgctgctgagtgccaacagcgaagacacactacggcgtctggccggtgcctacgcacaggcactgcaaacgcagcctgccgccgatctggtctgtacggcgctgacagggcgaagactggatcttccctggcgcctggccgtaccggtgtgcgacgaaacgataggcgcgctgaacaccgtggcctccggcggggatgacactctggtgcagatggggcacagcatggcagggaaacgggtctggctgtttaccggtcaggggtgccagtggtccggcatggcgcggacctggtgcgaaacctcaactgcttttgcgcaatgcctggaacgctgcctggccgcgtccggaaacggggaccgtgccttttccggtgcgctgcggcaggcactgatggagccggacagcagattgctccggcacatggagtatgctcagcccgccatcgtggccttcgaactggcgatggccgcacactggcaggcgcagggactgatgccggacatcgtactcggccattcggttggtgagtttgcagcggcggtcgttgccggatattactcccatgaacagataatgcccgtggtacggcagcgcggcgcattgatggatcgttgcagcggtggtgcaatgctgtcggtatttgctgatgaggcccgggtcttacccgcggctgcacggctggggctggatctggcggcatgcaatggcgggcaacatctggtgttttccggcgaacgcggacaggtgacaacgttcgctgccgggctggagaacataggggtgcgcagcaatctgctggcagtcaccggagcggcccactcacggatgcttgatccgatactggatgagttcggccgggtcgcaggccgtttgcaggcacaggacggcacgattatgctgatttccggcctgaccggcgatattgctgattcatcgcagttgaaccagccggatttctggcagcgccatatgcgtcacccggtacgcttcattcaaagccttcgcaaggcgctggaaaatggcgcgaacctgttcctggaaatgggaccggacgcactgctgaccggtatcggacaacatgaattgggcgatgccgcacactggatcgcaggcgcccgccgtgctcagcctgcacagcactcactgaaccgggcgttgatgcaattgtttgccaccggcatcgatctgccccgatctgcgctgccgggcggctcgggccgtaagtgccgcgcaccgctgtatcctttcgcgttgcagcgctactggcgtgaagcgccggcggtagctgccggatcaccgcttttgccggaaacacacttgccggaggcatgcaatgtggcggacagactgccgggccgggcactgaccaatgacggcgactatctggcagattggtctgattgcgcaggccggaaagccccgtggcaggatcgtatcgttcaggcctgccgggaaatggcccgccgtcatggtgatgtccggaaagtaccggtagtgaatgtgtctgcacgtgctccggactggttaagccttgtacgtctgcaatggcaggccgtgctgatgcaaccggcccggattgacctgaccttgctcgcacccgatggtacctggcaaaaaccggttgctgcacctgcggctgataacagccggctgcccttattgacagcaacgcctgaaacgcactatgactggtgctgggagcgggctgaaccggcttcgggcaacgctttccatagtcgtttctgcctggccggacagaccggcggatcactggcagcggagctgggacaagccggtatcagcctgactgacaaggccggagatacgctgttagtgttacctgctgcaacccggccggaagacatcgccggggtcatgtttaatgcgctggccaaccacaaaagtggtcgcatcctgatcgtgacgcgctcagcctgggctctggatgagggtgaaatcgccgatgccgtccaccatgccgcgtggggactggcccgtagtattgcgcaggacccgggccgcgccattactgtggtcgatcttgccgcaacagccccctggcaggacctgatgatcgcactgcaaagcatgccggatcacagacaatggcttgccgtgcgccggggacaagccctgacgccccggctgcaatcccatcaatatgcggctgctgagctggatgaacagagcctgcaaggcaacggctggcatgtaataacgggcggcctgggcggcctgggcagactgagtgcggcgtggctggccggccgcggcgcacagcggattgcgctgctcgtgcgtcgcaggcatgacgataccgctgatttcacagcatacctgcatcagtgctatggcgtgacggtaacatgcctgatctgcgacgttgcagatatgatggcactcaatgtcgtactgaacagattgcaggccgatggtggtgtggccggcgtgattcatgcggcaggtattccggatggcagtctgttcccggccggaagcgccgatcaaccggccacagtgctggcggtaaaagcacatgcagcccggaccatttacgaccggctgcgcgaagcgggcaacccgtcgtatctgctgttgtattcctctgcggcggcggccctgggcagtacaggacagacaggctacgcgctggcaagtggttatctcgatggcctggcgtatgaagccgccacggacgacaacccggtccgggtcacgtcggttggctggggcgcctggggtgaaacaggaatggcggcagataaatcgttgcagaaagcattcgcctctgagggtatgggtacgctgagcgatgcagaaggactctggcatctggagcaggcactgtcacgcggctctgcttatcgcctggcaatgcgtgtgttgcccggccgcataaacgctgaccgcaggcgactgctgcagatgccggagcagacaccgccccccgccgcaataacagcacaggcacagaccatggatttaccggcagataagctgactgaccccggtgaggcagcacaatggttatctgcgcaaatcgccgcacaattgcggccggacaatcccgcacacctgtctcccgatcgtgacctggtacaactgggactggactcgctgcggttccttgagctgagtaacacgatccaacgccgtcttggggtgcgtatcgacgccgcacaagcctatcaggacttaaccatcaacggcctgagccgtctgatcgcggcacaaccggcacaaaatccgggcagtccgcagcagccggcatggttgcagcacgatgcaccgggacgcttcctgccattcccgctgacccccatccagcatgcatactggatgggacgtaccagcctgatcgattacgggggcgtggcttgcggggttctgttcgaatgggatctgcaccgtgaccagttcgatccggcgcgtttggaacacgcctggaatgcactgatacaccgccatgacatgttgcgtatggtgattgacggggatggacaacagcgggtactgaaggatgttcccgaataccggatcgggcgccgtgacttgtcggcgcttaccgccgatgagcgggaacagcggctcgccgatacccggcgcgaattgtcctgccgggttatgcctgcggatcgctggccgctgttcaggctgatcatcaccgatcaggatagtgagtgctgccgtctgcatatgaacctggatctgctgctgttcgatgtacagagtttcagggtgatgatggacgacctggcagcgctctatcacggcgatagcccggcgcccctgccgatcaccttccgggattacgtgcttaacgatcagaagcaccgccggagcggcgaatggctcaaatcctggtgctactggcagaatttattgccggacctgccgcccgcaccaaagctgccgttatccaaacacgatctgaccggccggcaaccggactttacaacctatcaggcggtactggatcgtacaagctggggaaggctgaagcaggaatggcagtcccggggcgtgacgccttcggcggcgctgatgacgctgtttgccgcaacgctgaggcgttgggcgcggtggcctgccttcacactgaacctgacgtttttcaaccggcggccggtacacccgcagataaaccggctgatcggcgatttcacttctgtgctgcttattgattttgatctgagcgacccgtccgtcaccttacaccaggctatcgaacgtacccggcaacgcttgcgccggcgtctggcacacagcggggttaacggtgtggaattgctgcgtgaaatgggccgtatccgcggacagacacatcagccactgatgccggtggtgttcaccagtatgctgggcatgacaccggatagtcagacaaccgaccaggcgatgacgagcctgcttggcgatcccgtgcatgtctgtacacagaccccgcaggtctggctggaccaccaggtcatggagatcaacggagagctggtggtcaattggtactgcatggacggggtgctggccggaaacaccgcgcaacagatgttcggggatttccgcaacctcctgcaggccgtggcatcggacccgcaacggatggggcagcggaaactgcggaatatacatgagttgcaaccgcctgttcaccacggatggccagccgtcagcgcaggcagcaaacctgatccgcgcgatatcgaagctgccgcatgccggcaggatggcgtcttgctggccgatgtccggcagcatgacagtccggacgggctactgctgaaagttgtggcggcacagcgggagtacactctcagcaatctgcccggcctcaccccggagatactgccggacccggccggactgaacgatgcagaacagcaggcattcgatacggtgtggacagcactggaagcccgcgccttgcagggcatcgccgccacgctgacacggcacggattgttcacacaggcgcaccagaccgctgaccaggacagcatctgccggcgactgaaagtgctgccgcagttcgaacgtatcgtccgccagtggcttcgtgccctgtgcagcacaggctggctgtatcaggacggcagaaatttcgtgtgcctgcagcccctcagccgggtgccctctccgcctgcggcacctgccagcgtctggggcgacacgctgtctgcctatctcgatcgcagcatagaacgccacacgcaactgttgcagggcacctgcccggccctggagctgttcttcaccgatgacgacgccgttacccgtgctctgtatgcggaaaatcccgccgcacagtgcgtgacgcggaacgtagaatacatcgtgcgggcgctgtcacaatctgacgaaaccactgacgggctgcgcgccctcgaggtcggcgcaggcaccggcgcgaccaccggcgcagtgctgaacgcacttggcaaacaccttcacagctatcattacaccgatgtctctgtgcttttcctggacgacgcacgcaagcggttcgccgcacgtgacgatctgacctatggtatcttcgacatcaatcagcccgtcgattacacacaacacccgccggggggctatgacctcgtgattgccgcccaggtaatgcacgatgccggccatatagtgcgatcactgcgccgcatcggcagcctgatgcggcccggtgcacggctggtactgatcgaaacaacccatagtgacagcctgttacaaatggccagcgtgggtttcatcgagggactgggcaattaccgggatgagcgtgtcatcgacgaccgggcgatgccggatttgtctcagtggcgcgaagcgctgcacaacggcggtttctctccggaactgatctggccggaaacagagacatcgccgattcaccagcatgtaatcgtagcgcggctggtacgtgccgctcacgtcgactgtgtcgcggtgaagcaggctttggaacgtcattttgacggtgtgctgccatcgctcgaagtgcggcaaagcgaactgcaggacatgttcacccccgaccatccctgccctccggaacagccccccgcgcaatcgccggatgccacggcgccggtgatacccgccggtgacgcactgatgaacagtgtcgcgcaggtctggcaaacctttcttggcagaccggtgcatccggcctgcgatttcttccgctgcggcggcgacagcctgatcgccacccgtgttatcgcacagctcaaccgcaacggtgtcgcgggtgccagtcttcaggcgctttttacccgcaggacgctgggcgctttctgcgccacactcagagaaacggcggccgcggatatggaaaatgtgctcgtacaactcactccgggaacgacagatgaacgcctgttcgtgttccatgcctcggatggcggcgtaacatcgtatctggccttcgcccgctcgctggatgctcaggtatggggattgcaggcaccggaacaaatctcggctgacagcttgtccgcgctggcttccggctatctgcacgcgatgcaggtacagcccggccatgcacccgtcacgctggttggctggtcatacggtgcggcagttgccgccgaaattgcccgcatactgcacgaccgcggccgggctgtccggctggtgctgatcgaccccgtgtccggagccggtttcgctgttgctgatctgtccgcactgatggtgatgctgtctgacgaacacaaaatcacactgccggataactggaaccgccttgacgaatcaacccgtatcagggcatttgtctccggcgcggctgagaccggcgtcattgatgaaaccctgtcagcggcagatgcacaccaatggctgacgcgtatcttccgcctgctgaatctgctgccggcacaccgtatcgggtcccctgtacccgtcccggtcttctggattgaggcagacagtcattccggacaacaaaaaacagccgaatgcgaatgggcagactggaaggcacatgcacaaaccctggtcgtccgggccactcaccggcaactcatggaagatgaaagcgttgccgttacgctgggccggcaagtacagcaatggctcttttcccggaacagccatcggggagatgtgacatga

SEQ ID NO: 293316 - DNA, 6213 bp, Morganella morganii
atgccagattcggaacagaccggaacggaaacacaggtgccggacgaaatgttacgggcggagctcgctgctgatttgggcatcgcaccgcaagagctggatgccgataccagtttattgacgctgggactggattctatgcgtctgatggcctggatgcaccggctgcgcaaacgaggccacaaagtcaggcttaaagaactgtaccagcagcctaccctgtccggctggagccggttgctgcgcaggtatcccgtcaggctgccaccggaacaggattttccccctgccatgccagcaccggtctggccgacaatgactaatggcaacccctttgaactcacaccagtgcagcatgcttatctggcggggcgtgcgcggcatcagacactgggtggcgtgggttgtcatctgtatcaggaattcgacggtgcgggactggatgccagtgcgctggagcgggctattcacaccctgactgaacgccatcctatgctgctggtgtcatttacggacgatggccgccagcagcgccgcgccggtacgcgctggcggggtctgaccctgcacgatttacacaccgcctcccccgctcagtgcgaagcacacctgcaagccatgcgcgagcgccacagccaccgtgtgctggccgtggaacagggcgaaaacatcgactttcagctttccttgttgcccggtggccgtcaccgcctgcatgtgaacatcgacctgctggtactggatgcgatgagtttctgtctggtattcgacgagctggcagcgctggtgcgcggccaggtactgccgccggtatctgcggactacgatttcagaagttatctggcacaggccgcgcaggaaaatgcatacgcccgtcagcaatcagagcagttctggcgcggatgcatcaacaatctgcctgatgcgccacatctgccgctgatatgcgggccggagcagatcaggcaggtgcacatcacccgcaggcgtatggaaatcagtgctgccgactgggtaaatttcaaagcccgggcaagcgaagccggtatcactccgacgatggcgctggtaacctgctttggcgcggtgctggcccgctggtgcagccagccccgcctgctgctgaacctgacattattcgaccggcaaccgttcaatgctgcagtcgggggtatgatcgccgacttcaccaacattctgctgctggacattgcaggcgaaggcgatcgcttcgacgtgctggcgcgggccaatcaggcctctttcaccgatgctttcggataccggtacttttcgggtgtggagttgctgcgcgaattgcgcaaaacgccgggcgcttatccgcacggtgcacctgtcgtgttcaccagcaacctgggccgtccgctgtatggccgggatgcagagcgtacgctgggaacgccgggctggggcatttcgcaaacaccgcaggtctggatcgaccatctggcctatgagcatggcgattcggtgttcctgcaatgggacagcaacgaggccttgttcccgcccggaatgccggatgttatgttccgggcctacacggagctggtgcggcacttgctggcccggccgcaggcctggcgcgaggcgttgcccgatctcatgccgcagtcgcagcgggaagtgcgggcacgaatcaatgcttatggtgatataccggcccccgggggcttgttgcacgacggtttccggctgaaggtacaaagccggccgaacgctgtggcactgattcacggcgggcgttgcctgagctatgccgctctggatcgcctggtccgttgctgcgcgggcgcactggtgacgcagggtgtgcagcccggcgaccgggtggcaatcagcatgtccgggggcatcggtcaaatcgtggcagtactgggcattctgttcgcaggtgcggtatacgtaccggtgtctttggatcagccgccggagcggtggtacaccatctgccggaatgccggagtgcgtctggtgctggtatgccgcgatgatgccgcgtccgttgcggcagacagcattaccttgctggcctggcaggataccgccggacatacgccactggccgaaccggtaacagccggtgcgcgtgacccggcatacatcatttatacttccggctccaccggccagcccaagggcgtcattatttcacaccggggagcgctcaatacctgcgccgaactgaaccggcgctatgccgtgacggcgaatgaccggatgctggccttatcagccctgcatttcgatttgtctgtatacgatattttcgggctgctttcagcgggcggcgcactggtactggtaaacgaagatcagctccgtgacccggcctcctggtgccggatgatcgaacagcatagtgtaacgctgtggaacactgtgcctgcgctgctggacatgctgctgacctacagcgagggattcaggctgcaggcccccgcgcgcttacgtgcggtgatgatttcgggtgattggatcggcccggacctgccggatcgctaccgggcctttcgtgctgacggtcagttcattgctatgggaggggcgaccgaggcatcaatttggtccaacgtcttcgatgcggggacaataccgcccctgtggcgatccattccctacggctacccgctggcccgccagaaataccgcgtggccggtgctgatggccgggattgcccggaccgggtccccggcgaactgtggattggcggcgaaggtgtcgcacagggctattttaatgaccccgaacgcaccgcacaacagttcgttatccacgatggcgaacgctggtatcgcaccggcgacatgggctgttaccggccggatggctgcctggaatttctgggccggcgcgaccagcaggtcaaggtggggggctatcgcatcgagctgggtgagatcgaggcagcattgctgaaaaccgaaggcgtcaggagcgcagtggcgctggcccggggtgaacgggagaagtcactggcagcgtttgtggtgccgcagggaaccgcgctgctgagtgcgttacccgctgagccgggactaccgcccgactatgccgtactgctgcccggagataccacatacaccggaccagacacggaagcgcagacggctcgcatggtggcgggttttctgttcaggcacctgacccgccggggtgtggctctgtctgacaggatcaccactcaggaagcactggtgcactatggcgcacaaccacaatgggggaatctctttgcactctggctggaattcctgtatcggcaggattacctgcaacaccgggccgatggcagctatacggcactgacaaacctgccgtctgacgaaaaacgtcccggggatcctgcgctctgcgaaatagccgccatgctgctgactcatcatgaaccgctcgaacagattttgcggggcagacgacccgcacaaacgttgctgaatcatgctttctgggcgccggaacagttgctgatgcgcacacccggcgcaaacgaagccatcacagcgttggccggtatggtacgggcgctggcggtaatgctgggccgtccggtcagattgcatgaggtgggtgcacgcagcgggctggcagcatcacggctgctcgggcacctgcacgcctctgacgcggaatacaccgcatgggatgaatcaccggagatggtgctgcgtgcagccgggcacctgaagccctatttacatgctcaggcacaacgctggcacaccggtgtactgcaggaagaccttcatcaggccgatctggtctgggctaacaacgcgttacaccgcctcggtgatgcgggtatgcagaccatgctggcactggcagcaccatcggccctggtcgtcgtgcatgagattaccgggatatccagcctggcactggtctgcgccgggttactgaccaatgaaaatgccggtgatccggcggtccggctgcacgatacgcgcgggtggaaaaccctgctggcgcaccggggtatgcgcaacgaggctgatatacgttcgggccggatacagtgcctgatagcacgtgcaccacaggatgtactgcgcccggatagcggaaaactgatcagtgccttgcatgacttgctgccgggttacatggtaccgcaacagattttcttccgggatgccttaccgctgaccgccaacggcaaagtggatcgccgcgccctggcagagctttgcagtcacggacaggagcatgcgggcaccggatgccggttgccgcaggacggtaaggaacaggcggtggcggcgctgtggcgtgacctgctaaaagcggacgtgatttaccgtgacagccatttcttccggctgggcggagacagcctgctggcgacccggctgatcggtgaactgagccattgcggctatacggccgggccgggcgatctgttcaattttccggtactggaagactttgcagccgtcattcgcagcagtgatccggatgttccggcagcacatgtcctgcgccatgacccggcccggcgctacgagccgttcgcgttgaccgacgtgcaacaagcctatctgaccggacgccagcccggttttccgctgagcgggattggctcacatttttttatcgagttcagggtcgatgatctggacgtggcgcgtttcgaacagaccatgaatcgcctgattgcccggcatgataccttgcgtgccgtggtacgtgacggcatgcaacaggtactgccgaaagtaccggacttcgttttacgctgccaccgggttgctgattttgatgacgatgagtctgcggcgcttcgcgggcgactggcccgccgggtacccgatccttctcgctggccggtattcgacattcaggcggcactggccgataacagtccgcaggcacgtttgtttgtgtgcctggacaatctgatgctcgacggattgagtatgcagatactgctggccgaactggaacagctctataccaaccccggtctgtccctgcccgcgccggagatcagcttccgggactatctggaataccggcaaaacaacccggccggcgagatttcgcggacctactggtcacgtcgtctggacaatctgccgcctgcgccccccttgccgttgcgcagcgatccggcacaactcagcgtaccgcatttcgcacggctggaaggccggctttgtgccggacagtgggaagcgctgaaaacacgcgcccgcaccgggggattgacgccatcagtgctgctgctgaccgcctatgccgccaccttatcagcctgggcgcaatgcgacgatttatgcctgaatctgactctgtttgaccgcaggccgctgcacccgcagatcgggcaggtgctgggcgacttcaccaccttgttgcttctggcctggcaccctgcggccgattttcgcgacagtgcccacggtctgcaacagcgtttgcaccaggatctgccgtaccgtgacgtgtcggccattcaggtgatgcgcgaactggcccggcgccgggggcacgccgcagcatccatgcctgtggtattcaccagtgccctgggcgtcgggcagggtcaattcctgtccggggagtcgtggatgaaaccgctccggggactgtcgcacacgccccaggtatggctggatcaccaggtatacgaatccggggatgaactgtgcttcaactgggattacgtcgaacagctattcgaaccgcagcagatccgaaccatgttcggacgctataccgcactgttgcagcggctggcaaacgatgacacggcctggagcataccgctggcggcactgatcccccgtccggaaggtattaccggaatggctccgcccgacgccggatcgtctccgccggaaaccacgccggtggttgcattatctgccggtgacgcgcgggtacaggcgctgtgccggcatttccggcaggtggtcggaaaaccgatccacccgcgccagtcgtttttcgacgcgggagccacatcactgaagctgattcagctccatgtgcatctgacccgggcaggacacgacggcctccgggtgacagatttgttcgccagcgccaccccgctgaccctggcagcacacttgtatggccatccggacactgcagatgacgctgcaggctctgatgaagaacgccgcgaattactggcacaacgcaaggcccgcgcacagcgcaggcgcgggagtaaacgatga

SEQ ID NO: 293317 - DNA, 1503 bp, Morganella morganii
atgctaataacggatctcttcagccacaagatacattctagtagtaatgattggccagaaaaattaatagatatagccacaatttttaataaattcgatggtcatccttacgataggttggctatcgaacaagagttgctaaaaatcagccctagggcaactaaagttgctcgtgatccttcaaaatttagggatgaaataagtgcatatccggcttatttaggtctatatcgtcttagtattgtaaatggtgtttggcatatttatctaagtaattctgccaaacaatttttagttaatgaagaaccaaatgtatcggcttttttattaatacaactatcaatattccagtatcctaatggaatgggagtagcttatagctcagggaactctaatctaagaatccaagcgaacaccaaggaaagaactcttagttttattagagataacatccatctatcgcctctaagactaatatgtaaagctatacatgctgattctatagtaaataatattgatatttttgaagccagtgtatcctacgaagaaatatttattctggcaaatgataaagatataaatactaatgtgtctcccgatgaattattgatacaagaaaagttatatttaataagagatcaaggcattaggtttcaagggaaatatgaaagccgttttcatattctaaagcatacagatctttttgaaattgaacgatctcgaataaagttaagagctccaataattaaaactgataaagaattaattttagataaaatatccacaattaataatattagcattcagttcaatggatttgacaatgttaaagatgaggtcgatttactcaacgaacttcagacttgttcatggtctaattattatgatgctttaaaaacccttgaccaagagacaattctgaaactaacacacgaaaacaatattgttactagtgagttggcagattttaccgaaaaagggaaaatggttgaaattatttcctctgataaactatataagttcaaagaaataaacaaatctattttggaaaagaaaaataactataaaaataaagtatatacagaccctgaattgacaaaaattcgacgtcaaagagcgaatctcacacacaaaatattacttgaaaaactcaatgattatttagtatcgcaaggcgctacatcccttgaaaatgaacatattgatttatatgccaaattaaaaaacaatgaaaaattcttatttgaagtaaagagcattgatgatagtaatattttaagccaaaccagaaagggaatcagccaattatatgaataccgatatcgatatcaaagtatcattggctatgacgttaatctatgccttgtctaccctcacgaacctaaatacgtcccatggttgcaggagtatctatgtatagatcgagatataggtattatgtggttcgaagatgataagcctattttttcaaaattctgtgagcatctggaaaatataatttaa

SEQ ID NO: 293318 - DNA, 1122 bp, Morganella morganii
atgttaaatatcaatacattaggtttcttttctggtggtggtggtttagaccttggattctctgccgctgggtataatattattttatcttcagatattgatactcactcctgcgaaacattaaagcttaaccaggggaaaaaaagttatgtgaaagagcatcctgttttatgtgaagatgttagaaaaattgataaaaaagcgattaaaggaatcattggtgatcaaaagattgattttgtgattggtggaccgccatgccagtcgttttcggtctttgggcggcgtaaaggtcttgatgatccacgaggaaacttagttttcgaatatgtaagattaattaaagaattaaacccgagagggtttctatttgaaaatgttgccgggctaaaaagcatccatggtggtgaactatacaaagagctagctaaagtcctttcaatggatgggaaatataaaatatcagcacatgaatatgaagttgctgaatacggtattccacaatttaggaaaagaatattcttcataggctcattagatggcagagcaatacctccaatggtgccaacccatgctcaagcaaataccttacaattagattttaaaacatttaatactgtacaacaggtattaacaggattacctacccctataaccgattggaaagctatgccctatattaatggacatgttggaagaaaacatagtcagttaattgtagatagatataaatccttaatatacggggaaagagatcacaaaactagaattaataaattagatccagataaacctagctatacaattattgttggctcggatgctggtggtggaaaagggcatgttcatccttttgaacctcgtgaagtaacaccaagagaaagtgcaaggatccaaacattccctgactggtgggaattttttggtactggacgtcatataattcgacaagttgggaatgctgtccctccattgtttggtgcattaatagcaaatcatgttgcaaaagaaatgttctctatcgatacagaacgaaatattgatgattttatagacattcttgatttggggtttttccaaaatgctaataacggatctcttcagccacaagatacattctag

SEQ ID NO: 293319 - DNA, 381 bp, Morganella morganii
atggggcgatggcttgccggccgcctcatgaaggagctggggctggtaagttgtcagcagcctgttcaccgatataaacgtgggggacacgagcatatttctatcccgaatcacctcggacgtcagtttgcagtgacagcgcctgaccaggtatggtgcggcgatgtgacgtatatctggacaggtaaacgctgggcttaccttgctgtggtactcgatctgtttgcgcggaaacccgtggggtgggcaatgtcgttctctccggacagcaggctgaccaccagagcactggaaatggcatgggaaagacgtggtaagccatccggggtcatgttccacagtgatccacaaaaaagcaccggaacaaaccggtgcctgtaa

SEQ ID NO: 293320 - DNA, 327 bp, Morganella morganii
atgaacaaatatcgtgacaaatcagactttgagattaataaggctgtggctgttaatattaatggcactgacgctgttttagaaaagttcggtagcatatatatcagtgatagcgatagaggtgcgatggtgagcttctccccctgcaacaacccagcggacgcaatgccgattattattgagaatggtatatccagtttattcaacgatgatgaatggatttgtagcgtcccgtatactgaatttctttccattaatgaaagcttataccgtgccgctatggaagtatttctgatgatgaaggatgcggagaatgaaaaagtatga

SEQ ID NO: 293321 - DNA, 570 bp, Morganella morganii
gtgagtgaaattaaatcgctggctgatggtgatgaattaaataatgaaacttgggctgattttattgaacgccttaaatatcaacatcaaggcgaaggtatcaatcagcattttacagcaagtccaatttttaccgtcagagagaaagttaaggtaaccggcagtgatgacgataatgtcggaatctattgtcaggatgattatcacgatgatgttgatgaagccctcagtgtccttgatgaaaacattgcaaaaaaggtactcgagcaagctgatgaataccacgtgtacgaatggactgaattagatgaccacagtaaagctaatgctattacagaggtcattcaggatgcttatatttattactggaaatgggattataaaacagtaaatgcccaccttaccagagaggcggctgagcgatttattaaacgtaaacagcatgattatggtgagttgcatgtctatgtggaatcagcatactggtgctgggaattacgaacaataattgacggcattctgaacggtaaaattaaatacatcggtgatgacaatgaacaaatatcgtga

SEQ ID NO: 293322 - DNA, 246 bp, Morganella morganii
atgacagataaaacaggcggttcagcgtttccaatgcttggcagtgtagcctacaactcagattggagtatcgacccaggaatgacgctgcgcgattattttgcagccaaagccatgcaaggcgattggacaaatcaaaactcagacgttggttactttgcaaattgcaatgacgagcagctagttaacgctgcaaaaatatattaccgcatggcagacgcaatgctcagggcaagggagaaatag

SEQ ID NO: 293323 - DNA, 270 bp, Morganella morganii
atgactaagaaattcccgagtcaagagatggacaggtttaacgttcgtatgccagcgggcatgagagaagagatagccagaattgccgaagaaaatgggcgttcaatgaactccgagatagtccaaatacttcaagaccacattgatagccgcaaaggtgacctaccggcgtatgcagtaaaggacattgacggcattatgaaaaccttcaaggattttctgataaaggaatacacagtaaaaatcagtggagataaggacaaaaaataa

SEQ ID NO: 293324 - DNA, 171 bp, Morganella morganii
atgagtaatgaactacatgaacagacaagaagcagccggttcacattgaaccttccagagcgtatgcgtgctgagcttgaagaaaaagcgaagatggattttttgtcacttaactccgcaattattatgcggctggccaagagtctgagagaggagagagcggatgcctaa

SEQ ID NO: 293325 - DNA, 1206 bp, Morganella morganii
atgctggctaaacaagatctgaatggggctattttcaatacagaattaaatgacttttgtagaaaatatttcattaaaagacaagtagaaccaacacgggatgaggttcttgcatttccgaataaatataatgagataaaatcatcattatttgaaagtctcatactacacaatgaagtcaactttaaagttgaaggtgaaaacatacctctatgcgtaatgcttaatgaaatagggttgaaaggtgtcgaggaattaattgatgaaggtgccctcagttttaccttatggactccaatagttatgtttttagttgataatcagtatggtgtagaccctctatgcgcaggcaggcacaataacggtgtatatattgatcctgaagagtcgatcacttcaggactgggattcatgcaaaatgggctcagaaaaggtgagataagaacaataacacgaaagttacgcgacctttatcactcagtccccaaaggtatagaaaataattgtgtccgtataacaatgtcagctctcgaaagcgaaaagcttgagcaactcggattaagcttgcaggataaaagcaagcatgaacttaacgaaaaagaaaaaaagacactaattaattgcgcatcagatttgttaggttataagtatcttatacaaaaaagagctcaagtcagcccaaccagtaatatacaaatattacttgaagactcaataaaaaaagcgaaagagatttctaaggaagaattattttccgcaatagtacagttcgaaaacatacctgatattcgcacatcatttcaaaaaatgggtcttcccatggatgaattgatgaaattaagaagaaacaaaaactgcaaaaaattcagagcttggctctcaaatctcaatggtatatctgatccattagaagcacaaagatactatgtagatagcatacaatctgccaaaggtttttttgatacatggttgggaaaatctacaaaaagtgttttcatgatgattttaggcgcatctgccggttcatatgtagattcgaacttaggtccaatcatcggagccgctggcatgcaacttgtgaaccctgcagccgattatattttagacatggctgatgaatatcttatttcagaactgacaaaaggttggacaccaaaattgtttatttccgaacttgaatctctcaactttaaatattcaacttaa

SEQ ID NO: 293326 - DNA, 132 bp, Morganella morganii
atgattgtgttatttgttgtttttttaacgataaattgtcgtgtttttgagtttgtggtgattaagggagaatgcgggggatccgatagtataaaacaggggcaatataatgagctcattgtatatccctga

SEQ ID NO: 293327 - DNA, 594 bp, Morganella morganii
atggcgacagtcagtgtactgctttgcagtgcatccagaacggtaccggcctgttcaccgcagcggttaaccagattatggaaatcactgatttcacgcagtgcggcaatagtgtcagccggcgcaccctgtgacaaaatctgcagttcaggattactgagtgcaacggtacggatagccagcacacgttgtgccagcgcctggcaccatgctgccattgctttctgctggtcagcctctggtttttcggtggtgataaacggccagattttatcggtggtcagcacaccttcaggtggattcttatccagccagcgcagcagggcttccccttgttccgggctttccatattcatggcagcggcaatcaccggtgccatggtggtgcgcagtgtgtctgcacctgtactgtcaataccgccattgcgcagggcatcgagcagggtgttcatctctttggtcggggtcagcggggcgtccgttgtcagcagcagaaacagctgttcaacggtgatattctgtgcactcagccactgggtggtctggtacaggaaagtgagaagttcccgacgtttttggtcggagatctcataa

SEQ ID NO: 293328 - DNA, 1119 bp, Morganella morganii
atgtttgatatcaaagtaaatatagcaggagactttattgaatcctatatttattctggagttctttttactttggatactaatggtgtactttgctcttacagttgggatcatctaattaaacagtatttatctttatatcctgagcacactaaattggaaaaaaaactgttagattgcaggaaaaacaacagttctttattagataaagatattaccattaccatagataaaaagtttttggataaaaatcagaaaggaacatgcactgctttagatgtttggtgcacagatttggatgttaaagataatattttgtatattgcttcagaaaaaggagtagaagctattccttttataggagaatggaataacggtgttgttcaaaatttcgtgcagccagaaaaagtatggtcaggagctaaagtttttggtctaagtacaggttcttggggaagaactatattagcaactggtactaagggagctctggaaattgtaaacaatcaagtcgctcaaataaaagaaatagggttaactaaaagggtagaaaaagaaatcaatagtgaggtcattctagattgtgaatggaactcacaatcaactctagccattctcgatggtctagataaaaaagtagcatacaaattttatactatcagtagtgatagttttataaagaataaaacaaagactgactccataaaacttactgatgaagaaaaagataagagaattaaaaaggtattagatgctttggtaagagaaagtggagaaaatatttcacttgaagatttttcttgttcttggttcgaatcaaacaaactacatgctatagaccacaataataaaggatatattctcaagggaaataaatgggttgagaacagtaataataatcccttcaatgagctttcggtggtcaagttaaaaaatattactgcaggtagtttccttgaaactgaggatgaggaactgtttagaatggtaaacgataaaaaatattctctcccagaagattttacttcatggcgagtctttcccagatctaagaattatcaggatagagttcatatagtatacgacgattttttgcaaatcagaatctttgattgttag

SEQ ID NO: 293329 - DNA, 642 bp, Morganella morganii
gtgttaactttaattaaaaatagtattatctataatccattgcatgctaggtgttattttttaataaccattagattaaacaattttgattctcatctgaataccaccgcctgtggcggtggtcatcaagaaagtggctctgccaataatgcgactcatgggaaaatccgaattgttatccccataacaaataaggatttaaccatgagtcgattcaataaagcatcacatgtgctttggtgttgtcaatatcatatagtctggacacccgaatgccggtttagaatactaaaaggaaatgtaggaaaagaggtctataagcaattacggatttcaagtgaacagctcgggatagaaatagtagagctgaatgttcaactggatcatgtacatcttttagtaaaaatcccgccaaagttgtcagtttcgcacgttttagggcatttgaaaggtcgaacagcgctgagattattcaatagatttccctacttaagaaaaaagaaactttggggcaatcacttttgggcgagaggatactgcgtggatactgtaggtataaatgcagagatgataaggaagtatgtgaaataccaagaaaaacatgagaatgaagaaaatcaattatcgttgatgagaatgtga

SEQ ID NO: 293330 - DNA, 1500 bp, Morganella morganii
atgaaattagagcaacaaattcagagagtaattcttgaagaggccaaagcgctaataaaggattatcatgagtatcataatagagttcacatagagtcggtcagaaataaaaaacgcttaggcgattcagctcccgacaaaaaaatacaccggccaaattattggttattcgataaaaaattcgatccgttttacgttaaatcaaactataaaagcatcgcgcgttcaattgcaaataagattggaaatagaacctactcgccaaatgcaccatttacgaaggatgttccaaaacccgatggaggaatcaggaaggtatccatatatcaaataccagacgcggctatttcaaagctatttttcaatcgcttattagctaaaaatagacatcgctttagttcattttcttatgcttatagaaatgataggaatgttcattttgccattcaagatatttcagtagatttaaaaaaaaatgaacgaacatttttagctgaatttgacttttctgatttctttggttctatctcacacagtttcttaaatgaacaatttaatgagaatggattttacataagcccagaagaaaaatttataattaggtctttcttgagagaaaggaaaataggtattcctcaaggaacatcaataagtttgtttttggcaaacctaacatgctggaaattagatcaagaccttgaaagagaaggtgtgaaattttctcggtatgctgatgatacaataatttggtcacaagaatattcaaaaatatgcaatgctttcaatataattacagagttttcaaaaagtgcaggcattaaaataaacccaaaaaaatcagagggtatatctttattaatcaaagaaggtttaccgtcagaaattacatcaaaaaataatcttgactttttagggtatactctttcagttgaaaaagtatctataaaagagaaatcagtaaagaaaataaaaaaacagatttcatatatcctttatcgaaatttgattcagccccttaaaaaaacctcattggcaggacaaacaatccctgcaaataacagagataaaaactttcttatcgccatatgtgaaattcgacgttatatgtatggaggattaagcaagtcacaaatcaaagattatttatctggaagatcaaatagattatatttcaaaggtattatgagtttttatcctctggtgaatgatgccgagcaattaaaacaactcgatggatggattgtatcaattatatatagagcattgaaacttagatgtcagctactttcaaaatggggtcataattgttcacataacttccctttcattttggatagagaagatattgttgacaaatgctcaaaagaaaaaatcgctggaagaaaactatttgagattccaagctttctgctgattcataaagcactgcagaaaggtttacaagaatcaggaattgaaaaaataatgaatccccaatcacttaactatgattatgaataa

SEQ ID NO: 293331 - DNA, 420 bp, Morganella morganii
atgaaattaattaagacactatctgtggcaatgatttttcctattttttatggacatgcatctgaaagcatatctcaaaatgattataaccatatgatttccattacagaatgtgcatttattactacaatagttaagcccggcatattgccacaaaagactattgataatacgtttaataaaaccatttttgttttcaaaaagaatacagctttaatgcgaaagtctggttacaatccaactccgcaacaattaacgattgatttcgcagtgtattatcaacaagttacttcagatatttatgatgaaatgtttgcctctcttaaggcagagggtttacaattaacacctcagtcctggtttactataggtattcagtattgggttttaaaggattgccaatcaataataaaaaaatga

SEQ ID NO: 293332 - DNA, 1281 bp, Morganella morganii
atgagccaaaagcagccagcaaaacccttatcaaccaaagccattgaggcaatgaaacctaatagtaaagataggtctgatacaggtgaaaatacaggtttacgtgtattttgtggcgcaacaggcattaagacatttatttatcgatatagtagcccagttacacataaacttgtacagataaaaattggtaattttcctcaaatatcgttgagtgaagcgagagttaagctacaagaattaaaacaattacgtcaattaggacgatgtcccgcgacagagctaaaagaagaaaaacagcataaaaagcagaaacaattacagcctcaagaaacaaagctagcggtaaaggcgcttatcgagctctaccttgttgaacgtatcgaagatcgcaagggaaaagacggtaaaatcattgcaggagcaagaaagaagaaagggcaaatagaagtccgtcgtatgcttgaagcggatgttattcgcgttttaggtgaacgaatggcacatgaagtgacccgaaaagatgtcattgaacttgtacgtgaaattgatgggcgaggtgctaaggttcaagcgggtaatgtattacgtgaattgtcagcagcctatgagtttgcaattggtctcgagtattttgatgataatttcgctaatccagcattattggcgaaatcgagtttgcagcaagctaagtttaaactaacaagtaataaaggcactcgttttctagatgataatgaactcaagaaatttttagcatggttgcctagttcagcttacaccaatgttatgaaaaatgttttccgtctgacgctttggacgggctgccgaactggtgaagtgtgcgcaatggcttgggatgatgtggatcttgaaaaaggaactattcatttgaaagaaaccaagacaggaattgaacgatacgtgcaattacctgagcaagcagtcatctacttgaaatcaatgcgcatgaactccgataaatatcttttcccatctcaagtaaccaagttgccgattcaacaaaaatatctaacagaatgtgcgtggcgtttacgcaaagaaggcaagatgctagatatccctgattggtcacctcatgatttacgtcgaacagtacgtactgggctagctaaactaggttgccccaatgaagtgggggaggcgatacttgggcactcacgtagtggtatcgaaggaacgtatgatttatatggttatgagagtgaatgcaaagtgtggttgcagaagtgggcggatcatatggggagtttggtatga

SEQ ID NO: 293333 - DNA, 1548 bp, Morganella morganii
atggctaaaaaaccgaaagaaaccaaatctgaaccgttagaagttatcctgtggaaagccgccgataaattgcgtaagaatattgatgcagcagaatacaagcatgttgtgctggggttaatattcttaaagtatatttctgattcgtttgagtctcactatgaaaagcttaaagcgggtcaaggcgagtttgtaggggcagatcccgaagatagtgatgagtatcttgcttacaacgtgttctttgtgcctgaaaaagcacgttggacaaatttactcaataatgcaaaacagcccaatatcggtaaattagtcgatgacgctatggaagccatcgaagaagataacccgcaattaaaaggggtattaccgaaggtttatgcacgtcaaaaccttgatgcaaccgtacttggcgaattaattgaccttgtaggtgatattgcactaggtgatgctaaatcacgttctgcggatgtactaggtcatgtttttgaatatttcttaggtgagtttgcgttagcagaaggtaaacaaggcggccagttctatacgccaaagtcaattgtttccttactggttaacatgctagagccttatgaagggcgtatttttgacccgtgctgtggttctggcggtatgtttgttcaatcagaaaaatttgttgaatcccaccaagggaatattgataacatttctatttatggtcaagagtctaaccaaaccacatggcgtttggcgaaaatgaacttggctattcggggtattaactctgagcaagtaaaatggaacaatgaaggctcgtttttaaacgatgcccataaagatttacgtgcggattttattattgctaatccaccgttcaacgtctctgattggtcaggtgaacaattacgtaaagatgcccgctggcaatacggtgtgccaccagcagggaatgcaaactttgcgtggatgcagcactttttataccacttgtcaccgaaagggcaagcgggagtggtactagctaaaggagcgctaacctcgaaaacgtcgggtgaaggcgatatccgtgctgcattagtgaaagatgctaatgtgattgattgtattgttaacttgcctgctaagttattcctaaatacgcagatccctgccgctctatggtttatgcgccgtgatcgtaataactcttcggtttatcaagatcgcagcggtgaaattctgtttattgatgcacgaaatcttggtcatttaattaatcgccgaactaaagtgttatctgatgaggatattaaactgatttcagatacctaccataattggcgtaataaagatggtgaatatgaagatgttgctggtttctgtgcctctgtcgctatcgagaaagtagctgaactggattatgtgctcacaccgggtcgctatgttggtcttgctgatgaagaagatgactttgattttaaagagcgttttactgcattaaaagctgagtttgaagcacaactagaggaagaagcaaaacttaatcaggcgattgctgagaatctggcaaaggtgatggtatga

SEQ ID NO: 293334 - DNA, 1116 bp, Morganella morganii
atgagtgagtttactgaatggaaaacattgcaatttaaagacatatgtagattaaaaagcgataaagtaacagttgattcaagtgatatacaaacctatatatcaactgaaaatatgttacctaattttgggggggtacagagtgcaaaaaatatccctttaacagggaaattaaatacttttaagtatggggacgttcttttttcaaacataagaacatactttaaaaaagtgtggattgctacttttgatggtgttgcgtcacctgatgttcttatttttagtgcaatgaaaaattgtgagtctcaatatttgtattatatgatgtgtgagcctcaatttacagagtttacagtattaacttctcgtggcgcaaagatgccgagaggagataaggaagctattttaaattacgaaatatcattaccttcattagcagaacaaaaagccattgcttcagtcctttcctcattagataacaaaatagacttacttcatcgtcaaaataaaaccttagaatcaatggctgaaacgctttttcgccagtggtttgtggaagaggcgcaggatgattggaatgaggttagattaggacagttgttttctatttgtagcggtaaaggattaaagagagatgaatttatagaattaggaatgtaccctgttttaggtgctaatggtgaaataggacgctgtaataaatcgttatattctgaacgattaatatatacaggccgtgttgggacgttaggtaatatttttattatacatgaaaatgaaaaagtttggttgtcagataacacattaatttttaaagatataaagtatttttattttgtgtattttcagttgaaaatgattaattttgatgaatataacgtaggaagtacccaaccattgattaggcagtctgatattaaagaaatatacattgattttcctaatgatttggtgttgttagatctttttgaacgcgatgttgatattatctttactaagataaataaaaatattcaaaaaatcaaaacactagaaaaacttcgcgacactttgcttcctaaattaatgagtggagaagtgcatgttaattatacaccagaagaaataaaacaataa

SEQ ID NO: 293335 - DNA, 3243 bp, Morganella morganii
atgtcaaaaatgacagaatccgatatcgaaaccatgaccattgagcagttacaagccttaggttatgaatatgtgtatggtccagacattgagccatcgggtacaaatcccctgcgtacttatcatcaagtcattcttcagcaaaaagtattagaagcgatacaacgcctaaacccacatttaacacaagataaatgtgaggaagccttaaaacaagtcactcagattaactcgcctgatttaatggtaaataacctgagttttcatcgtttattgacggaaggtattaacattgaagtcagtaaagatggcaatactcaaggcgaatatgtgtggctggtggattttaatcaaccggataataatgaatttctagtagtcaatcaggtcaccattcgagaagatcgcaaagaacgtcgccctgatgtggctatctatattaatggtttaccactggtcgtaattgaactaaaaaatgcgattgatgaaaatgccaccattgaaggggcatataatcaaattaaaacctatcagcaacaaatcccttcattatttacttacaatgcctttagcgtgatttctgatggattagaggcaaaatcaggtactatttctgccgattttagccgctttatggcatggaaaacccataatggcatgactgaggctaaaaatactcagccacaactggaagtgttaattcaaggcttgcttaaccctgttacgctattggatatgatccgctattttatcgtgtttgaatccagtaaacaggaagatagcaacggtatcatttctattaaaactgtcaaaaaaatggcagcctatcaccaatactatgcggtgaatgcggcggtactttcgaccattcgtgcctcgaatgtcaatgcgaattcaccgtctgcggaagtagcgttacggcaacaaggtaggaaccaacagcaccttgttttagaacaaaaagcaggagatagaaaagcaggtgtggtatggcatacgcaaggttcgggtaagtctctttccatggtcttttatacgggtaagattgttttagccctcgataatccaacggttgtggtgatcaccgaccgtaatgatttagacgatcaattatttggcactttttcttctgcggtacaactgttacgccaaaccccgaaacaagctgaaaatagagaagaattaaaagaattactgaaagttggttcaggtggcgtgatatttaccactattcaaaaattccaacctgatgatggcagtagcgtttatgaattactgtctgatcgcagtaatatcattgtcattgctgacgaggcgcatcgttctcaatatggtttttccgcaaaagaagtggatgtgaaagatgagcagggtaatgttgtcggtaagcgcaccgtttatggctttgccaaatatatgcgtgatgctttaccaaatgcgacttacttaggttttacgggcacgcctattgaaaaaacagatgtcaatactcctgctgtatttggtaactatgttgatatctatgatatcgctcaggctgtagaagatggggcgacagtgcctatctattatgaaagccgtttagcaaaagtccaaattagcgatgaaggacgagagctgatcgaggagtttgatgaaggtttcactgatgaagatctaacgctgacgcaacaacaacgggctaaatgggcgcgagttgaaagtattattggcagtaaagagcgtattaaagcgatcgctaaagatttagtcactcactttgaagaacggttagtggcgaatgctaatcacggtaaaggcatggtcgttgctatgtctcggcgtattgctgcggcattgtatgaggaaattgtggcactcaaacctgagtggcacagcgatgatcttaatgatggtgtgattaaggtcgtgatgacgtcttccgcatctgatggccctgatatcgctaaacatcatacgacgaagaaagacaggcaagtacttgctaatcgcatgaaagatgaagatgataagttaaaattagtcattgtgcgtgatatgtggttaacggggtttgatgcaccgagtatgcacacgttatacattgataaaccgatgaaagggcacaacctgatgcaggcgatcgcccgtgttaaccgagtctataaagataaatcaggtggcttggttgtcgattatttgggaattgctgcggatttaaaatcagcattatcattttactcagatgcggggggtaaaggtgatcctgcccttacccaagaaaaagccgttgaggtcatgaaagaaaaattagacgtccttgacggaatgctctttggttttgattatcgtgaatatttcaccgcatccacatcccgtaaattagccataattttagaagcagaagattttattttagggattgatgaaggtcaagggaaagtgcgttttttaacagcggtcaccgctttatctcaagcctttgcgttagcaacgccacaccctgaagcgatggaggcagcacctgaaattgcctttttccaagcggtaaaagccagactgaataagtttgattcaactggaggaagtggcattatcggtgatgacagcatggaagttcgcgttaaacagaccattgatcaagccttagtgaccgatacggtggtggatgtgtttgatgctgcggggattaaaaaaccagatatatcgatcctttcggatgactttttaatggagatgcaggattaccaacataaaaatatcgcgttggaaaccttgaaaaaattattagcagatgaaatcaatgtgcgaacaaaaatgagtgttattcaaggtaaaaagctgatggatatgctcactggggcgattaaaagctatcaaaataaaattttgacggcagctgaagtcattgatgagctaataaaattagcaaaagatatcaataagcttgatagtgaagcgaatgacctgaatttatcaccttatgaatatgctttctatacggctgtggctgaaaatgatagtgctcaagaactaatcggaaaatcaaaactaagggaattagcggttgtactaactgaaatgatccgtaataacgtcacattagattggactatcaaagagtctgcaagagcaaaaatacgcgttatcgttaagcggctacttaaccgttatggctatccgcctgatatgtctacattggcaacagaaaccgtcttggcacaagcggagcagctatcgaatgaattgttgaaatcaaattag

SEQ ID NO: 293336 - DNA, 1179 bp, Morganella morganii
atgactgaacaggaagccgaactgaatgctatccgggaaatcaccggatttttgctgattgatgataaaaaacggcacttaacccgcctcgggctggtgatgacatttttctttaaaaacggttataccccggagaaaaaagccgccattctgcgctgctaccggcggttccgtgagctgtacgccggaaaactgcgcttccatactcataaccaaaaagggatgaaaaaatactccggggaaaatatagaaaagctggagcagtatattcaggcatccggaccgaatgatatcgttgaatggtacatcagtgatgccaaaaacggtgatgaagccccggaatatctcatggatagtctgagttcccatgaagtagacggtgcttggggaactgcgtatctgtgtctgtacctgccgtggaacatcctgttttcagcggaaggcagacaggaatttcaggagtgggtgcagtatttatgtcaggagctggaaccggatcacggtgactgtggttatacactggtgatgccacgtgactattatctgtttatgccgcaggaatacgaactggcacagcgctatccggcaatggtggtaaattccaccgttcatatggctgtaacggaatacgaaaattctatccgcagcgtgcagtggctgacgttcctcgctgaccgctatattgaacgcctcggcggagagacccatgtccgtaaagtactgtctgtggacccggagattaccctgacccgttaccccggcgggctgataattcaggccggtgactatccggatatcacccccggcacaccgccggaaagctattaccggattaatgaactgatccggccaatccgttatgtcattaaaaaagatgattccttacatttttgcggagagggacattttacagaagaaacaagcagacaatggtatgagcgttatgaccgcggtccgatggtcgtttctccgttgtatgcgggtgaaccggcccgggttgacggttactggacgaccaaaggccgcgagaatgtagaaaccatttttcttcagggcacaccggcgattgatattgaaggcaatccgcccggacggacagaatggcggcttatccgcgaaattccgcacgatgatgaacgggatctgaccctgctggagcaaaaactcaatggccggtaa

SEQ ID NO: 293337 - DNA, 1122 bp, Morganella morganii
  misc_feature (625)..(634): n is a, c, g, or t
atgtctatctctaaagagaagcttgataatttgaaaaaatcaattgctattcctcatgaattaggtcattacgaaatgatgcatagaattgataaacttagtattgtaggtgatcttgaaattgatgataccgatgaattgttcgatagattaaataagatgaaagacagtcgtttttattcaattagaagaagaaaaacgaaaagtaaatatattaagaaactttatcgctatcaagttaaggtgaaaaacaaatataatccgaagcaagcatttatgatctattataagccgacggaaatggattttaagaaaaaagataaatatgaaggaagaggtgctgttagatttgaatttagtcctcaacattttactgttgatgatattaataaattagttctttatttaggaaagaagaagcgcctaggtaaatatctatataagttattgaaaagcgcatgggtgactcgcattgattatgctttagacatatatgatatgcgtctctcagactatcatattggatttaaaggggcatgttgtggcgaacgttactcaagtgaaggcgagtttcaagggcaacggcttggtagcaataaatcagagtaccatgccgcttgttatnnnnnnnnnngttatgagaagctggatgttggtgatgacttagagtctcttagtgatgaagaattacaactgataattactaattggcgcgaaatacaggattaccgtcgcttcctacgcatagagacgcgttataaaccgagaagtaaggcgcttttattacgagatattcgcaatcttcacaatttgctggaacgtattgggttctataaaaagccactgtgtaccaaagaaggggatttagattgggagttgttactgtcgggcatgatattacctgagctacgcgattatgtgaataaaaccaacccaaaggaggctaaaaagatcttaaaacgtctagataatagattgaaaaacaatcaagttgatcttttcgataaagatgaaatttggtgcgactttcatttattggttgagaagctcggcattctcggagttccagctctttggcagaagagtttacgtgaaaagtgggctctcaaacacgggtattaa

SEQ ID NO: 293338 - DNA, 198 bp, Morganella morganii
atgcaacacgaacactttttaacgattaagcaagttttagaaatcacacaagtctcacgcgcgaccttataccgttggattaaggcgggggattttcctgcgcaatattcattgactgcatctgggcgctcggttcgttggaaagcgctcgaagtgcaagagtggatcgacgagtgcgtcagaaagggggagcaataa

SEQ ID NO: 293339 - DNA, 996 bp, Morganella morganii
atgtctattgacaaccaatacactattctaaaaaaaatagcagaagatatgatagaaagtaactatacgtcagaatctcgagaatatatatcgctagtcataactgaaaagaatcaacaattgttagaggccactagaaaactttataccgcagatgaaagacctacaacagacgagctagttaacaaactagcatcgcatgccttattagatcgcgcaggctcagaaaatcaaggaattggatttgttaatgagtttgtccttggaaatttcgtttcagaaaatattattaatgatgaatcaaatgaatgggtcggagataaacgatttgtagaacccgcagtacaatcttatatgccaagaattgacgatgaaaaagagttgctttggcatagcttgaaattcacgctctcctttatgactggaaatgataaaatcctctatagccatttactcatagggaaaattccattagatctacaagaggatagtgttgaacaattatccatcactcatttatctctaggcgaaataaatgaagtgcgcgatactatatttgttgactgttcattttttaacagcctatttacctgtaataaatacaaaaatgttacatttgtaaactgttcttttactgactgtgattttatagatctagaaaacagagatgatatttatttcttagggtgtgactgtaataatgatgccattaataaaacatctatcgaaataattgatgagaataataacattaccgattgcgatatttacattttagaaaaattttgtcctaaaggtagtgctagttatcataagcatcgtccaataaaaggcttgtgtgcaaacaataatcagtttcagttaaatgaaatactccattccataaacaaattgagaaaagaagattttttactcaccccagataaacgttcatttcttgagctgaatatgtcaaggatatccgaaattaaagcgattcttgggaggactgtctga

SEQ ID NO: 293340 - DNA, 411 bp, Morganella morganii
atgaaatattcatcactagtcattgccactgtaatcaccttcttatcaacagcacaggcagcaaactcacctttccaaaatcctgcagaatacaaaagcaaacatggaatactagaaataacaccaagccaaaatgatgcgccaaagttcgatttccagattaatgccaatgttgatatgtatgtctgcgaagctgaaggaacagcctatattacagaaagagacttatcgtcaaatacttggaatgctacagcgctagtcagcacagatagtgactatggagaccaatattgtaaaatggaattttctatggataaagcgggaaagatagcaatcaaaacaaattttggttgctcggctcaatgcggtataggggctgtcggggcaatggatggtacatacaaaaaatag

SEQ ID NO: 293341 - DNA, 195 bp, Morganella morganii
atgaccagtttatataccgcaacaaaacatccggaacaactggagacaaccctgttaaccggggaaagttatttgtatgatgatcctttagagccccaaaaattggtttttttagatgctgtgaatgatcagcgttgtgtgattaattcaccacaacgtaacagtcaactaactaacacgattccttttttatag

SEQ ID NO: 293342 - DNA, 333 bp, Morganella morganii
atgaacaaatatcgtgacaaatcagactttgagattaataaagaggtcgtgaaattaataaaaactaaaggcggctattcgtgcgttgatcacgatgaaattgtgaaggtatatgtatcacaaaataccgggatatataaagagttcgacccctgcaatgacccgtatgacgcaatgccgattattattgagaatgggatatccagtttattcaacggtgacgaatggatttgtagcgccttggaaggtgaatttctttccattaatgaaaatttataccgcgccgctatggaagtattcctgatgatgaaggatgcggagaatgaaaaatag

SEQ ID NO: 293343 - DNA, 294 bp, Morganella morganii
gtgtggaataaatgtgtagttattgagattggtgctggtgacaaagtattttcaaccattgattataaagaggaacaatgtgttggattatcgatatctgaacgaaaagataacaatcgtgatatcggaaataaattcacctacccggaaggcacgacaattggcgaccttgagccaatcattgttgttgtaacgcagaatatcaactctctgatagctttgcgtgaccaggttgatgatgtgattgcgttgttaaaatcaaaatgtgaggctgtcgatgaacaaatatcgtga

SEQ ID NO: 293344 - DNA, 390 bp, Morganella morganii
atgtcagggcatccacatgctgacctcatggctaaggcagcggagatagcgaagacggataaagagtggtataggcactttgaatttaaaactgataaatgcagtgattggattgatatgtcttttggttccctgttttatgaacatgtcgaataccggcttaagccactctatatcgacattaacggccaccaggttcctgagtcggttcgggagcctctggaagacgaccaagagtactggatagcggacattcgatatgcgccatctgcttttaattgggagaataatgacgctgactatcgctggcttgaacgcggcatcattcatctaaccaaagaagcagcagaagcccactcagcggctctgctctctttcacacagaagtaa

SEQ ID NO: 293345 - DNA, 813 bp, Morganella morganii
atgaacagtaacgttgcatacgctgactttggagccgcacgacggcaagagaggccaacggtggcagatcttgatgatgggtacaccagacttgcaaatgctctgtatgaggccctgataggcgctgacttaacaaaaaatcaggccaaggtggcacacgctatttgccgtaaaacttacggctttggcaagaagtctgaccgcattgctgacagccagttaagtgagctgaccaacctgccccggcagaaagttaacaaggcgaaaaacgagctgatagcaatgcgtgtagtcgttatggatggaccgagaatcggaccaaacaagaacgtgagtgaatgggaaataacagggtgtcactactctggtgacaatgtcaccaaaacagtgacaaaaagtgtcaccaaaacggtgacagcgttgtcaccaaaacagagtcacacaaaagaaactattacaaaagaaaagaaagatactcccctaacccctcacgaggggaatggcgaaaaactgatttctggcaacagaaaaaatcagatcccatacctcgatatcatgaacacattcaacgaatcagccggtgacagactgccaaacgccgagtcactgaacgacaagcgcagacgggcaatatccaaattcctgaaagaactcaaagagccaacagtcgaagctgccagaaattattttgattatttcatgactacggcgaaggcgttttacttcggagagaacgattcaggctggagagcgagttttgactacctgcttcgcccggaaacggtattaaaaaccagggagggctcactgtga

SEQ ID NO: 293346 - DNA, 456 bp, Morganella morganii
atgaaaaagaatgatattctactacttattttaatatctttattttctctaccaatatttttccttgttgatgggtacagggatgattttgtcagaaattataatggagatatgatatggcaaagagagggaagaccattctcttacattatattgtacgttttaaatcttggcggaaaaataacaaacccattcccattggcgcaaattgcatcaattgcaataatgtttttaacatgcaggaaattatctaatgagtttaatattaaaaataagactcttgcctctttgatatctgcgcttttgtttttaaccccattttttatacagaacctttcgtatcagtatgactccctacctatggttgcatctgtctcaatggctgcaatagctggtatttcaagtagattttttataaaattcacattgttgtttttgtcaatatcaacatactaa

SEQ ID NO: 293347 - DNA, 543 bp, Morganella morganii
atggatgacttgaaaagcagaattgcagaagtcgagagagcatctgcagaaataagcaaaggacgaaagcctaaattcggtgacagaatgcgtaacccatgggctggcgaaagtaaccctcatcgtgatggttttttcgttaaagcgacacgcagaaccgggaaagtgaatccgggactttggtaccagatgacagatggaaagggtgatttttgggagtcagacggaaaggttatgttctttctggatgcgctcaaagagccgccaatgaactggattaagtgctcggaaagaatgcctaagcacaaacagagggtgattatagcctctgaatctggcgttgcaccaggatattacgatgatggtcgttacctgaaaaaacaggtcggaaaatggtattccggaaatcggatactcggtgaaggcgtaacccactggatgccactgccacaaccaccgcagcaggaagtgaagtcggcgctggaaataggtatgtcccgttacgaaggtgctatgcaaaagctcgcagaaggaggtgattga

SEQ ID NO: 293348 - DNA, 189 bp, Morganella morganii
atggaacctagtcattttgaaggtgacatttgcggacgtaacgggtgccccggcgctattgaggagcgtcctgttgaaaattgttcatgtcatatcaacccgccatgcggtgagtgtttaacaccacgcgaatactgcgttatctgcggatgggaagcagatgaagataatacagaggagcaatcatga

SEQ ID NO: 293349 - DNA, 1692 bp, Morganella morganii
atgacatcaataattttcagaggagttgaaaataataatttttcaatatttaacttccttaaggcaagagcaaaaagaatagtccccgctcttcttgttgttacaattgcaacaatagctattggcttcatggttactgacccatcaagctacaaagcaatggggaagcatgcaatatcgagccttttatttatatctaacataatatacaactcagaatcaggatattttgaagctcagtcacattcaaagttttttctccatacctggtcactatcagttgaatggcaattttatataatatacccaataataatatgccttttaaaaaaggccatgacacttaaaaatataaagattataattctaactctatttgtggtgtctctgcttacatcaatatatatgggtataaacagagaatcatcatcatatttcatgatttactcaagagcatgggaaatgcttatcggtgggatagcatatgtatacccattaaaggtaaatgattcaaaaagaaaatatatagaactacttggattaatattaattatatcttcattctttattttttcaaataaaactccgtggcctagttacaatgcaatattaccagtagtcggcgcatacatatgtatactatcaaacaacagcaagtcaatattgtcattttctcctatacaatttattgggttaatatcatattcagtttaccttattcactggcctttgatagtatttctatataaagataatatagaaattaactttatggtatttacattattgacattagctatggctagtctactttactattttgtggagaggaaaagggagtatggatatggaattcttgctatctatatagctggtgttatcgtaagcctcatggtttatgacgatggagcaagctcaagaattactacaaaagtagatcatgagtatcacaaaaaatattatggcggaattggtattgaaaacgatggaaaggcaattcgtttcaatcctgaaaaacctgtaagatttatattgtcaggcgacagtatggcaaggcagtatgctaatgctctaaaagataatggaattggatttgttggtgtattccaagatggatgtttttctatgcaaaactattacacagtttatgatgaatcattatcaaagccatgcatggaaagatacaatgaactgatgaatgcgatcaatgaatacaaagatgcaaatgttataatagcgcaaatgtgggattacacattaactttaaaagacaataaaactggcgcattaacaaatacaaatgatgcgttactatatataaaaaaatatatttcagaactatcagatagtattgataataaaaggatgctgtatatcataggtcttcctgatggttctagaataaatacaaatgagtgcctacaaaaaaatcaacttcctttgtatgcactaattggcaacaataactgcgatacacagaagagacaaaaaattgagatgaataacattttgtctaagtatatatcagagataaaaaacacatcattcattaatgttaatgatgctttatgttcaaaggatgagtgtaaaatgtttgataaagataataaccaaatctattcagataatatacatttatcaatatatggtgcaaaaatagctgttgacggaattttaaaagaaattaaataa

SEQ ID NO: 293350 - DNA, 696 bp, Morganella morganii
atgcttttgttaaataataaagtcaatcaactttttataaaaaatcaaattagcatatatgaaaatatagaagattgctacataacaaaaacaagcacccttgaagatgtacataacaacatgccaataaagtcaataataaagacgtatttaagaggtagtgaataccctgatatatttccaaaattagcaaaaaataaacaaaacgtcactggtgtttttactgcaattaaaactaatgaagcaacaacaatgttttgttttgatgcttatggctactcaggcgtgtgtcactacaacgaatatgagtcaaataaaatatcaaaatggcatatccagccaagtggcggagtgtggaaattaggtagtgactattttaataatgaattaagtaatatattatacgatggcatatattatttttattcaaactcattttctggttttcctacgacagagccttgtattttttcaaggatagaaatatctgataccattcgtgtatttgaagtaacaacaattaacactatttatataaaaaaatgggtgtctcgcaatggtacaacgtgggttagcatcccgtcagttcatccaaacaatgccggtggtggtgaactaagaataggtgacatgactattgatagcagtggcgacttggttatgagagttaatgcaagcactgtaaaaaaactataa

SEQ ID NO: 293351 - DNA, 294 bp, Morganella morganii
atgatagaagaattagccatagagatatcaaaagataatacaaataatatgtatatcataatgggtgactggaatgttgaagatgatgaatacttcataccattaactaatcttggttttaccagagcaaataacaaaaggtttaatacagcaaacaataatgatggatgggaggttttcattgatgacattctatatagagggcctactaaagtaatagatgcaggtgttataaacataccaacagaagtgtcagatcataaaccgttttattttgatattgaggttttataa

SEQ ID NO: 293352 - DNA, 771 bp, Morganella morganii
gtgaaaataatatcccatgctccggaatatcagccattacgtgcaggaagctgtactcagaatcaacctgttttcagccatctgaaagacaacctcgcttccgttgctaatagtttcaaaacattctcaaccggatgtcatacacagaaagatcataatatccgcaaagtgtgtgaacgattaattgcactgacctgtatgacccctgaatgttatctgactcccgtaatgaaagagtgcgcagaggaaatcggggttgtattaccgaataagatcgagcctgtttcagctgaaaacgggcaggcaacggcgtcaatcggtaaattatctgtattatccacctcatctgtctccgcgcaggcagcatataatatgctcagacaacaacaggataaatatctgtcagccggatacgaattctcacaggaaagtgcagataccatacagatggtacttgagatggcagaacagggtttttgtctggccagagatcactcttcccgttacggggacaagtatattgttaccacaaaatccgcagaaaatactccggataacgctctcagcattacaccggaacaacgtcagatacttcatagcgcagcataccggatgaaccatgcactgacccgtcaactgatggctgcgcattataaaaatgaaagcatcataagtaataccgggggttctgcattgagcggacagaatcactcaaatctttcgcgtcagcttttctatcctgatttttataatatacccatcacagaataa

SEQ ID NO: 293353 - DNA, 1347 bp, Morganella morganii
atggcaaaatataaggcgtatccggaatataaggattccggggttgagtgggtagattcaataccttctcactgggaagtaaagcctacgtttgctttgtgtgaagcatcctctcagaaaaacattgagggtgctgagaataatgtactttcattaagttacgggaatattattccccgggatgttgaaacaaattttggtcttcttcccgagtcatttaattcatatcagattgttagttgtggagatgttattttaaggctaacagacttgcaaaatgataaaaatagtttgcgtgttggtttggcaaaacaaaaaggcattattacctctgcttatttaaaattgaaatctaaaagtattataaatcctaattttctttatcgactactgcattcatacgatacaacaaaggttttttatggaatgggtggtggtttgaggcaatcaatgaagtttgaggatttcagaaggttaccactgcttttaccatcatatgaggagcaaatcaagatatctgctttcctcgatcacgaaaccgcaagaatagacgatcttatcgaaaaacaacaacaactgattgaactactcaaagaaaaacgtcaggcagtgattagccatgctgttaccaaaggattaaatcctgatgtaccgatgaaagattcgggtgttgagtggttgggagaagtaccggagcattggactgtttcaacaattaagtatatttccacatttattgggacaggtggaactccaaaaaattcagaatcatttactgacgatgctggtattgattggttctcccctggagatttcaataattcattagttctgcgaaatgctaagaagaaagtaaccactcaggctgtgaataatggtgatgcaaaaagctatccaaaaaactcaatagttgttataggcattggagcaactttaggaaaagttgcatttgtagagcaagaattctcatgcaatcagcaaattaatatcatcacacctagcaaaactgttgaacataagtatcttacatattcattactgaaccaaatcgagcaaatgaagcaatcatcgaatgcatctactattgggattatgaatcaagaaaaaacaaagcaaatatggattactttccctcctaaagaagagcaaataaaaattgtgaatgttctttctcagaaagaaattgaatttgattcattactcaataagtcagaatgtcaaatattgcttctccaggagcgccgcaccgccctgatctccgccgccgtcaccggtaaaatcgatgtccgcgattgggttgcccctgatactcaggaaatagaaaaaactgaggagactgccgcatga

SEQ ID NO: 293354 - DNA, 405 bp, Morganella morganii
atggattcagaatttacatcggtgatgacaatgaacaaatatagtgacaaatcagactttgtgattaataaggctgtggctgaaatatatttgcacggaaagcatttgctctctgaggaaaaacaggaagtttattttgccggaatggatggcggagacttcttacctaatgggtatttcgacccatgcaacaatccggcggatgcaatgccgattgtttttgagaataacatttcattgcacgccccccgtttaaaggaaggctggatggctgaatataccggcagtgatgacgatgttaatgacgggtttcaggtggattattatgaatcacataacaaaaacccactacgcgccgctatgaaagtattcctgatgatgaaggatgcggagaatgagaaatag

SEQ ID NO: 293355 - DNA, 276 bp, Morganella morganii
atggatatatcacgacagcagtttgaggaatttatcaaattacatactgaccctgatgaattaaaagacaggttagctacgattaatgccgggaaaaactatcgcaatgcgcagactgacattatgtggattgcgtgggaagaatcgagaaattcattaaaccatgtcggatatttatcagctacagcgtcagtatgcttaatgcgcggcaagcagacaattatcactccagaagataaaggcaattgcaccccgctctaccgcttagacaaataa

SEQ ID NO: 293356 - DNA, 1794 bp, Morganella morganii
atgattgggcataagcatatgttagtcactgagttaacagtagaagataatttagaaccggcatcagcaacctcttctttagtcgcaaaacgtataggaaatacactaaagactagatttgagcaatacatacacactcgggagtgtaagcctgagcaaaaggactacgatgtaaaaatgacttcacgggcaattgcggcattctgtgttagtcaactaggcagggctgatgaccagcaatcaggtgagtcggtttgcgatagttctacggatggcggcattgatgccatttttgttaatcacagtgaaaaaattgttgttgttgtacaaagtaaatttaatcaatctggttccaacacatggtcaaaagatgattttctttcttttaaaaatgcaacagatcacctattgtcaggaagctttgacagatttgacgaaaccttgcagaaaaaagagaaagatttaattgcagcacttgatgactcagagtatcagtttaagtttgcaatgattcatactgggaaaaaaggtgccgcagatattattctgcaagatatgcaacactggcaaaaggaactaaatcgtgatgcgttaatgcctgatgatatgccggaagaagactggtttttccaagtccaccttatatcagcagaggatatacagcagtggcttagggatggtggccatcaaaaagttgatttaattggcgttgagctaattcaatgtggaaccattgaagatcagcagcaggccatttatggcaccttaacaggggatcaattacatgaatggtatgctcagtttggaactaaattatttaccaaaaatataagaaatttactcggaaaaactgatgttaatgaatcaataaagcaaacagttataaatgaacctcaaaatttttggtttttcaataatggcataacattgttagttaatgagataaacccacaccgaagaaatgtagtacgaaatgcagatttaaaaacctatgacttcaaggatataagcataataaatggggctcaaaccgtcagcacaattggtacaattaatagtttaactatagagcacttatctcaagttaaagtcctagctaggttcataaaaataaactcagcagatgctgattcattatccaatagcataactatcgccaacaaccatcaaaaccgagtgactggtagagattttgccgctcagcatcatgagcaaaggcgtttagctaatgaaatagctatagaaggttgtacatatatgcttcttagaactggggtttctccaattttttcagaaaagagtatagatatggacgaagctctaagcgcactatcatgcctatctgcacagccacatatacttgcaactttaaagtcaaatagagggaagttttttgaaaatctaaatggcaacctgtacaaatcagtgtttaattccagcacatctggattgctggtgataaactccgtcgccgcttatagagagatagaaaggggtatttcatccctgatgggtgaaataacatcaagaaaaggtaaaaatattataactcatggcgttagggtgataacctctatatctatgtttggtatgatgaaaaaaattaggggatctgaaaaatttcaaataactgatgaggatattgaaaaattaaaatccgttatcgctcgcatctacatatctgttgacgcttatataagtaaaaattatccgtcagcatatttggctcgttttttccagaacagagaaaaaatagatgaaattatgactcatatatataatgaaataaaatag

SEQ ID NO: 293357 - DNA, 156 bp, Morganella morganii
atgactaaggaacaagagcaagctgaaaaagtcagagtgcagttagtcaatctcgaaaacctatcccgtgattttctggaaaaacttgctgtgcatttcgagtcagcggtattggctttcaatgaaaagcttaatgaaaaaggaattttgaaatga

SEQ ID NO: 293358 - DNA, 339 bp, Morganella morganii
gtgacgagggagaagagaacttatatcaaaaccgccgaacagaaacaggatgtatgcctgcggatagtccggaatcttcgccagttggacagtttcacggtgaaggcggtttcactggccgctgagttaaaaatcatgatggctaccacctttgtcaaaatgatggaagacattggcagtgtccgcgtcagccacaaaatcggaaagcaggtctattacgtttttgatgattatgccgtgtcaaaaattaaggctcacttcagcagctttcccgataaaaaacgggtgggtatgaagataaaagcaccggcatctggtcaggaggtgcgttgtgggtga

SEQ ID NO: 293359 - DNA, 732 bp, Morganella morganii
atgaaaaatttggttgcagcaactgctattaccttaatgtccatatgcgggaatgccattgcggcagacgccaatcaactgacgatagacgagaaagcagcactttctaacattatcagccaggatgtgtctgttggatttatggggatgaaaagtcattatgaatatggctacaagcctgtgacagcaaacgagatgcagacaatttattcagcgaatgaagtgaaaggcgacagaacatttaaaggcaaagggttaataatcagtggaacagttgaatcaataaagtctgggtataaagatgttcccgtagtggcgcttgaatctggtgacagaataagaaatgtaaaccttgagttctcaaccaagtatgaggatattgcggttgagctggttaagggacaacgtgtaacattcgcctgcactggcggggctgttgttatgggattcccgtctttggttgagtgtatgcctgtcgacgtggcacaggcggcactaactgagaaaaaagcgaaagagatagtagatgagttagcttctgggaaattttcagatgaaaaaacacccaaggttataacatccttaaagatattcaccaaagcaaccaacaactatcagtcatgtaagcctgatgatcttgattgcttggttaaagccaaagacgaatacctggctaagcccggagccaaggaagaagctaaggccatccttgattcttacactgtgaagtga

SEQ ID NO: 293360 - DNA, 327 bp, Morganella morganii
atgagcgataaaaaagaaaatccaaaaagaaaaatactgccaaaaagtaacaaatttaacgattactttgccgagagtgttgggatatctcattgttatcttgatggtgcagatttgttcgatttagcgttcatgaacagagacgtaaggccagccttgcgggatacgtctacagaagataacaaagtaaatttcgttatggaaaatgttattgagcttaatcacgtttgtactgtgcgaatgactaagactcaattaaaagagctttcagaactaatcattgttgccattggacgggctgatgatggtgagcaggatgaggaatga

SEQ ID NO: 293361 - DNA, 324 bp, Morganella morganii
atgagcaatcttattatgaataaggattatacatttatgactgaaatagattttgaagcgttggggcgctgccattacttgcgcggaaagatggctgatgctgccaagcgcagagatgatgcatttgtaggtatgaccaagggatatacgcaagaccctaacccatacgacagaatccatgaagttgatatggcagcattcacccaaaaagcaaaagaattcgagactgcgaatgatgaattaactctactggtgaatgaatacaatcagtgggcagaaaaagcaggtgaaagaaccatgaagtggattaaaagccgctactga

SEQ ID NO: 293362 - DNA, 555 bp, Morganella morganii
ttggctctgaaaaatcaacatcctctgaagcacttactttatgcagtgaaactggcaaaaagtgtgttttattatcatgtcagtgcactgaagaaacccgctgcttacggggaggaactcgcgcggattgagaccatttatcatgaacataaaggtcgctatggttacaggcgcatccacttaacgctgaaaaatgaaggtattatgctaaatcataaaacagttcagcgactgatggggcagcttggcctgaaatcgacagtcagaccgaaaaagtatcgttcgtatcgtggtgaaacaggtaaaacagtatcaaatcacctcaaaagagattttacggcgtcaaagccggatgaaaagtgggtaacggatgtcactgaatttaaggtgaacgggcagagagtctatctgtcgccaattattgatttgtttaatcaggaagttgtcgcctacagattagcgaaaaatgcacgcctgactctggttacagggatgctggaaagtggattatcccagttaacgcaaacacagaagccgctgttacacagtgactag

SEQ ID NO: 293363 - DNA, 261 bp, Morganella morganii
atgaaactgaaaaacaatataagtgattatacagaagctgagtttttacaattgttacaaataatttgtaatgcggaaacatccagtgaagaagaattgattaaacttgttactcatttcgaaaaaatcacagaacatcctgatggaagtgatcttatctattatcccaaaaaaggtgaagatgatactccaaccggaatcttaaaaaccgttaaagaatggcaggctaaaaacagtaaaccgggttttaaacaaggctga

SEQ ID NO: 293364 - DNA, 564 bp, Morganella morganii
atggcaaccggggcaacatcaagctgtgaggatcgggtcacacttgcgctgaaccggatgaagaacgcggtgcggatccacgatgcagaaaaaggaaaatacgacaacaatctctctgaactggtatccgcagggcgtgaaatattccggctggagaagctggagctgattgcccgcaataaggtccgtacactgcgtgaagttgatgaaacagaagtttatctgggctaccagaataaactgaaagaacagcttgaactgagcagtgtaacggcagaaatgcagttctttgatgtttcacatattacagagtcagacctgcggggcgccgaaatccgggtgaaaattgccgaagacctccggttcagagagtggattctgcagtgggctccgttacacagcgtgctcaagcatacaaacccggaacactgggaaacactctgtgaaaagaaaatatcagattatgataacgaattccggatgctgtctgacacggcgctgaaaccgaatggactggctggtgatatcgatgctgaacggactgtcggagtaagagcgctgtag

SEQ ID NO: 293365 - DNA, 927 bp, Morganella morganii
atgccaacagcccgtgtattatcgacccagcccgcttacagtcgtgaatttgatgattactgtaataaactgaaaacgctttctgagcgtgcggcatcctatcttttatatgaccaggaagtgaaaataatttaccgggagaatatccgcaaggtgatagcgtatttgcgggaagaattctaccgcaagcggagttcggctgaggatcattatgcttatatgcaaggccgggataatgcgtttaatggtcttatttatttatatgatagtgaggaagctgattaccaacgaggcaggcgtaatgattggtctgtttatgaggcaactgaacaatttgaagagcagggatggattttttatgcaaaaaagacaggtgagattgttggagggctaattcagattactggtggatatctgacctttaaaacaggaaaactaataaggtcaaataaattaaaaggtataggtgctttggctatagctactggtttcagtaatactatagatcatggtgctgttattctatatgagataaccaaaggtaagtctggtggatataacaataattatatgcaaaatgctatggcagatatttccgaatatgcggggtatggaagaagaagtggcgagctaacttacaaaactgtcgattttagtgtcagtttatttctttcattcggtgccttagttaagttaaaaaaccccaacaggctattaaacctcccagtcacaacccgaaatggtgttgtttatccaacacgaatggagcgctggtttggtgataaaggtgggttctttctttggcatgcactgcgctctgatttcacacagaagtttaaacaaatgccaagacctttatttatctataatgcaggtatgagtggtaatagattaagattgttactttctgaagaaacggatgattaa

SEQ ID NO: 293366 - DNA, 231 bp, Morganella morganii
atgatgaacactgacgtcgtcgtctctttcagaggaaaacgaaaggcgggacttttttgggatggtctgaacctgtttatgaggattgagtcaggagtaaaaaataaaaagactagccacacccgttacttaacccgttttctggcgggttttctttccgggacatataacttattgttttatatggtccctacaggattcgaacacaagtcaattaacattgttttataa

SEQ ID NO: 293367 - DNA, 609 bp, Morganella morganii
gtgtcaccctatgccggtaccattcatgacgcccccggcgtgattaatctcatccgtgagtttaggtcattagacataaaagcaacagaattcagggctgcaaacggaaaaacctatatcagaatatcgggtcgtgccggtgtcagacggatagtgatcggaacccgttacggtgccactcaccctaccatgctgaacatggggatcggcatgcaggggttgaaagatggcattgtcaaaggcgttaaattttgtctggttttctcatttatttacagagggctggaatgggcctttaaggatgaataccatttcgctgattttctgggaaacgtgactgttgatatggcgaaaacagcaataattgcagcaggttcttgggttacaggttcatttttattatcgggagcaattgcaggggcaagtataatcgctgttgggataattgtattatttgtgggttttggtatcactgctggcttagagtatatagataataaatatggattaagcgaaaagattattcagtatttgagagaggaatcgaaaagaacacgaacgccgcaggctgatgttaataaaattcttcattcgttaccgaggtattga

SEQ ID NO: 293368 - DNA, 642 bp, Morganella morganii
atgacaacattcttccctgacgttcttcagtccgggaaatttacatttcaggggtttttatatgaaaaagaaaaagagtcaccataccgctccttattttttttacttatcatcacgtcatctgcgcaggccataacgataaacaaaggtgtaatcaaagaactggatgataaatccgcaatagtggatttcggtaatcttttggttcagaacggcggtatcaatgttaagaacggtacgcttgaaacgcagggagcaaccattacagaaaaagccggagaaacagggtatgtcacgctttcgggcagtgactcattgcggaaaagtaccggaacactcagactgggtatcatagacaggcctcttgattttgatcatatcgtatcgcaggccagcctggaaattactgatggcgctaatgtgataactgacgattttgtgatgggaaattataacgaggtccgggttgataatgacaacccagtgactctccggaagatactccctgtgagatcagtccttggttctcgccggttactgacgggtaaacaaacctacattatctctttagtgcaaaataatgtttataatattttctttaactcgtctttatttctgaaaagtaaagctctaaaaatataa

SEQ ID NO: 293369 - DNA, 396 bp, Morganella morganii
atggaaaataaaatccatttgtggattggaagtaattttttacctgaagaacaatatataagttacttccagttagactattctgttgaaggggattttgatgaccctaactataaaatatgtcagttttgcaaggatgtaggcctgaaatggtatgatgaggattttattgggatcataccgaggcatgaggaagatgtttctttagatgatattttagctgatgcagcagttgatgactgtgagttaaatataattaaagaaaaatgtaataatttaggaataaaaaaagcaaatacaattttttggtatcaaaatgaagattttgaaataaaaaaaccaataaaggatttttataatggtttgaaatacataggtctatttcaagctgattga

SEQ ID NO: 293370 - DNA, 222 bp, Morganella morganii
atgctcaaaaaatatatgatactcaccattattaggacggttagcccaaccccacggatcaacccaccccaccggattcggcgcatactgatacagattcagcccaccggccagccctatcgggtcctgctgggtaaagcgtcccgtatccggcgcgtagtaccggaaggtattatagtgcagtccggtttctctgtcgaaatattgaccctgaaaacgtaa

SEQ ID NO: 293371 - DNA, 540 bp, Morganella morganii
atgcatgagcttaaaatatcacataattatcctaataaatattggctgaaatatgaggagaatggagttacaagtgacgactttatgagatgtaattacgtgaattttaatgataaactgaagtttggtttaaacggagtggttagtgaaaaaaaaatattatcctatgattttttatttagtgatgggcctattgtagtatcacagaaagctgcagaactgttatctcccagtgaggaaatgggtgatatacaacttattgaggctagtttatctatgaatgggacaagccattatggctacaaagtattaaatatacttcgttcgttgccatgtatcgatatggagaagtctgaaagtcaaccgatattaagttacttaccagatggtcctcgtaaatttagcaaagtagtactgaaaagaaatgtgaaaaatgactttttcatagctagatctctggaatgtaactcatttattgtaatgtcagactctctgagagaagtttttattgagaataatataatagggctggagttataa

SEQ ID NO: 293372 - DNA, 660 bp, Morganella morganii
atgaatatagacagagcagcggggccggttagtcacgggcggttatcactgtcatgtgatgagataaccgggaagattgagtccgtttatccggaatacaatgctgctgatttgcagaatgatccggatggatacctgaggcagccggatacgtttgcactgaaataccaccggttcagacaggagataacatcttccctctgtcgttgttatccgggaggaacagtatcagcggagcaggtgaacacaccggcagacagttggctgagtgtggtgaaaggcttgcgtccgatggggcaattcagtgtgttttcactttgtgacccgttattgcatgccctgaatgaaacaccggagattggcgtaaaatgccttcgcaaacaaggtaatatcgcattgtatatcattcttgtgtatcgccgtgacagtgatgacggcgaacaaaaggcgcgggattttattgcattgatggccgaaaaaaagaggatgatggagagcggagccggcacgcatgaggagcgcgtcttcagctcagaatatcagcttggccggcggtttggtgaactgctgagttaccatcctgcggatattgaccggtatgaagccatgatgaaaaataagacggaaatactgagggaagggcatacatcagggaaataa

SEQ ID NO: 293373 - DNA, 138 bp, Morganella morganii
atgatgccggatgctaaggctaaatcattcggtttgcagcaaggcagcaagcagaaggaaccggggagcatacatcagtatgtgacccggatttctgagtgcagccaacgcagccacggattgaaagatgacgcgtaa

SEQ ID NO: 293374 - DNA, 228 bp, Morganella morganii
atggacattattactgaaattatttttcgtatcattgcgttcatggctgaacttgtttatacagctcttcgttttttgggatttagaattgctatcttagggactggttttttccttctccatatgttcagttatcaacctatcttcatcgcaatgtttgtagctgtagtttgcgtgttatacgcaccttttgtgtataagctggtgaaaaaaagtaatggtaattaa

SEQ ID NO: 293375 - DNA, 765 bp, Morganella morganii
atgaatccaacaccggcagggcagaatgttattttaatcggctatacttcatcgggagttgaacttggtacactgactgaaggcacagcagcaagagttcccggactggctgagcgatttaatggcatttgcaacagcgtggcagatttttttatatcagcaaaaggaaaggcgaataattcacttcatcaattgggagactgggtaaaaagcattgcaatccggcaaaaagaaccggagactgttttgttacagaaatcgcctgaagacggcgctattcaggagaagcggtgtttattggcggctcaggaaacactgaaagcggtgcaggcacatttaccggatcatttgaaccatttgaaagaagcgctggataataaaaaaacattgacagcagattccctgatggcattgtcatcagggaatctaagaaaagtgattacagcagtgagcggaataggaactaaattaggtggttccgctgcacaacctatcagtaaaaaagcaactgaattactttctgaagtcaccgatttcttgtataaaccaccggccagactgaccgatatgacggtatcagatatgggtacaatcagttctgcaaatgatgcacttcgtaatctggaaacagataatttcgagacgcagttcagaaataaagccgggaagttacttacggatattgaacagtatattttgcctgagttaatgaaacttcgtccggaaaatattaccattccgtctaaagaaccagtatctggctga

SEQ ID NO: 293376 - DNA, 246 bp, Morganella morganii
atgcaaacggtcaaattaaacaatggggttgaaatgccattgttaggcttcggtgtctttcagatgacagatgcggacgagtgtgaacgcgctgttattgacgcgcttgaaaccggttatcgtttaatagataccgctgcatcctatcaaaatgaaactcaagtcgggaatgcattaaaacagagccaaatgggcaaaagcgcaatttcaacgttcattaagtcgcctgcaactcgactatgttga

SEQ ID NO: 293377 - DNA, 495 bp, Morganella morganii
atggaagaactttatcaagctggaaaaattcgggcaattggtgtcagcaattttcatccagacagattagctgaccttattgcatttaataaagttattcctgcggtcaatcaagttgaagttaacccatttaatcagcaactacatgcagtgccatggatgcagagtaaaaatatccaaccagaggcttgggcgccttttgctgaaggtagaaatggattatttcagcatcctcaactcatcgctatcggtgaaaaatacggcaaaagtgttgggcaagttgttctgcgctggttatttcaacgaggcattgtgtcactggctaaatcagttcgtaaaaccagaatggtagaaaatataaacattctcgatttcactctaaccgataatgaaatgacacaaatcgcagcaatggatacggcaacaagtgcatttttctcacaccgcgaccctgcaatggttgaatggctcgctggccgcaaactagatgtttag

SEQ ID NO: 293378 - DNA, 426 bp, Morganella morganii
atgagcaacattaccatctatcacaaccctgcctgcgatacttctcgcaacacgctagagatgatccgtaacagcggcaacgaaccaacgataatttattatctcgatacgccaccgacccgtgatgagctgattaaacttatttcagatatgggaattacggtgcgtgaattactgcgtaagaatattgacccttatgaacatctgggtcttgatgaagagaaatttagtgatgagcagttgattgattttatgcttcaacatccgatcctgattaatcggccggtagtcgttacgccgcttggcactcgtctttgccgcccttcagaaatagtgttggatattctaccggaaggtcagaaaggagcgtttaccaaagaggatggcgagaaggtcattgacgaaacggggaagcgggttaagtaa

SEQ ID NO: 293379 - DNA, 1290 bp, Morganella morganii
atgcttttggcagggagtatatttttactgacgctgatactagtgatctggcaacccagaggcttgagcattggctggagtgcgagtatcggggctatgctggcgctggtaactggtgtcatccatatcactgatattcccgttgtctggaatatcgtctggaacgcgacagcggcatttattgcggtcattatcatcagcctgctgctcgatgaggccggcttctttgagtggaccgcactgcacgtctcccgcttgggtaacgggcgtggtcgcctgctgtttacctggatagtgttgctcggtgccgctgtcgctgctttgttcgccaatgacggcgccgcgctgatcctgacaccaattgtgattgcaatgctgcttgcaatgggattcagcaagagcacaacactagcctttgtgatggccgcaggatttatagcagatacggccagcctaccgctcattgtttctaacctggtgaatatcgtctcggcggactttttcgatctgggctttactcagtatgcctccgttatgatccccgtagatgtggcagcgattacggccacgctggtcatgctgcatctctttttccgcagggacattccggcgacgtatgacgtttcgctactgaagactcctgccagtgtgataaaagatccggcaacgttcagggtgggctggattgtcctgttattgctgcttgtaggtttctttgttttggagcctatggggatcccggtcagcgcgatagcgactactggcgcagcagtactgtttatagtggcgaaaagaggtcatgccatcaacaccggaaaagtcctgcgcggtgcgccatggcagatcgttattttttcgctgggcatgtacctggtggtttatgggctccgcaatgcagggttaacggagtatctgtcaggtgtattaaacctgctggcagaaaagggattatgggcagcaacgtttggcaccggtttcctgaccgcgctcctgtcgtcgatgatgaacaatatgccgacagtgctgattggcgcgctgtcgattgatggtagtacggcgactggcgtcgtcaaagaggcgatgatttatgccaacgtgatcggctgcgacttaggcccgaaaatcaccccgattggcagtttggcaaccctgctttggctgcatgtgcttgcccagaaaaatataacgattacctggggatattacttccgcaccggcattatcatgactcttccggtgctgttggtcactttggccgcgctggcgttgcggctctccatcactttgtaa

SEQ ID NO: 293380 - DNA, 321 bp, Morganella morganii
atgctacaacctgttcagcttttcaaaatcctgtcggatgaaacccggctcgccatcgtcatgattctccaggagtcgggagaactatgcgtctgtgatatctgcgcaaccatttccgaatcgcagcccaaagtctcgcgacatatggctattcttcgcgaggctgggttggttctagatcgtcgtgaaggcaaatggatccactatcgtctgtcaccccacataccggcatgggcagctgagacaatcacaacgtcctggcagtgtatgcgagaggatgtgcgtgaatggctggataaatcagcctgcacctcctgttaa

SEQ ID NO: 293381 - DNA, 699 bp, Morganella morganii
atggaacattttccagctctaaatagtgaatactttgatcaacacatcgccaagcgcctgcacatgcacgagccgccgcggattctgatcctatatggctcagttagagagcactcctacagccgctttgctgcggaagaagctggtcgtctgctgacagcgatgggcgcaaaggtaaaactctttaacccctcaggtttacccctgccggatgatgcgccagatacgcatcctaaagtcaccgagctgcgcggtctggtcagatggtgtgacgggatggtgtggagttctccggaacggcacggtgctatgagcgcagttatgaaggcgcagattgactggatccccttaagtgaaggcgcggttcgtccttcgcagggcaaaacacttgcggtaatgcaggtctgcggcggttcacagtccttcaatgctgtgaaccagatgcgtattctgggtcgctggatgcggatgtttacgatccccaaccagtcctctgtagccaaggcatggcaagagttcgacgataacggacgaatgaaaccttcttcatggtatgaccgcatcgccgatgtagcagaggagctgtttaaagtcacgctgctgcttaagggacaaaccgattatcttgcagatcgttacagcgagcgaaaggagagccatcaggagctttcatcccgtgtaaatcaggacaaaatataa

SEQ ID NO: 293382 - DNA, 876 bp, Morganella morganii
atgtttttatcaagacagctcattcaatttttttctgttgctgaaaattccagcctggctgaagccgcagaaaaacttaatctgacgccatcggcgcttagccacggcattcgtgatcttgaatgtaaaaccggtattttattaattaaacggtcaggacaaaaatcatcattaactattgccggaagggatctctatcagcaactactgccctattacattcggataaaacatatttcagatagtttgtccggaaagaaaaaaaacaataactcgcttactattaaaacggacagtctttgttacccgccactgaaagataaaataatatcattctgtaaggaaaacccggatctcagcctgtcgttggaattacacgatcacattgatattaaacacgaaatactcagcaaaaacacagatattgttatctcttcagactgcagtacagataatgacgatattcaccaccttgatcttccgccggaagaagcagggattgtcgctcatgacagcctgttaaagaaatatgcttcaatctctgctttagtgatgaatgaaaggcttataaaaataaaaacagaaattcatgaacatatattaagcgagtttttatcaacgtttaaaacagcattaaatgatcatctatcaatcactataccatctgaatatactatttctgattttattgcatctgcggcaggatttagtctgttaccagaaaacttcctccttattgacaaccttaaaaacagaggatgcagatttattaaactccctcatcactataatatattaattaagaaacgtgtttatttcagagaaatacacaaccaaacaacctccgattttatattaaaaatatgcagcaagtga

SEQ ID NO: 293383 - DNA, 1638 bp, Morganella morganii
atgcaaaacacagccttagataaaagtcaagattttaaacttgttgggaatgatgatgttgccgagcagtcaacaattaatgcaactcaagaaataaaagacagtgttactccagagattataatcgcactttgtgggccaattggttcaccgctacatgagactgctgaacagatatcattctcgctgaaaaaatatggttataaaacatatgacatacgtttgagtgatctaattaggattaattcaaaatatacatcaattaatattgatgaaagcactaagctaaagaaattcaagtcgctgataactgtgggtgataaacttcgtgaaaattacggtagtgatattcttgcaaaattagctattgctaaaattagcgccgagcgtaaaaaaaactttggtgagttcgatgatattgtcaatgaatccagcaaaggggaagcgagtaagattaaaaatcaaaaaatttgtcatattattgactcagttaaaaactcctctgagcttgaattgttgaaatcaatctatggaaaaatgattttctctataggtgtattctcccctttagaggcaaggcgtgaaaatctttcaaaaattaatagcctaagtgttgaagatattgctgaactaatcaataccgattctggtgaagagttcgaccatgggcaatcagttagagacactttcccgaaatgtgattactttttgcgggttgatagtgggttggcagagccaggaaatgccgaggctaaaagccaaattctatctaaattggaacgtttctttaagctaattttcaggagttcagttatatcaccgactgaagaggaaaatgcaatgtatgcagccacctcagcggctcgtaattctgcatgtctatcaagacaagttggtgctgcagtaacatcttcatctggagaacttctttctaccggttggaatgatgtgcctcgtaatggtggtggcctctatggtaaacaatctatccgcttaaaagttattgatcctgatcatcgttgttatactttacaaaatagaaattgctcgaatgatgcagaaaagagaatattggctgaagttgtcattgatagtcttgtaaaggaaaaaataatccttgtaaaaaaaagagaagctgcgattcaaaccattataaaaaactcacgattaaaagatttaatagagttttcaagagcggttcatgcagaaatgcacgcgattcttggcgcatctcgtgtggcaggagaaagaattttaggcgggaaaatatttgtaacaacttatccatgccattcctgcgcaaggcatattatcgcttctggtatctctgaagtatatttcattgaaccgtatagaaaaagcttagctcttaagcttcattcggatgcgatgaccgaatcagtaatcgagacggatgaaaaagtgaagttgatacaatttgatggagtagctccaactaggtttcttgagctttttgaatctggatctcgaaaatctaaagctggagtgctagagttagcgacagagggggcggctatgcctgtggatagcgttagtctcaaagcgattcctaaattagaacaggtagttattgctgaagttgatagtaataaacttaacttgttgaggcttgagtga

SEQ ID NO: 293384 - DNA, 258 bp, Morganella morganii
atggtcgcaccggcgactatccgtaaaacattcggtgttgtcactgagcgtacgctgcgggaactgaacggagaaccctgtatcgagctggaagaagtaagaaaggtaaagcagcagatcctctgcttccggtctttcggtaccaaagtgacggacattgtcactatgagaaaggccgtatgtggatacgcggaacgggcagctgaaaaactctgggggaaaaagcagcgctgccggatgatccggctgtttgtgtag

SEQ ID NO: 293385 - DNA, 192 bp, Morganella morganii
atgttcgccacccggcagccattcaaaaacagcgatgaactgatgaagaccatcgacacgatcaataacagcggtatgggacgcgtgtggtttgccggtaaaggcagcgacaaccggtacaagatgaagcgcgaaatgctgtcaccggcatacacgacaaattttagtcagttgccggtggtgaaggggtga

SEQ ID NO: 293386 - DNA, 534 bp, Morganella morganii
atgtctttagttataggtaacggttgctttccgtgtattattgatacttataaagtcttagatgtatttaataatactgcgccccctaccctgagtatctgggagaaaattaaggagtttttctgccgtactcatcagacagaggctatgtcataccttcataaattatgccatcctgatcctgccacaacccaagctgaaacaaaggaactcttcgaaaaattacgtgagttggcttatcccggctttaaggattatttttcaattgatgaagttgaagaagctaaagaagctaaagaagctaaagaagctaaagaagctaaagaagctaaagaagctaaagaagctaaagaagctaaagaagctaaagaagctgaagaagctgatgacgttaatgaagataataaaattcttaatttacgtatcacgagtactgaaggttacaacctgctgacaatacgtattaaaaataactattttgttgagtggaaagacaatattcattatctttatccgctccgtcagtcagcctga

SEQ ID NO: 293387 - DNA, 246 bp, Morganella morganii
atgggtgaggataataaggcgaatttaatccagcttaataacctgacacgtgaaatggaggacatgttaaagccggatgaacgtaaaaatgtgggtgagcgcgtcagcgctgaatttagaagaagttcaggaaaggtagttgccgaagcaaatagagtcgtcaataaatcaattaatgaaacaggaagaagtgcagagaaagtgaaaaatggatttcacagagcgaaaaaaaatttgaagtggtaa

SEQ ID NO: 293388 - DNA, 189 bp, Morganella morganii
atgtattcatctgtttcaaactctggttctgtaaacacaaccccggtttcacagcaggaaaatcattgcccggcaatttccggtaaaattgatcttctgaaggaaaaattaaatgcaatagaaccgaacaaaacaactcatgaaatcagatatttcacagatttcattgaaaaaatgaaaccaaaatga

SEQ ID NO: 293389 - DNA, 966 bp, Morganella morganii
atgacaacgtcagtaactactacaggttctgtcgaattattccacttcaataaaattgaaaaaaaaaataatcaagacgatataattacattaagcaacaacggaaaagaattatgtttacgtgcagggcgttcattatccgagcgtgctattattgcattaaatggttccatcttaggatccctcccctttgttaaaagagcatatgaaaacctggaacacagggacgctgaggcactacgcagattttgtgacgcagtagtgaacgtttatggtgaagataccaggaatattgttgattcatatttcaacgacagaaaacaattaaaggtttccgatataagtattgctactactaaagctatcgaatgtcatattgattacaagtaccatcttaaaaaaaatgaaaacctggaatctttactaaaagaagaaggatatcctgactttaatatgtctcaattaaaccattgtgattttcatttgattaacaagcttcatgacttatttaataatttaataaaagatatcagtaacgagaggttattcagcgataattttatgtctgctttggagaccggatgtatcgattttgttacctctataccaggaccatcatgcaagtttgcgtgtatagtcgccggtaaaaatattttcgaatcgaatacagacagacaacaatatgaaatagataggattaacatttatcttaactcttttaacgaaatacctcctaatttcacagcagaagacctcaaaaagatatataaagaggcggcctcggttaaatctcaattaatctattcaggcaagcaggatcaatatcgttatcagctgtatgcagatatttttcgtaaggttaatacggtgctgccacaaactgattatgattatgattctgactttgattctgaatctgtacctgaatctgtacctgaatctgaacctgaattgcaacaggaataa

SEQ ID NO: 293390 - DNA, 2607 bp, Morganella morganii
atggaaaataacgtgaagggcaatatttaccgcctcacattcgcttatacgcatatcaatttaaagagagtttttattatgccatttcaaattggaaacgaactttttcctgttgtcgtcagcggtaacgacattaacacagcaacctgctctgataccccgacggagatgagtatatgggaaaaaatcaagccgtttttttgctcagcgaataagcctgaagtgctggcactcatccggcagatttgtcatccgccggacggaacagagtggaagatggtgactgaaaaatttgaacggctcaaaacactcacgtatagcggatttaaggagaacgttcagtttggccgggacggggaaaatcacgcctgtattctggacgaaaatggtgatgagatgctgtcagtcaccgttgatgataccgggaactataccgtgaggtgtcaggagtaccataaaatttcccattttaccgccacagcggcaccacagactgcaccggattatgaagcgatctggtctgcgtgggaaaatgcagcaccggcaggagaggctcccggccgggcgactgcggtacagagaatgtgcgactgcctgaataatggcgggacagagcttaatctgaactaccttaaactcacctccttacccggctatttgccgccggatattactgaactgagcacagtcggcgtttcattgtgttatttgccggtacttccggcagggctgcggaagctggttgtcgtaaataaccggctgaccagcctgccggtgctgccggaaaggctggagaagctgatagttgacaataaccggctgacccgcctgccggtattgccggaaaggttactggagatgagtgctgacaataaccggctgaccagcctgccggtgctgccggaaaggctggagaaactgatagttgacaataaccagctgactcgcctgccggtactgccggaaaggttactggagatgagtgttgacaataaccagctgaccagcctgccggtactgccggaaaggttgctgaggatggcgtgcgggggtaattacctgacccgcctcccggtactgcctgaagggctggaggcgctgttgtgcagtgataatcggctgatcagcctgccggcactgcccggagggctgcaggcgctgttgtgcagtgataatcggttggtcagtctgccggcactgcccggagggctgcaatatctgattggcgcaaacaacaggctgacctgcctgccggtgctgccggaaaggctggagaagctgatagttgacaataaccagctgacccgcctgccggtgctgccggaaaggctggataagctgatagttgacaataaccagctgaccagtctgccggtattgcccggggggctgctggagttgtttgtcagcaataaccagctgaccagtctgccggtattgcccggggggctgcaggagttgtttgtcaacaataaccagctgaccagtctgccggtattgcccggggagctgcaggagctgtttgtcaacaataaccagctgaccaccctgcctgaaagtgtcgccggcctgctccgggctgcacaggtaaatgtatccggtaatcctctttcagcgcacacgcgccagttcctggagactataacccgtgatctgggctattcggagcccgtgctatctttcagtgtggtcaattcacccgaataccggaaggctcgtccattgcacctggcggtcgctggctggctgacaccggcaaaagagaagtcggatgaaccagtacccgcagacagatggcagtccttcggacaggaagataatgctgccgccttcagtgccttcctgaacaggctgaaggagacggagaacttcagaaaagatcccggttttaaagctcagatagcttcttggctgacacaactggctgaagatgatgcactgagagtaaaaacctttgccatggcaaccgaggcaatgtcaagctgtgaggaccgggtcacacttgcgctgaaccagatgaagaacgtggtgcagatccacgatgcagaaaaaggaaaatacgataacaatctctctgaactggtatccgcagggcgtgaaatgttccggctggagaagctggaactgattgcccgcgataaggtccgtacactgcgtaacgttgatgaaatagaagtttatctgggctaccagaataaactgaaagaacagcttgaactgagcagtgtagcagcaaaaatgcggttctttgaggtttcatatattacagagtcagacctgcagaccgctgagattcaggtgaaaaccgatgaaaacagcgagttcaggaaatggatactgcagtgggcaccgttacacagcgtgctgaagcgtacaaacccggaacactgggaaaaatgctgtgaaaagaaaagatcagattatagtgacacataccggatgctgtctgacacggagctgaaaccgcatggactggctggtgatatcgatgctgaacggactgtcggagtaagagcgttgaagagtgcagagcgggcattccaggatggacttggttctctggtggacgagatgttgggagaatatctgaaggagcgatggtcttaa

SEQ ID NO: 293391 - DNA, 642 bp, Morganella morganii
atgtgcaaagtcgtttttcctgaaattcataatgtcaatatagacgttgagaagattggtaaccccataaacccgctgttctctgttaatggcagcgttaacgttcagggcagcagcgaaggaacgcccgatataaccgactttttggctggcatcaatgaaaggcttatcacgatgctgatgctgataaataaactgcgcgacgcgctgcagctcattaaccaaaagaaacaggttctgggctgggggcttgaagtcaacgctctgcagcaaaatgttaaagccattgatagtagcttttatgccgctgtgtacggggcggtttgcggcattattggcggcgtgctgacggtctctggtgcagttatgggcgtctcttgcggcgaggtctggacgatgataggtaaggctgtggggcagatggtcaacaatgctggtgccttggcttccggaagtaaaacccgcgaagcggatcaggagaaagccattggagggctgcagaatcagggcgcgcagtcatatgtcaaaacacaggatgattcgttggtaaagggcaatgaaatcaacaaatactggatagattttaacagcaatatggtggagcaggagggccagatgctgcgcgcgctttttcgctattaa

SEQ ID NO: 293392 - DNA, 1434 bp, Morganella morganii
  misc_feature (1401)..(1410): n is a, c, g, or t
atgaaattttatgatacgtatcatctttataaaaatgcaatttccgggtattctgccggcatgaagaaagataaagttatgcttgtatctcatattcgtgtggtttctgatgaactctatgcaacagatagatcaaacaccaagcgcatagaatatcttaaggtcgagttgtatcatttaacaaaactactccataacagaattgatattgaattcagaccattacttgtaacatctgttttaaaaaatggatattattatccgccttttgaagaaatatctgccgggataatacttgaaaaggtagttcgtgatatacaatctattccggatagctataaagttatttatggccctgcataccaggcaagaaaatcgcttttagcttacgcgctatatatttgtggaataagttcaaaggcatcttttgataattcaatttttaatgaaagagataataatggaaatcgggtaatgagtgatcaggatacgtatgaatatctgattaataaaacgactggtttcgtatcaacccccggaagtaatatactgcaggaagttgcacaacattacttctattctgttagtgtgatgctgggatatttacctaatccggatatattcctgaatgtacgtgatggtgaggaaaaaaaactgaaagatttcactctgagggataaggctgactctctgaaatattatttaagacaggatatagatattgcaaaaataagagtgcgtcagcaactgggttattttttatctattgcatctcttattgctatgttttcaaatataataaatgatgtggagtcaatgtataccagccgaagaaacctgattctatccggtatggattcaaataacgataaaggtaataatcgaattgagaggccaaataaggctgattataacccgcagtatcaatctgatgtgagtagtgaatacgccagccgtaaaaataaagccataggaaaaataatcgccttagacaaattaaaaaaaatagatgtggttgaggaatcgtgtggtccattaaaagtatggactcaagaaaataaaagggctgacacactggtattgagtggacatggatggtatctgacacacgataataaccttaattttggtttaatacctaaagataaagacattatttttctcggtccgaataaggacaaactacttgaagcggaagaacaatttggccgctccgccaccgaatcattatttgcatcgggtcaatacccggaaatacatacccgcataacatcagagggtatacaggtattgaaaaaaacaatgggagaggcttcgttagatgaagtgaaaaactataggattaaatattacgaaaaaacaccggatgaggaatatattgctgcagtaaaagataacagnnnnnnnnnngaattaattttaaagataatttaa

SEQ ID NO: 293393 - DNA, 906 bp, Morganella morganii
atgatcaaacgcaacctcagcgatttactttcttttgtcatagtggcacgagaagggagctttactcgagcggcagcccagcttggcgtaactcaaccagcactgagccaaacgatttctggactcgaagagcgtatgaaaattcgtttgctaacgcggactacgcgcagtgtttcgcccacggtggcaggtgaacgacttttgcatacagtagggcatcttattgatgagatagagtctgaactggatatgctaacggcgctaagggataaacctgcaggagtagtcagaatcacctgtggtccgaatgttctcaaaacaacccttctgcctaaattgacgccgttattacgagaatatccggatatccatattgagttcgacgccaatcatgggtttcgggacatcgtggcgaaccgttttgatgcgggtgtacggctcggagatactatcgataaggatatgatcgcggtgcctatcggccctaaaatgcgtatggctgtaatggcttctcccgaatatttctcgcatcatccagcacctcaaacaccacgtgatctgactcaacatatctgtatcaatgagcggatggttcgttctggaaaaatatatgcttgggaatttgagcaggctagcagtaaattcagagtccgagttcaaggtcaattaacgtttaatacatctgagcatgttgttgatgcggcactctctgggctggggattgcttttttacctgaagaagaattcggcacacatatgcgagagggcaagctgatccgcgtacttgaggaatggtgtccgccatttccgggttactatctttattaccccagtcgtaagcaaccttctccggccttttcgcttgttgttgatgcattgcgttttaaccagaaaattagcgattaa

SEQ ID NO: 293394 - DNA, 438 bp, Morganella morganii
atgatggtcttatttatcagtctgcaattttttacacagtttgttatcgcggacgacagtgataaaggagataaacaagtgtcatttatgaaaattcagatcattatagacggggaaacgaccaatgctaccctttttgatacgcctgcaggacgagattttgcgtcaatgctcccccttaatctgacactggaagaatatgccgatattgaacgtattagccaacttccgcgtatgctttcgcaagaacacgctccagacggcatgatcccgaaatctggggacattaccttctatgcgccttggggtaatttagctatttttattcagggcagaccttacgcccattcactgatccctgtgggtaaaatcgattctggactgacattcctagaacgtcgcggccccctctcagtgcatattagagctgtagattaa

SEQ ID NO: 293395 - DNA, 1218 bp, Morganella morganii
atgaataaccaaacagatgagtataaaaataatgtcaccaaaagcaaagccccagccgcgcactggagtggagtctttgccatgacgttatgcgtcttcgcgttgatcgcctccgaatttatgccggtcagcctcctgacgccgatggcgcagacactgcatgttactgaaggcatggccggtcagggtattgctatttctggtgcatttgcggtggtaaccagtttatttatttccgtactggctggctcgcttaaccgaaaaattctgctgctcggcctgacctgcattatggcggtttctggtgcaatgattgcaatggctcccaactatttcatctatatggcaggacgcgcactggtaggtgtcgtggttggcggtttttggtcaatgtcagcggcgacggcaatgcgtttagtgccggtacaccggatcccgttagcactcgccatttttaacagtggcaatgcattggcgacagtcattgccgcccctttaggtagttggctcggttcggtgatcggttggcgaggtgccttctattgtctcatacctgtcgctatcgtcgcatttatttggcaactgttcagtctcccctccatgcctgttgttcggcagcatcgcgaggttggtaatgtcttcacactgtttcgccgccggattgtgacactaggcatgctgggtgtcggcatcttttttatggggcagtttaccttatttacttatatccgaccgtttctcgaaatggtgacaaaagtggatgcatcgacagtaactctcacgctgttggttatcggtattacgggattcattggtaccacacttattaataaggtgctgaaacgtagattctacctgaccttaatggttattcctgtcgttatggctatcactgcactggcattgattatctttggtagccaagtcgctattgtaattgcattgctgggtttgtggggactgatttctactggtgcgccagtagggtggtgggcttgggttcctcgcacctttcctcaaaatgccgaagcaggtggtggcttaatggtagcgatgatccagttgtccatagcatttggctcaacagtcggtggcctacttttcgatcatcacggctaccagagcacttttctggctagcgccggaatgctgattatttcagctgctcttatttttttaacctcacgtgcagatacgtttgccaaaacctattcataa

SEQ ID NO: 293396 - DNA, 987 bp, Morganella morganii
atgaactacaagcacctgggtcgtaccggcctgcgggttagccgcatcggtcttggtaccatgaatttcggtgaattaatggatgagtcgactagcttcaaaatcatggatgaagccgtggattcgggcatcaacttttacgataccgctgatgtctatggtggtcctcagtcaccggatatgacaaaaggttacgggatatccgaagaaatcatcggtaactggctagcgcgtagtggccagcgagatcgaatcgtgctagccaccaaggtttaccaacctatggatacggggccaaacgacaaatatctgtccgcttaccatatccgccgggcctgtgaagctagtttgaagaggctgaaaaccgatcatatcgacctctatcaaatgcaccatattgaccggaacactccctgggaagaaatctggcaggccatggaacagttgatccgagagggtaaaattagctatgtcggcagcagcaactttgctgggtgggatattgctactgcacaatgtaaagctgacgcacgcaacttgttgggactggcatctgaacagagtctctacaacctgacccagcgtactgttgagcttgaagtcattccagcgctgcgtcattacggcattgggttgatcccttggagcccgatagggatgggaattctgggcggtgtgctaaagaaaataaccaacgggcgccgaggtacaccgcagcttcaagcacaaatcaatcgcttacggccacaactggaagcgtgggaaacactgtgcgatcgactaggagaaacaccgtcaaacatcgcgctagcttggctattacaaaatccagtggtaaccagcgtcctcagcggaccacgcaccgttgaacagcttcgtcagaatatctcagcattatctataacgttatcgcctgaaacactcaaggctctcgataccatctggcccagtctcggtggggaagcacctgaagcttacgcatggtaa

SEQ ID NO: 293397 - DNA, 270 bp, Morganella morganii
atggcgattcaactgctgctttcttttacaactggagcatcggaagcggcctacaccacgtctggtttctttggccacacgattgaagaatatctgctcccgtttaagaccactgcagctctatgcaatctggagtatgtggaagctatttatacgaatggagtgagttacgccggtcgggatgacgaggaaaaagtgtccgcacaaaaatattctgctcgtgaacatgctgctcgcttgattgattctatcagaaataatattgcctaa

SEQ ID NO: 293398 - DNA, 297 bp, Morganella morganii
atgtttataattaatatcacagtcaattctgatgtaactgaacaaactcagaataaaatgtttccagttcacattagatggctggagaaatattttactaatggcaaatttctgatgtttgggccatttattgatactgatgctcatgcaggtgttatttttgctcagataagtagtaaggacgaattacaatctatcttggaggaagactgctattatcccgaatttgcccagtacgacgtgcgtgaattcaatccgaagctcattgcagaaaactttaatacaatagttaagtaa

SEQ ID NO: 293399 - DNA, 174 bp, Morganella morganii
atgataatcattgttaatatcatttccgttaccggtgaaaagaaactgacagcaatttcaccgatcttttttactgtctctgccggaaagcagaaacgtattccgatcattgtttcagagatgaaattatttctgacaccggccatcgtcacagactgcacgatgcagtgctga

SEQ ID NO: 293400 - DNA, 288 bp, Morganella morganii
atgagttataccgttaagttcagggaagatgcactgaaagaatggaaaaaactggataaaacgatacaacagcaatttgccagaaaactgaaaaaatgctgtgaaaatccccatattccttctgcaaaattacggggaataaaggcgtgttataagataaaactgcgctcatccggcttccgtctggtttaccaggtcatcgatgacacacttgttattgctgttgtggccgtcggtaagcgggagcgcagtgatgtctataatctggcaagcgaacgtatgcgataa

SEQ ID NO: 293401 - DNA, 540 bp, Morganella morganii
atggactggtcatcaaaattccgccgctttgataacgcctttaaccgtttttacgcccgtaaagcctggctggtatggctgattttactctccccgggcctgggcagtgtcgccatggctgcgttcgggccgcctgccggtggtgtgacgctgattattcacagtaaactggatcggcctgttctgggattcagtgtcaacggcgtggccggcggtaatgcctgggcacatgacccggacaataaatacgccggtgaaaacggtaaatctacctgctgcggccgcattaccggaaagaccgccgaggtgatctggacgctcagcgtcaccggccctcagtatgagtcaggaatgcgccccgagcagcggcgtgtggtgatcccgatgccggaaagaaagcggggcgagaacgatctgcacgtccattttttaccgggagacaaagtcgtcctcggatggagtgataacgcattttcaccctattccccccgcagccctcactaccgtccgctgcctgacacagaggaagccgcacaatga

SEQ ID NO: 293402 - DNA, 1635 bp, Morganella morganii
atgaatctcatgtacctggcccgcagcgggctgaattctgcacaggcagggttaaatgtcattggtaataacatgaataatgctttgacgccgggttatagccgtcagatgatcatgctgggcgaggcgggcggtaaaacgacgagttatggttttttcggatacggtgttcaggttgatggtgtacagcgtgcctataatgggttcctgaataatcaggtgcgaaattcaagctctgagttcaactcactgggcgcacgttatgaaaacgtcagccagatagataatatgttcggcgatctatctaacaatatctctaatgcttttggcggcatctttgagtcaatgcaaaagatgagcagcaatccttcggatcctgcggcacgtcaggaaacctatgctcagtttaattcaatcagctacaagttccggactgacagtaacacactggatggcctggaaaaaagtacgaatactcagattagccaatcagttgatgatattaacagttatgctcagcaactcgctgacgtcaataaagaaatcgacaaagtatatggtcagacgggtacattaccagcggatttattagatcggcgggatctgttactggataaactgagtagtcaggttgatatcagagtcaatgaaaatcctcagacagggcgggttgacgttacactggccaatggcctgtcattagttaatggtgataaagcctacgcgctggaagccagaccatcaccgtcaaatccgaatattactgaagttgcctatattgatgcatcaggcaatgcattgttgctggatgaacagaaattcaccggcggcaagctcggcggattatttgagttccgtaataatgatttagtgactgcccgtaatgaactgaaccagctggcattgcagatggcaaatgagttcaatatggtgaacgctcagggttatgacgcagagggtaatccgggcggggatatttttaatatttctgatcctgttgcactggctaaccggaataatcaaagtgatacaacgttagatattgcgtacaccaatatcagtgaagttaatgccgttgaatacaacctgacctttgacggaacggactggcaggttaagaccagtgacggtcgcagcattacccctgatgtggggccgaatggtgaactgttatttgaaggcatatcagtaacaccgaatggtaccccggaggaaggtgacagctttatcatgaatccggtttccggtgttgccggcagcctcacggtggcacttaccgatggtaaaggcattgcagcgtcaagctcaccggataccgcggaaagcagcaataatgaaaacctgctggagttgctggcgttaaaagataaaaaaatggtcggtaatgccacgtttacggaagcctatgccagtatggtgagttccgtcggcagtacgaccaaagggcttcagggtaatctgcaaacggcggataaagtcttaaatgaatgggccctccagaaacaatccgtttccggggttaatatgaatgaagaatatatgaacttaatgatgttcactgagtattaccaggccaacgcccaggttctgcaaacggcagtgacgatttttgatacgattttgagcattcgctaa

SEQ ID NO: 293403 - DNA, 921 bp, Morganella morganii
atgcgtcttagtaccagttatatgtatcagtctaatgttaacagcatgagtaatgcggaagttaacaggcagtatattgctgaacggttctcggctttacaaactctgctgagaccgtcagatgacccgggcgctgcttctcaggcgattgtttatcagaatgcgttatccgatataaatcagtacggtacagcaaggatgtttgcccaggatgcattaggttatgaagataatgcactgagttcgattacaaatcttctgaccaaaaatctgactgaaaaaatagttcaggcaggtaacgatacctattcagatgcagaccgtgaggcattagccgtcgagctggaaggtatccgtgatagcctggtggatttgggtaacagcaagaacagtaatggccactatatttttggcgggtataattctgattctccgccatttttaccggatggtacttatgtcggcggtgataaagcgatgacccagaaggtcggtgacagtgcagaaatgcagattggtcataccggcagcgacgtttttatgagcggaaccggcgatgacctgttcgttgcactggataatgcgattactgcattaagacaacctattgaaacggatgcggatcgtgaagcattacgggatgtgcttgacgatacaaaccgttcaatcaataaatgcattgataacctgggtaaggtacaggctgaggttggtactaatttacaacaactggaacagatgggattcagttctgatctgaccaaaattgcggttgaaaccagttatgcggaaacaattggtgctgatcctgattcaattatgaagatgccaactcaggtggtaatggctgagctggcgcttcagacatcgatgttagtttttcagtccatgaagaatacatcattgtttagtatgatgtga

SEQ ID NO: 293404 - DNA, 1470 bp, Morganella morganii
atggcttcaataacatcgttaggaattggttcaggtctggatacagcaaacatgctcgagcagctcaaatacaacgagcaaaagcgtctgctgccttataccaatatgcagaacagctatgagtcgaaaatctctgcctgggggcagatttcaagctcgctggatgcactgaataaaagtatcaagccgctgcagggtgatgcctttcacgcggtcaatgtcagcagcaacaaagcgtttaccgcaaccgcaacatccggcgcaatcgcagacagccatagcgtgacagtgtcacaactggcgacgtcacataaagtcaaaactcagccactgggccctaaccagaatgccgataccccgctgggagagcagggccagggttcacggactgtcgtcattgagcagaaaaacggctcagaaatgcgcgtggagctgaaggatgacgaaacatcactgaaccagattgccaaagccattaacaaggaagatggtgatgttcacgcaagtgtacagaatactgatcagggtccgcagttagtactgacgtctaaaacgaccggtactgacggtgaaatgagtgtccgggttgagggtgatcagaaactggatgatgtcctgaactttggcgaccccgcaaaagagaacggaatgaaatccgttgcagccgcacaggatgcacagctgacagttgacggcagttcttatacccgttcaagcaacactatcgacgatatcctgaccggtgtgacgctcgaactgaaagaagtctccgaaaaggatccctctaatcctactcaactgaaagcggaaacgttgtctctgacaccggatatgtctcagtataaaaccagcattcagaatttcgtgactgagtacaatgcgctgattaatcagaccaccgcgtccagtaaatatgtaccgagtgattcctccggattaaccaataatgacgtccagaaaccgagctcagagaatggcgccttaatgggtgattccatgctccgcggcctggtcaatgaaacccgtaccgcggttaacggcgtctacggcgaaaatggtgcagagtaccggtcattagcggatatcggtatcaccatcgacccgaaaaccggtctcatgacgctgagtgaagacaagcttgatgccgcgattgcaaatgaccctgatgccgttgccaatatttttatggataaaaacggcaatgagggattagccagcaccttaggcgggattatcaccaaatataatggtgatcctgacaaaaagattgacggatcaattaaagccgcgactgacagcctgaataaacaagtcgaacaggtcaaagaacagattgagagaacacagaaactgattgatgcacaggttgagcgttatcgtatccagttccagaccctggataccacgatggccagcctcaacagcaccagtaatcagctcggcgctctcatttcaacattaaataactaa

SEQ ID NO: 293405 - DNA, 1059 bp, Morganella morganii
atgctcccgccagtatccataaatacagatacttcagcacatatttctcatcataattatcaggcagccccattaacaaccgagcgtgtgatacaaaattcttgcctgatacagggggagcaatgtgattctcgtttcatgggtcatctctcttgggttgaacatgagcatgttgcatcactcaatggcagaattgactttataaataaagtcacatcttatattgcagacacaattccgttgcgggatacaccaataacattgatatcattaggttccggtggcttactgacagaatcatttatagatgaacaacttaaaaactcaggctataaagaccttaactggagagtcatagacccagactaccaaaatagtggatatgaacagtgccggaaagaatttaaacaacgagtcaataataatgtcagggcatttacaacggagcaggcatatttaaacaagtcactcggacattacgggttagctgaaaatgataaaaataacggagccactgtcatcttatctattgaccccccgacaacattagctgaagtaagctgcgactccgattgtatggttctcagaggaacatctgttgaggatgccagcaaagcaaatgggatttatttgcttgttgcaccaataaattataaagaaatgttaaatcaagttccacacgccttatctgaagggagccagcttattgctgttaactgtgcgctaaaatgtttaatcaataaacaaggaaattatgaggttaactttagtccatctgaagcaggtcgttttataaataatggaactaaaccctacctggattctctcagtaaaatttccaatctggcaaagaagaaaattgagttaagtcatgttgacaacgcttttgataagtatattgaaaaactaaataatagtggtcaacttggtatgaaattttttgtttccgattatgatgtaagtatagaaaaattacaggattactttattgagagcaataataaaacattatttgcgtcttttgataagaatgaaacttcactcaagatgaatgaatag

SEQ ID NO: 293406 - DNA, 333 bp, Morganella morganii
atgagactaagtccctaccctgaagtctccttagctgatgcccgtgataaagcccgtgagctgcgtaggcaagtccgtaatggtgttaatccccttgaagaaaaatacgcaaccagagcagaacaagaaaagctggctcataagaaagaatcttttgctgaatacgctgaagacgttattgaaattaaggccaaggaacttaaaaaccagaaacatattgcacaatggcattcaacacctgaggctgaggcttatgcttaccctgtcgtaggtgaaaaacccatcagtgcaatcacgaaagttgatgtactggcaatacttgaacctacctag

SEQ ID NO: 293407 - DNA, 402 bp, Morganella morganii
atggcaattaacgtgattactgtcagcagcaatctcggaaaggattgtgagcaacgatggactccggcagggaaagccgttgcatcgttcagtctgccggttaggcagggatatggcgagcacgaaaagacatcgtgggttatctgcaaaatgttcggcgcgaaagctgagaaattaccagagcacctgaaaaaaggaacgaaggtgacggttactggcgagtttgtcatggaggaatggactgatcagaatggcagtaaacggtctgcaccagtgattatcgtgaatcaactggatttcggcggcaatcaggcaggaggccagaagccgcagacgcagacgcagcaagctccagcacagaatgagtcaccgatggattttgactatgatgttccgttttag

SEQ ID NO: 293408 - DNA, 213 bp, Morganella morganii
atggctcgtatcaatagcaatcaagttccgacactgattagttttttaaccgcacatggagcaacacatgaggatggcccttcaggtcaacatctctgccgcttttcgtgtggtttcatcgttgcagtgtatgaaaccggaagtattgtttttcaaggtacacaatctccagctctcagtgagaaaattaattcattcatgagccagttgtaa

SEQ ID NO: 293409 - DNA, 729 bp, Morganella morganii
atgaaagatctatgtaatgatgttcaaaaaaatcattttgaaaagttacttaatttgattaaaaacaataccctagatggaggcgaggcgtggtcagtattttcatcaccggcgtcgtcaaaaaaattcatcagggataaaaaacattataaaaccataagattcactacagaagaagtcaatacttataaagctctacgcataaaagtaaaagaaaagcttttcaaacagtgtttaggatgttgtgcatattgccgtcgtccagtagggcattatggatgggcatggcacattgagcatgttattccaaaatcaaaatatccagaattaacatttaatatgtctaatctaactgttggttgtgtacattgtaatcagtggaaaggagtccgggttgataagcaattacaagggaagaaactccccatcattaacccactagatacaggctttgcttatcccaaacaccttacatatgttcaaatcagtacagagtcactgtgctttgctaagtactcaactcattcgatagagggacggagaacatatgaattattatcgttcaaagaacttgaacgagcttatgctataaatggtatgcatgcccctactgctgccttgcatgagcggttgactcgattaatctatcaaaatctcgatgatccagaggggctggaactggtagaactgctgggtaatttaaaactatcaatctataagataccatga

SEQ ID NO: 293410 - DNA, 1254 bp, Morganella morganii
atgataaatgataacaagttatccataaaaacagtcatcgacaaactaataaaagaaagtcttaccacttcaatcgacaacagaaaaaatggaaagtacacctacattatagggaataatggaacgggaaagagcaggatgttgggtgagctggctaaaacattgagactttctgattctgagaggattaccgcgtgtatatccaacacagtccatgaccgatttactaatagtgaacatgcaaaagtgatatacatgggagctaggaactctactaatgcagtgtttctatcagcgatagacaaacaactggcaaaatacatattgcaagcaatggaaatagacaggcggtcatttaaaaaattaactactgttttaaatatgaatatttcttttgtttttggagaaaaaataatcgaaacaattttaacgcatctagacacagcaaatagagatactgagcgcgtaataaaaagggctagcgatttgggtttactttccacacaaaaaataaacactctaaagcgaattattgatggaaatggtcgatttgagaaactgactaaagctcagatttcaacactgcggagctaccttgatttaaacatcgatttctctattagaattgagcttgatgggggggaatcaattaattttcattctctaagctcaggggaacagaacagatttctcacatttgcaaaaattcttagtgtaatgaaaaatggaatcatttatttaatagatgaaccagaagtaagccttcatcttcattggcaaatggacttccatagtaatatggataaactactttctgatataaaaaattttcatgtcattgtagccactcattcaccaacaattatcagtgaagcagttaaatatgataataaccgccttgaaaatacagtcgcagtattacaaagagaatgtgaaatcaatgatataaaaaaatccaacgataaatcagttagttgtaaggttcacacttttgcagaggtagcaagccatgatcaattagttcttaggcacttccaaacctccccttataagacgagagaagtaagtgttgaaattgcggatgtagtcttaagtatggccgaaggtgaaaaagcaaaaaatgatgctgtaaatatccttaacgaactaagaactgctgttgggttatccaacgaagctaaaaaacagatcaatgcagctttagctttagtagaaaatgatttgataaattcattaaaaataaatggtgaataa

SEQ ID NO: 293411 - DNA, 447 bp, Morganella morganii
atgaataaaaaccagatacttaagaaagagatagaagcatgggcggtggacaaggggcaagagcatgtagcaattgaaattagtcgtgcttatttttttattacacacgacgaacgcagccgcttacacccgattgaggacagggccggtaacgcggactggaaagcgattaacaataacaggcagcaaattttccgctggcttcgtggggactctccggcggcagcgagaaaattcagtgagctgatcccggcaattaaaactgcattacctgcagatcggctggcgcgggttaacggggatgaatcggttaattatctggcttccctggcaatcaaagaatttgccgcggcaatcagcgaaacacttttaggcagtcgtgacatgtcacagtgcatatcaaaagcagtaaccgcattaaatgcgatgcgtatgaccagcgcataa

SEQ ID NO: 293412 - DNA, 498 bp, Morganella morganii
atgagtacaaccgcaatcgcattagcagcagactacgacaaactgcaacaattggtagaaaccggagaattcaccccggaagagatagccgataccctggaaggtatcgagggtgccctcggcgataaactggacgctattatgttccatgtccgtaatctggaaggacaggcaaacactttgggtgaagaagcaaaacgcttggcagatcgcaaaaaatcattcgagctgcaggctaaaaacctgaaaaaatgtgcgttgatctgcctgctgactgccaagctgaacaacctaaaaacaacgagaaacacattcaccgcggcaaaaggccgggcatcaattgtcatcgatgatgaaacaaagatccctgattcactcgttgatgtgcaaaccatcgtatcaccggataaaaaagccatcaaagaagcgctggaaaatggtattgaggttccgggcgctcatattgaaattggtgaacgttcactgatggttcgttga

SEQ ID NO: 293413 - DNA, 186 bp, Morganella morganii
atgtacggattattcatactgatttgctctgctctgagctgtcaataccagccctacggctacgtttatccggatgaacaaaactgcctgatggataaagaaacactgaccgtgaagggcattttgtcagagtgctatctgattgatgaaattatttcggccgatttttctcaggccggtaagtga

SEQ ID NO: 293414 - DNA, 402 bp, Morganella morganii
atgcagggacataaacacgctgacctgatggctaaggcggcaaagatagcaaaaacagatatggaatggtggcgacactttgaagttctggcaaaagggacaaccgacaattggtatcagcttaactcagaatccgtattccatcatgatgggatatacagatttgttccgcagccaggaaccataaaaatcggcgattacgatgtaccagagccggtacgagaagtgccggatgacaaagtttcactttgggttgccgatacggcgcatggagccacgttgcttacatggaaaggttgtgagacagacatgcgtatgtttaactgcggaattctccatctaaccaaaaaagcagcagaaggccacatagccgccctgctctctttcacaaaagttgattaa

SEQ ID NO: 293415 - DNA, 531 bp, Morganella morganii
atgatacagcagacaccaacagataaattgatgtatgtgtacaacaacattattcagcttattgtgcagtttgaacgatatggcgcgtgtcatgatacatctgcaatgctatacgttttagccaaagaaattgggtttaacgcggagatatttattggtgaggtttactcagcagatcatggcaagtattttgaccactcatgggtttctatagatggattcatctacgaccctgctattggctacccattgcctgaaagtgaaggcgggaagtatgtgtgcgggcctgtttatgcgtctatagatataaccgcaaaatcggcgccatctgttgtctatgcatcaaattcgccagtaggtttaggtgagccggctatcacggtgtcaacacaaactctagcagaatatgacgattcaacaaaatcacaaatatggtccctgtcttctcactttgcttattacatagggatttctgtatcagaaaacgagcttgagagaaaatatggtggtatatatagaaccgtagtctag

SEQ ID NO: 293416 - DNA, 750 bp, Morganella morganii
atgaaaaaatatgaaattaatgagggttttcatgtccgggtcatggctgcaagacacgagttatcattgacacaagcccaactggctaaattaactggggtctcgcagcgacaaatcgcagcttatgaagggcacgaatccaagccgagagccaatgttttaatgaaattagccgaagctcttggtacaaatgcagaatggctggcaactggagagggcttgtcaggcataaaaaacatgtctgaatttactggcagagtgacaaaaatccccattatccctattgatagggtgctagagtggattataaacttgtcaccaatctacattacagatgaatttcaccctactaaatatgaagttagcccaatggcatttgccgtaagaataaatgaccccgcaatggaagctagtgccaatgattccatatcattttctaacaacccaattgtgattttcgacccagaactagatgccgatgatcaagactacgttctcgcgctcactaatggtgagtatgtgtttcgccggctgtttaaagggttaaccacatcatctctcgtccccaacgacaggcgatatccaagtgaaaccataagtaattatgacattgatgataaaaaagtaatgatattgccagctatttccgttgagctttcactacctgcgtttagccgattgtcaaaggtgcttaatgttgattcgttcgataaatcagataccaaatacaataactcagacaaaaaataa

SEQ ID NO: 293417 - DNA, 171 bp, Morganella morganii
atgaatagtgaaagtaaagtagtaaacccaacacaagttagaatcccgcatgaacttaaaagcggaatagagagaacagcaaagaaatatatgcgttctaaacaggcggatattatctttcgcttaaagttattggatgacatggagaagaaaggtgagatcgttatctaa

SEQ ID NO: 293418 - DNA, 756 bp, Morganella morganii
atgtctaatttagcagctacgaaccagaatgtcactatgtcaagccgtgagatcgcaaaactcaccggaaagcaagttaagcacattcacgctgatatctggaacatgttagaccagttgtacgatattaaaaaagatggtcgtgatttcgaccattataaaaatcagcaggttacgttatctaatggtgcccttgctactattgatgctcgtggctatatctctgaatttaacctcgaccgctaccactctgaggttctcgttactggttacgacttaaaacgccgggcggcagtaattaaacgctggtatgacctcgaaactgggcaggcaaagcctgtagtcgacccgatgaccgccctgaatgatccgtcattcctgcgtagcactttgctgacctacaccgaaaaagtcattgagcttgaatcacaggttgaagaaatgaagcccgacatagaagccttgacccgtattgcaaaatctcaaggttcaatgtgtgtgacggatgcagcaaaacagttgcaggttaagccgaagtctctttttgacatcatgagccagtgcaaatggatttaccgccgccttggtaccccgtggattggttatcaggacaaaatccagcaggggcttattgagcacaaagtaacggtgatcactaaaccggatggtgaggataaatctatcccgcaggttcgcgtcactccgaaagggctttctaaacttgcaaaactgttaactcagggggcggcggcatga

SEQ ID NO: 293419 - DNA, 198 bp, Morganella morganii
atgctgcacagtaatatcttgctgcttcggaatgtactcaccttccagcgcatccagatacgatatcgccagcgggatttgctccggcagcaattcgttgatgtgctgcacaccgaactccgcgtgaacgtgtttccagatgtccgggtagatattgccgacaccgtgagcaatcagccgttcagctgtctgacgtaa

SEQ ID NO: 293420 - DNA, 2844 bp, Morganella morganii
atgcaacccgttactgtctctgctgagctgtctgtttttgatgacagtcttcaggatctgcaaaaagaggactggaaaggtgggctgatttatcagaaggacagccacacaccgtggtgtacttttagctggaccggggatgccgataaagtccgctttaaattcgggttaacagatgaaagcagtaaaggtgagtttaccgtttcaattaaagcgttatcaaaaaatattcccgttattgaaacgttttcagagcatcagcagtttttgacatttaatcagtcagaggctgcactgaaatatattcgccttaattctgttcaggttcgtgatcttatctatcgtgcccggatcgccgtcagacatatttttgactgggatgcacaaattacgaaagagccggggtatgacgataaagaagaggaaaaactcgatttatacggtgctaacagccgctatttatgggaactgtatttttatttaccgtatctggtggccagtcgtttttcacagaaccgtctttactatcaggcacgtcagtggctgcattatatcttttcaccgtatgacgggcaccgtctgacctcaaaagatggcaaggaattgtcaccaccgccttactggaattgccgtgtattaacacaacctgacctgaaatatcagaataatgataatgcattaccggatccttttgcgatatccgaagatgcgccttctcattatcgtaaatcggtttatttaatgtatgccgatacgctgatttccgaggcggatttatattaccgccagctcagccgtgacagtattacccgggcctgggggctttatcaccaggctcagggaatgctgggccatatacccaaagagcgcagtttaccgaaatggcagccatgtacggtcagtgaattgcgggataataaaacagacgttgtacaggaaaatatcgttcctgaattattgtcagagatatatccggaaaatatacccaaacagctcagcggctttttctggtacggcagcccgggcaatgcgcgattccgtctgccggtacagagcagcttactgggcagacaatccgttctggaccagcgtttatttaatctgcgtcattatctggatattgaaggcaacatgatgcagttgcctttatatgctgctgcgcttgatccgtttgacctgctgcgctcacggctgggcggaacctctgaactgacctatttacagtccggatcattaagtattccgccatattgtttccgggtcatgctggaaagggcaaaagaacaggcggcggcactgattacattaggggataaacgtctcagctattacgagcaaaaagaacgctatcacaccgaaggcatgcaattaaaggatgcgacggagcttgcgcaagccagtgccgctattcagtcactgttgcgggaccagcaaaaagccactctggactctctgaaagccgccaaaaccatggcggaaaataaacaaacctattacgaccaattggttaaagatggtacgagtgcaaaagaatgcaaggcccggaatctgttgctgggttcgtccctgtttcagggcgttatttcgggtgctgcggttgccgcaggtattgcggcagcaacaccgcgtatatttggtatggcgcaggataccggtgatcatggcaaaacagcatttctctccggtgtgggtgcggtagcagccttcagtgcggatattatgcgcggtacttcggactatattcaactggatgaacaataccggcgtcgtcaggatgaatgggcattttctgctgaacaggcaaaaaatgaaattgtgatgctggatgcacaaataaaagcccaggaagtggctcttgccgcagccgaaaaaagcgtcacatacacagcgtcgattcagagccaggcaaaagcactgtatgactatttcagccagacccgtcaggttaatgaaagtctgtatgaaaaaatggccaatattattggcttattgcatgaccagttatgttcactggtcagaacattttgtgcattaacagaggcatcctggcgttatgaaacagatgattataaacgacagacctttattcctgctgacttgtggagtggtgataatttaggtgtcctggtcggtgttaaattacagaaagccctgctggaaatggaaatggcgtatacacagcaaaatatacgccgcctgaacattacaaaaacgatttcactgaaatcgctggtcagtaaccatctggtgaaaacggatgaaactccgctgacaacatgggatgaggttaaagcggcgttaaaagaggctaaaaagctgtcgtttgatttcacccatcagttttttgataccgattttccggggcattacgcacgaaaaattcactctctgtcagtaacatttccgacgttattaccgccgtatcagaatatgcgggttctgctggagcaaacatcaaatactctattggttgcgccggatattgatgcggtgaaatcgctctatacagcgaccgaaaaaacagacagcgattcccttatccgcaatctgcggataaaccagaaaattatactgtcccgcggcaatgatgacagcggcgagtttccggatgacggctttaccggcgggcaataccacagcttcgaacataccggtgctgtttcacactggcggttatccgttccgcggccgcaaaactgccctgaactccttgataatcttaatgacattattatcaagcttaactatacagccaaaagcggtgatgaaacatttgaaactgctgtcaatcaattactgcaagacaatgaaccagtaaaaacaggacacaatgaaaatgactga

SEQ ID NO: 293421 - DNA, 2823 bp, Morganella morganii
atgactgaaaaatataatcagactgaagttaaaggccgtaattttatatcagatccttatttcgaagaatgggggaatggcgactgggaaaaaggggagccgaataaatatacaaagaaaaaagacggagacagaacctatctctatatcagcggtaaaggcagtatttcacaatcggttatgttaccgaaaaaaagttccggaaatccggatgaaccgcctttttactcattgacttttgattactcggttaaaaataaggccaaagtctcattaattctgacatatctgagcgggggaagtgaacgggataaaaaagaaattacgctggaggataataaagagtggtctcagtatgaattattgcttgatgcctccgccgaagatactgaaatcagggttgagttttatgccgggaaaacagcagggaataaggggattaacctgaccgccgttgatatgcagttacatatcggcgggtttaatccggaatcgatagtgtttgataatcaaaatatttcagcggataaacccttgctgcgccttaattacggacgaaaacatactcttaatatcaaaccagcccctgacagtgcatggagggatcttggttgtgcgctgaagtggggtagtgatattccggcatctaactatccggtcagttttacgcctgagctgaatacagcacaacctttgaataaagagggcagtctctgggaaatgtcctgttccgcccaaaaggtcagtggtattccggagacattcagcgtgacgctggcatcagaatacagctcagaaccgtttattttcagtgcggaaattggtgattacctctataaattcacggaaccgaaaatcagcggaattgcggttattgctcagaagatcccggctgacctcagtatccgggttgtctgtgactatgatgaagcgtatccggatatgccgggcgtatctgatgttgatgttttctggaaaatggatggcggggagattatcagcacagttaaaacagatactgatggtatggcagccctgacctttttaccggagaaaggcgggaattataaacttgccgcattaataaccgataaaacagggcgtgaaagccgccatcagtttgaccttattgtttatgaccgttcaccatggctggatgacacccgggttgctgttaacaataccgatgttgacctgtcgggagaagccggatatctgatgagcggtgaggctacggttcttcacctgacgtgtgataaaaaccgcactgttttcggcctggttaagcttgagaataaagcgggaaataccggtgtcactatcacaccggcggaaggccgtgatgttccgccggaaggcctgtcatgggatctcaatattaccggcgacgacagcagagaactggcattcttattaaccagtgatcagttcggtatatcacaggaaatccgggttattgcattacagcatgacaccggaaaagaaattcagtcactgaaaattaacggtaacgtaccggcagatctgactcaattatgtgccggaccgtcagaaagcatgacgctgaattgcaccgtcaataaattattatcacgcttacaggcggaactgaacagtaaagacagtaaaacactgacagcagagccggctttcgggcaattacaaaccctgaaaaatagtgcagcggaatgggaattacacagtatcaacccgcagggcggcttctttgatcttgcactgaatattccgccgctgactcaaccgctggcactttccggccgtgtattaccgcaggacatcgcgtcagggattgaaacgattaccctggataatgcaccactaaccgcgcccggcgatttctttctcactctcggcaaaaaatatacgctgacagtcaaaccgcatccgttactgaaggatattccggtttcattagtcgctgatgcaggtaacggtgttgcggtgatcagtaatccgccgtttggtcaggaagtcaatctggcagaaaacgggtcttcatggcagatctctgcctctgcacgcggaaaattctcactgcaaattcagagtcagtggggcggcgcaccgcttaatctgagtggtacggtattgtctgcggatttacaggacgaaggcgctgtccgggtgactgatggtgacatgggcagaaaatacgatattgattttaatgttggttttgcttttctggcttttgagtcctatacactggatctgaaacttctgccggataatgtaatcagcggacaagccgtttcctgggagctgccggaaggcgaccatcaccgggatgctgtttcgtttgatccggaaacaccggtagcattagatttatccggcactgcgtgggaattcagctataccgaagaagaaagtactcaattcggtttagtattaagcagtcagggaaagttcagttataaaattccgtgccatattttcagtgacgagaaatatctggaaaaaagtcaatgtgtttttatgttggatggttcagatattattccgggcacaaaatataacaattttgaatataagaaaacggtatcgttgaaactgaaactatcacaggaggcatcagcgtttctgaatggaatggtattggcattagttgtccataaaatggatgatgagggtgatagtctgattataacctcagatgaaaaatttactgttgatgaaaataaacctgttcttgaatggaccgttaaaacgaatgtggcagttggtcaccgttttacactggagatcgttttggagaatttaaagaatatccgttctgttatgaaatttatctctgtgtaa

SEQ ID NO: 293422 - DNA, 945 bp, Morganella morganii
atgacccgtttatataccgcaaccaggcatcctgagcaactggagacaacattattaaccggggaaagtcacacctatgatgaccccttagccccccgtaaactggtgtttttaaatgcagtgaatgagcagcgttgtgtaattaactcaccgcagcgtaacagtcagttaaccaacacaattcctttttttatcgctatcctgattatggcgtgttatacgttattttgctttatagatagacatgcatccaaaatgtacacatttcaagataatataaattacgatagaagtatttataacttatatatagaacgtaatcagaaaataccagaatatttaaatggatacgaaatttattttaataaggaagaaatagatatctttgattatatcaaagcttattattctggaaaacttagtcgcaatagtgatattgatctattattgatattcggctggcttatcctcttcccgggggcgttatggttatttgggtatctggctttctttgttcctccggcacaccttattgccgacagacaacggggtattctgtacagctacggtatgggaaaaatatatgtaacccgttatgaagaggcacaaatcgggtcagccggtaaaatgcccgctatcaaactttatggtcttgaccagaaatccggtgaactgaaaacaattctcttccggccgaatgtctcgcattattcggcttttctgaccagtacggacagcgaaaaccaccgttttattacattcctcaatgcctatatgcagcaggggcgggatgctgtttcagcctcggattatcaggcgcgtaaaccattcctgtcatttggtaaaaatccgcttcccgacaattttgaacaacaggttacacaaattctggcaaagttggataacaggaagcaacgttatgcgcagtcaggtgaatgcctgtaa

SEQ ID NO: 293423 - DNA, 1536 bp, Morganella morganii
atgtcttcagcatcgccccattattcatggcagcagattctcagctataacaattctgataaattattgggtaaaggagagagtattttttcttttaataactcagacgaccaatatacgttaaatgaggaaataaaacacgcaaaaatttttcgtcatgtttacaataagaaattacaatattattatggcgataatacaattaaaaaattaagttatgtttcaataaattataagttcaccacggaaaataatttaatccacatgggaagcagtcaatacagagaaaaatatcaatacaagaaagagggagggcgattagaagaagcctggtatatggttaataaaaaaccacaatgccattgcttgttgaaatatgataaaaaccatcggttaagtgatgtttttattaagatttgcataagtggtcgtaacgaaaatgaagtatctttattctcatttgttcgtcaccattatgaatatgatgagtgcggacgtgtacagaggattactttttcatcgaatgatgcaacaggaaataaattaacacctcattgggatgcattggtaaaaagtaattttttatatgacagtcggggtaatataacaaaaaatagtgttcatctgtttatgccggtggtttttaatcagcataaaggtataaacagtgaacgcagttatagagagttacgctcttttaatggttttaatgaactgacagattgtaagtatgatggcgatttacggctgactaacaatatgaacaggatactatccggtcagagccataaatataacgaagacggattaatcattctcagtacccggcgtttcagttcgggggtcagcgatattgtcagctatgattatgatgataaatcagccacactgaatacactgacgcattgcccttttaaagccgggtggccggaaacagaaaagtatgcgtggaataaggatggtatgctgatttcccgcacccgttctgatggttataaagaagaatatgagtatggcggggaacaaaatgttgccagaatgacaataacagatccggataacaggaaaaccataaaaacatttctgtatgattgtcacggtcatttggttattcagattattcagtctccgccgctatatgccgatggaccggctgttttccggcagattcatgatacctacaataatgaccatcttatgatccggaagatttttgatcgggaggttgttgatacgtccgttattcctgaagaaacacattattatcattggcttcagaatcagattattgcggtatcggtgcaggataaaaccggcaatgtaaaaacgcattttaattttaaccgcccggatggcacgacaatatgccggtgctcaccaacaaatcagcgccggtatgtaaaaccgggtgtctttgattatcgtcttaaaatggcgtggattgcacaggatcagcaggggctgttttatcagccggaagtcattgagttacagcaggtatgttttgaaatgaatctgactccgccgaaagtataa

SEQ ID NO: 293424 - DNA, 345 bp, Morganella morganii
gtgaccggggatgccgcataccggcagcgcattatttctgatgcggaaattatctgtcccggctttaaaccaaccggtgacaaaggtctgaagcgtcaggtgctggctcacgctatgcgtaccggcgacagcctgtcagcgtttggtgtccgtgatttctgtaccgcaccgaagtcaacggtggatgcggtatttaacgcagcagtggcgctgaacaccgcccggaatcatatcgctccgcagaatcgcggcatatcaaccacagacagctcacgcagcaccaaaggcatgtcaccggcagaactgaacaagatgtacgccgatcactggaataaacataaataa

SEQ ID NO: 293425 - DNA, 771 bp, Morganella morganii
atgtcgatcccgcgtatcgggcaggaagtgattatttcttaccttaacggggatatcgattgcccgatcatcaccggctgcacgtataacgggcgcaacagcccgccgctgaggctgccggtcgagaaaacccgtaccacgttccgtaccaaaacccataagggggaggggtttaacgagctgcggtttgaggataaagacgggagtgaagagatttacctccatgcccagcgggataataacatccatattaaccacaacaaaacccagcatatcggacatgatgaagtgcataccgtggtgaatgatcgtaagcacaaggtatgtcatgacgaatttattcatgtcacgaatgagcagacgctgaacatcggtgtgaatcagtttgagcagataggtaaagaccgtatcacccggattgataacagctggaaagaagtgatccgggccgggcattttcaggaagtgggtgaaaacaaacagagtgttgtgcagggcgattatacattaaccgccggagacggtattcacacgcacacccgggtgcatacgctgcaggctggcgacactgttcttatcagaggaaaagccggctccattcagctggacgggcagggcgtgacgatcaccggaaatattaccctgaaaggcccggtatcaatcgccgcaggcgtgccgggaacggttgttttaccggacgcggcggtgaatgaaggactgccgctggcggaagactgccgggcaaaagccatgaagaaaggggcgtcatga

SEQ ID NO: 293426 - DNA, 2397 bp, Morganella morganii
atgattatatcgaaagcaaataaagggattgattatgtattgacacttaataaccagcagttagttgagcctgatattacgagtgaagatagtgaaggtttagttctgatggactttaacggtgctaatgcactctatttttgggagttgttctattatgcaccaatgatgattgcggatattttactccagcatcaaagttataatgaagctgaacgctggttacagtatatctttaatcccgccggctatatcgagaatgatatatatacagatcggtactggaatgtcagaccgctggcggaggatgagcaatggaatgagtcgctgccggatgataccgaccctgatgcaatagccctggcagaccctatgcattataaaatggccacatttatgaagacgctggagctgattattgccagaggggataaggcgtatcgtgaactggagcgggattcgctgaatgaagcgaaaacctggtatatacaggccttatcgctgctcggaaaagaaccggttacattgctgaataaagactggtcttcacctaagttggctgatgcggcaaataaaacagtccggtcagcaatacaacatttattaatgcggataaatacccacggcgagtcatctgctatctccgtaaacaatgaaaatacgctgactaacgtgtttaaaccacagttgaatgataagctaatctccctcagagatacgataaatcagcgactttttaatttacgtaacggactgtctattaatggtcagcgcctttatttaccaatattttcatcaccggaagacccgcggaatatgctggagtcacaggtcaacaatataaatagtgaaaaaacaattataaataaaaaaacgttgatgtatcgtttcccggcagttatcgaaaatgcaaaaagcctggtgtctcagttgattgagtttggtgataagctactgagttttaatgaaaacagggataatgaacaattttcggagttacttattcatcagggcgatgacttattgtcacaaagtatcagaatccaggatatggaaattaaacgtctgttggcagaaaaagaatcgttattagcccggcagcatgaaattatgaaccggcatactcattatagtcagttatattctgacggtatatcagatgctgaaacagcagcaatgcttctggatgcgtcttcagcatcaatattggcatcagcttcggcgattgatggtgcaggtaagtatttggatctcccgccaaatatattcggtgtagcgactggtggtatgcaatggagtgcgcctgctgaggctgcggccaaaattttggagggaactggattatctgtacagatatttgcagatattattgaaaaaagtgagggatatcgcaggcgatcacaggagtggcaactggaagcagaatcagccggagaagaagaaaaacaaattgccgctgagctggaagcaatggatatccaaataaccgcagcgaagatgcagaaacactatattacgacagagcagcggcaaaaccagcagcaattacagtttttgcagcacaaatttacccgtgctgaactgtacggttggttacgcgggcggctgatggccatttattctcctttttacgatctggcggtttcccgttgctttatggcagaggacgcttatcgctatgaaatgaatgttaatgcggaagaccgttcatttatcaacatctcagcgtggaaaggggcatattccggcctgatggccggtgaaagcctgatgctgaatctggcgcagttggaagaagcctatctggaaaaagataaacgggttctggaagttacccgcaccgtttcattagctaaattatacagttcaatgacggataacagtttcggttttgacaaagtcgcggagcttgtcaatacgggaaaagcaaatgaccgatacggcaatgaagataactatgtcgcactgatcagcacgacagaacagaccaaccgtctggaactggatgcagtgattaagctggatgaactgggtatttataccgattaccctaagaatttaggcgttcaccggctgattatgcaaatcagtgtgacattacctgcgcttattgaaccctatcagaatgtccgtgcgctgcttgaatatgttactgacgctaaagacgaaaggctgccggaagggtgcaagtcgattgcggtttcccatggtatgaatgacagcggtctttttcatctgcaattcggggacagtacttatctgccgtttgaggggctgtcagttaagggtaaaggtcatttcaaactgcggttttttgatgtcggcggcggggaccagaaacggttattacaaaccctgacggatatcgtacttcatattcgttacaccatttactga

SEQ ID NO: 293427 - DNA, 252 bp, Morganella morganii
atgcttgaagtaagagataaatttcagaaagaaacatttcctttacaatgtcggattgatgagatagatgagagtatatttgaactacaagatgaatatctttctcttcaaggtatgctgagtgctgatgatgagtatgataatcatacagatgaaaatggattttttcgtgagttagaattaattcaattcagaattgatgaattgaatgcggagagaagtaaactccagcgtttaataaacagtatgtaa

SEQ ID NO: 293428 - DNA, 528 bp, Morganella morganii
atgataataccaactaaccggtcgccagatattgattatgagaaattgaagggaggtcaaataggatatggctgtcatagatcagtttttgaggttatcgactgtacagattttgtacttaaggaatgtaaagtatccggcagcaaaatgaatgaaaatgaagcatttgtttattacactgccgtaattaataattacactaaatcacttaaaacgatagcaagcgtttatagtataagtaaaagtggtaagtatttaattatggaaaagcttaaaactgattgcatagcagatggcacaggaatttatgttatgaagggagtttccgataaattaaaaaaaaattacgggattgatggtaatggagcaataaaatgtctagattatgcggtcttcgataattcccctataactcaaagtgatattacggatgaggttcaatattttaaattaccgccatcagaagttgcaaaatcgattgctaaagatctgcagagtattagtagaatttacgctgagccagaataa

SEQ ID NO: 293429 - DNA, 1200 bp, Morganella morganii
atggaaagtgagtatagttttttaaaaaataatttcgatgatattgtgttcgtgttaaagggaatgggaaaggataaatttgtaacgaatattcgttctattctctcaaatgagtacaatgaaaaatataaagataataatagcattgagtacctttataagtgcattgaagatgtagtttatctaatagaagaaaataaaatatctatatctaatgtatgtaatgtatctgaggcatatggagaactatcatatggtgatgatacgattgagcgtattgattatttgctgtggacatatgtcgttttagttaggtatatatatgagtatgtgtataatgtaggcgaatcattttcgatagaaagaatgacatatgctatttctgattttgaaagttttgatctaatttttaaaagtataacaaaaaatggattttattttttttatttacatgtgaaaaatgtatatatctatagagtaatacggaatgactcagataaaataaatgaaaaaataaaagctgtaaataaattaaatgaaaaaattgacatggctcttgccaataatgaaagtataacaataaggctgaagaagtttgagttttttgaggatgaaaaatatagcaattttgaaaaaaaattaacagaaatgtcagatgttttagaaaatagaattgatgaaaaagctaaagaaatacatgaaatgagtgaggctatcaatggaatgaatgatagcgtgacatttatggggcttgataatgcatataaaaaaatacatgacgaaaaaataactgaaaaaaaatatgcgctaggagtcttatggttatctgtatttcttgtttttttacctttaactattaaagtattaatatctacattcaatagtggatatgtaagtagtatatatgactatggattaacagtgacaggaactataattttcatatattactttagggtggctttgcttaattataattcaattaaaacagagttaatgcaaattaaattaagaagggggctatgtatgtttattaatatgtatgtcgacttttctaaaaggaatgacaaccatgaatctctttctaagtttgagagcttgattttttcaaatattattccagatgataagaaaattccctcaacattggatgggattgaacagatagccaagttaataaatgcactaaaaagtaagtag

SEQ ID NO: 293430 - DNA, 555 bp, Morganella morganii
atgtttaaatattaccatatagatagatctaacacattgacaacaggtgacattattcgacctgaagattttatttttgggaaggggtatcgagataaatttaggaaagcaaatcttgatcctaagaataatggagacgtaggaaaagccattattcttcctgaggaaacacggagagagttttatttagaatatgttcgaatacataatccatatttacatgatatgacacttccatctagattagattccttttttgcagttaaaacagtagaagtagcgactgaattagcaaaaaatagaatgaaagcagggggtgactactcgctatatgaagtttacacagaagatgaaccgttagcttttgatatgaattggcttgaccaagagttccccgcaaacattaacagcagagtacgttattaccatgagtattggattggctctaaaatgaaagacaacaaagaccttaatactcatgaaaaaagagaaacattaatggaacttttaattactaagccagtaaaaataggcgatttaattcgaaggcgatag

SEQ ID NO: 293431 - DNA, 225 bp, Morganella morganii
atgcgttcaggtctgggtgcttcccagaaccgctttaactctgttatcagcaacctggataacaccgttatcaacctgtctgaatcccgtgcccgtatcctggatgcagacttcgcggtagaagtatctaacatgagccgtgcgaacatcctgcagtcagcgggtaccactgttctggcacaggcaaaccaggttccgcagaacgttctgactctgctgcgttaa

SEQ ID NO: 293432 - DNA, 1134 bp, Morganella morganii
atgccacagattattaataccaacgccatgagcctggtggctcagaataacctgaacaaatcacaggctgctctgggtactgctatcgaacgtctttcttccggtctgcgtatcaacagcgcaaaagatgatgctgcgggtcaggcgatcagtaaccgtttcaccgctaacattaatggtctgactcaggcatcccgtaacgcaaacgacggtatctccctggcgcagacgactgaaggcgcactgaatgaaatcaacgataacctgcagaacatccgtcgtttaagcgttcaggcagccaacggtactaactccgaatctgaccgtcagtctatccaggacgaaatcgaccagcgtctggctgaaatcaaccgtgtttctcagcagactgaattcaacggcatcaaagtgctgagcaaagatcagacgctgagcatccaggttggtgcgaacgatggccagactattgatatcaacttaggtgaaatcaacaccgccaaactgggcctggaaggcttcagcattatggatatggtcgctgcaactgaagttgttcagggtatgcaggtgactggtgcggtgaaaggtggtggcgcggatgacgttgccaaatataatttatcttcaaaagatgttactgatctcgagaccgcactgtttgccgccggtaatgaaggtaaaatgtttgcttatgctgatgcgaatggcaacacatcgttcctcggtatgggtaaagacggcaccatcaagatggtcgacgctaaagttgttccggctgcagctgacggttctgctccggcatcaatcgaattcggcaccgccgccgctcttgatgatgcaggaaaagcagctgcaaaaagcctgcaaaccctgcagaccatggatgatgcattagcacaggttgatgctatgcgttcaggtctgggtgcttcccagaaccgctttaactctgttatcagcaacctggataacaccgttatcaacctgtctgaatcccgtgcccgtatcctggatgcagacttcgcggtagaagtatctaacatgagccgtgcaaacatcctgcagtcagcaggtacaactgttctggcacaggcaaaccaggttccgcagaacgttctgactctgctgcgttaa

SEQ ID NO: 293433 - DNA, 1182 bp, Morganella morganii
atgaaaataaaaaaaattgatataaaagatatcggcggtataaagagagtcactatagagtttgatggttttatgaatattatctgtggtccaaatggtatagggaaaaccacaatcttagattctgtggcacatggttttattttgcagcacagccaagttctgaaaagacatgcccaatcttctgatggccatataaaagctaaattaaaagatggagatataattaaagaaagtgaaatttcttttaaaaacttctatcctgaggataatacatatattaacgggttcggtgatgcaggaaggaaagtaatttattttaatatttctaggatgttcaagtatgaacctttacgtcatatttctaacgatgggggaagagaaagccataatatatattcacttttgatgaacggaatttcagttgcggatatgaaaaattggtttgcaaatcgatgtctctttattaatactccagatgctttgagtgaaaataataaaataaatttagagttggcaaaaaaatgtttttcattgcttaatgctgaatatggtttttctcgggtggatgcgaaaaaattcgatgtttttgtatctacaccaaatggagaaatttggtatgaatacctatctgcaggatttaaatcatgtctgagtattttatttggtattattaaagagattgaaatgaggatgccagatgatgattgtttggcgcaaaaatttgatggtattgtattaatcgatgaactagaaatgcatcttcatcctgaatggcaatccaaaattgtgtctattttgcggaatacatttcctgcgacacagtttatagttactactcacagtcctcacattatacaaaatgcagagcctaatcaaataattgcattaggaatagatagtaatggatatacttgcgtcagagagcttccaaataatgaatttggctatgcaggatggacattagatgaagttcttaaagatgtcatgggaatggaagatactagaagtcagaaattaaagaatatgctttctgaatttgataaagctcttgatgaagagaatagagttgaagcagaacgtatttataaagaattagatatggctcttcatccagaaaacgtgctcagaaaaatgcttagtatcgatctttcttctataagtgaagaggttgataactaa

SEQ ID NO: 293434 - DNA, 168 bp, Morganella morganii
atgggtattaaatctgatgactttactgacagtacaaaaacacaggtatcattcccggacaataataatattcagacccgtacagggataagagcgcttattaatggccgcagtacatcggaacagggcgaaaatacagaaattcagccatttattgaagcaaactag

SEQ ID NO: 293435 - DNA, 255 bp, Morganella morganii
atgtttcataattatctgtttctgttccatgagcagcacggattaaaaaaactgaaaatccgtttgcaggaagattttgtgacgtcatccgttattgatgcgccgcgcagggtcaccacggaatgtgaaacagcgctggctgcacaattttccgctgaacatgattatctcaattataccggtgagaatatccgtgaaatctggcgggtgaacggttcggattatcagcgggtatgggctgacgaaacgatgtaa

SEQ ID NO: 293436 - DNA, 603 bp, Morganella morganii
atggtagaaaatatgaagcctttagacattatttctggttttgttaaaggagatgtatctccttctgaatttgaattggccttatataaagataaagatttagaaggttttttatctaaaaatataccttttcctccttatgtggacaaaaatgaactgtactattttttgattgaaaaaaattacaaatcatttggagatctttgggatgtacaagaattgctaagtcagtttttaacttatcatggaataaatgtagaaaaaacatcaaaatataaagatttagttaaattgattatgaaggtgcagcctaaatggttggatattcccggtgattatgttgaatatcttattagtttatcagggcgtaatgaaggtaaagaacttgaggagttcttaagaaataagattaaagataattttaagtctttgaaaaaaacaccaaaatggctccagtccccaaattggccgattgaaaattaccagccattcacttttgtggggcaaattgatatatctgatttaaagcatgatacatcatatgtatatttattcttaaatgaaaagactggtagttacgttacaattgaacagtctatgtag

SEQ ID NO: 293437 - DNA, 357 bp, Morganella morganii
atgaaaaaagatgaattggttgtaacatcacttacaagtgagattttagatgatgtatttatgagttataaaaagaatctcactgatttatctaaggaaaatgataatggtgacccctactcaaaaatgcgaaattctttagctaaattatcaagtgaagaccagatttctgttttcaattttattcgattgactatggttgatacatcttcggttatctttgggacactcgatggctctcattttccacctaatatagatggtgattttaccgtttcgtataatggtgatgaaattcaggggtcattgcaggatgaattaatatccattgcagaagaaaaaggaatatataaataa

SEQ ID NO: 293438 - DNA, 531 bp, Morganella morganii
gtgaatatttatactattagtagtttttcattcggaaatgcacttgttgatgttttagacaaaaaatcaaggctatctggattttttatttggaatgatggggatggtaagtttttatcatatttagaaccaacgtgtaagttgcaaagaaacttaagcaaagatgatttaaaaaatattgattactttcctgctaacattgggattcctattttctcacacaaggcaaaatctttatttgagtgtaaagggataactgaattatcattatataaatgtcttttagatggagagggtgaaagcatctacctctgtaaggttaataattatttaccaataattgataatgaaaaaactatttttagaaaacttactgatggtaccaagttgattgatatacctgcttataaatgtgatgcggaattttatattgccagagatgctgttttctgtgaaagaatggtagtttctcaaaaatttgttgatttatgtaacgagggggggctaaatattcattttatgaaatgttaa

SEQ ID NO: 293439 - DNA, 690 bp, Morganella morganii
atgtcatggctcgacaagttgcgtaatgcaatcagaaccaaagatgaagccgctgtacagcagctcattgatgaagcacctgagatgccgtctgacgggctgggttcagttcccgggcataccatcaatattaacgtaccggcacaggcgacagcactgcctgcggagaaccggacaaccaccggtgacgaaaaagagccggaaacaccgaccggcgacgatggtgtgccggagtgggctaaggtactcattgcccgtctggataagctggaaggtaagaccgcggattctgagccgggtgacggcactcagaccggtgatgaagatacggaagaagataaaaaggtgaccggggatgccgcataccggcagcgcattatttctgatgcggaaattatctgtcccggttttaaaccaaccggtgacaaaggtctgaagcgtcaggtgctggctcacgctatgcgtaccggcgacagcctgtcagcgtttggtgtccgtgatttccgtaccgcaccgaagtcaacggtggatgcggtatttaacgcagcagtggcgctgaacaccgcccggaatcatatcgctccgcagaatcgcggcatatcaaccacagacagctcacgcagcaccaaaggcatgtcaccggcagaactgaacaagatgtacgccgatcactggaataaacataaataa

SEQ ID NO: 293440 - DNA, 504 bp, Morganella morganii
atggcaggaacagcatatttaacccggatgccgatgggcatcaccgggggcattacccgtccccgcgaatccaccgttgaggcggtgacgctcgacaataaaaaaccgttcaccggttacggcctgccgggtaagtatctggcggataagtttgtgccgctggaggacggggacaccattgagcaggtaaaaggcatcctggtacgcccgtatccgatcacctctctcaatgatctggcacatctcggggttgaggctaatcaggtggctgacaacctgaagcgcggctatatctgcgtcacagttaccggcggtaatgcggtaaccgcgaaaaaaggtgccccggtctatgtccgcgtagctggtggtacagaaaaaagccctgtcggcacgttcgtgctgacggcggatacaaccgctgaaaacacacctcagttaccgggtgccgaagtgaccggcccgggtgaagctgacggtcgtattgaaatcgcttacaacatctga

SEQ ID NO: 293441 - DNA, 612 bp, Morganella morganii
atggatatggtcgctgcaactgaagttactcagggtatgcaggttaccagtgcaactccgggtgctgaaaaatacaatttaacatcaaaagatgttactgaccttcaaactgagctgtttggtgcagacggtacaggtaaaatgtttgcctatgctgataaagatggcaataccgcgttcttaggcctggataaagatggtaactggactgctgctactgctgaggttaaagccggtgatcctactgccaccccggcaacagaaacgtccatcacctttaaagcagtagctgatactgactttaaagctgacacggtagcccaggcagctgcaaaaagcctggaaaccctgcagaccatggataaggcattagcggacgttgatgctatgcgttcaggtctgggtgcttcccagaaccgctttaactctgttatcagcaacctggataacaccgttatcaacctgtctgaatcccgtgcccgtatcctggatgcagacttcgcggtagaagtatctaacatgagccgtgcgaacatcctgcagtcagcgggtaccactgttctggcacaggcaaaccaggttccgcagaacgttctgactctgctgcgttaa

SEQ ID NO: 293442 - DNA, 366 bp, Morganella morganii
atgtatgcgtctcagatgcccgtaaagtatcttcctccgaaaccggatatcattctccggcgtaaaggattcgagtatatcgcgtccgataatcatatctttaaccaggcctttgacctggcctttgaacaggcgctgatgacagcccttcagaacacatcgttgcgtgcgggagaatttaaattcagctttaaggttgatgcgggaacacatagcggtgacccgttaaaaaataattccgtgccgtctgttcactggtattacctgactgaccgtataaaaggggatattgcgccactgcgttaccgcaaaggtaatttacaggataaaatttatggttatattgatgataagggaatggaatga

SEQ ID NO: 293443 - DNA, 594 bp, Morganella morganii
ttgagccatgtatctatctggaaaaaagtaattgacgaaaatttgccatacgctggtgtatttgaagatgatatttatttatcaaaagaatcaggttcttttctatcaaattatgattgggttgacacaaattggcatgtagtgaagatagagcgagctgatgagaaagtaaaaacatccctgttaaatcttaagtcattaaataacaaagggattatttataaattaaaagacgaacatttatgcgctggcggctatgttataactaaagccggagccagatatctttttgataaaatcaaaaactatgacataaccgaacctattgattatgaaatttttgacaattatatcatggatagtggttatatagtttgccagttcatccctgccctttgtattcaggattttacattgaataaaagctatgaaaatttatccagctcattagtggaaggtcgggtaattaaagaaaaacccgtaaaagaaaaacataaaaataaattactaagagaattactaagaatttggaacactatgactgatgcgatagtaaaaaaacaaaaacaacgaaaacttccatttaatctctaa

SEQ ID NO: 293444 - DNA, 171 bp, Morganella morganii
atggcaagagaatggcgagatgtggttaatcaacatggtggggatgtgaccgttatccatttgccagaggtgggtattaaaggaaatacacattttcctttttcggatctgaataatactcaaattgcagatttagttagccaatttattgaacaaaaaaatctacaataa

SEQ ID NO: 293445 - DNA, 690 bp, Morganella morganii
atgaaacatttaattaaaaaatccaatggtcagccggtagtaacaacggatgttatcgcaaatgaattcggacgcgaccattttcgcgtaatgaatagtatcgaatccctgatagcgtcagggcatttaggagcctccgatttcagagcctcctcatatgtcactaagcagaaaaaggaattaccgtgttatgagctgactgagcgtggatttctgattgccatgccgtttattggcggtgagaaggcaaaagacggccaggttcgcctggttgacagctttattcagttccgcgagaaagcgagaagagaatcggaaatccggcagcagcgtgatgttgccagaatggaataccgcccgatgtctgatgcactgaaattaagccgtgagcaggaagggaaagaaaccgaatattttcattacagcaccgaggctgacatgataaacggtattgtcctgggtaaaaaatcagccaaattcaaaaaagagaatgacatcgggaaggacgaggccatccgtgattatttgacccagtggcagattaaagccattactgaattacagcgggcgaatacggtgtttatttccatgggttgggattaccaccagagaaaagattcactacagggcatttataataaaaactttcacaaaccactgatggaagagcaggcgaggttaaatgaatga

SEQ ID NO: 293446 - DNA, 210 bp, Morganella morganii
atgatcgaccgtaagaatctgaagtttatggtatctgaactaaaacgcgggcaggctattgctgattttccgtgtggagatgacctggcagatgctgggaaactaaatcagattattgaggaagaaatcatgcatgctccggaccaatacttgtgggcacacagaaggtttaagaccagacctccgggagaaaattctctgtacaaataa

SEQ ID NO: 293447 - DNA, 483 bp, Morganella morganii
atgctgataccttttttacgaattttcatcggtcggttaattttttcactaactttaacgggatctgctgtgaataagataaaaccagtgaaaatttatttaatttcagctgttatgtttttttttatgtttatcggattatatttttcggtaagtggctatgttaattacattcttaaatctgatatcatttcattttcattcacactgggattgattgtttttttctctcctttgctttcttggtttttatatttggcgattgctcttgcgtatacaaaaggaaaattaaaaacaaataagagattaaataaaaaaatcaccaattcactcacagcaatagccatatttgggtttgtttttagttttattttttcattttatgttgaatatgacttaacatcccgtggttatgtcaaatgtcataaaaaatccattcacgcacccacaaaatatattatttcaaaggatatgtgtgaatag

SEQ ID NO: 293448 - DNA, 345 bp, Morganella morganii
atgagtattaagaaagtattattaggtatgatgatttgtcttactatttcgtcgacagcacttgcagtaccatttaaatataattacaaagttgaaggctctgtggcgggtgttgtctcacaacaaagagccgaatttccttgttatgtagctattaagtcttcggatccccactataacggtaaatatcatgcaatgtataatgtgaatcaatgtcaaacagccagaatggcatacgcccttggtttaccggtaaaaatatgggcaaaaatagcgaatggtaatgagagtaacgaggtggttgctatagaactttataattcatctgtatattggtggaactaa

SEQ ID NO: 293449 - DNA, 231 bp, Morganella morganii
atgatgatcaaaacaacaatggaaacatctcttattttatttttattggccactaacagggaggcgggtgcaggtttatctttagccgtatctgacgttgatgatgaaccctgctcaatttcaacgatcgctgattcatgtatccgtagtcctacttttggaatggtgactatgatatcactatcagcccccatatcctgtaaaattttacgcagcatcgatatgttttga

SEQ ID NO: 293450 - DNA, 264 bp, Morganella morganii
atgctgatccgggccatcgaagtcacgaccgataacaccagtgaaaatgtgctgatggtggtgctgacactgaggcaggtcattatcactgaaacgaaaagcagacaggttgcaccgctgaaaaatcagacgctgccggaggccacgggcggaacggaggagcgcggtacagtgacaccaaaaccggtaagagaaagctttctgagccggggggaagacctgttcgggtcgttaccggcattttttaatcccgggggaaaataa

SEQ ID NO: 293451 - DNA, 123 bp, Morganella morganii
atgacattgttcccccaggtggcggaagacgcagactgcaggttatacatcatgctgagtctggcattcgtcgggctggttttcagtaacaccacggtgatggtacagcccttccctgcgtga

SEQ ID NO: 293452 - DNA, 507 bp, Morganella morganii; identical to SEQ ID NO: 293147

SEQ ID NO: 293453 - DNA, 681 bp, Morganella morganii
atgaaaataacaatagcagcgctggtacttgggctggcatgtgctccgtatgcattatctgccagttgctcactatctaaggactcaggctttcacattagcggcaacaacctatgcttgaacgatgtagactatgttgatggaatagctaaacttaggcaattagatattaatagtttcagtgtaatcaataaagaaatggttgttttttcggcaacctctccgcttggttcatttctcatgcttggaacaccgaagggcaatataaaaattttaggtgacatgccaaatagtgatttgaaaaagagcattaccggaataaggtcagtttctttttcacaaaaaaataacgaaatatactttatatctaatgcatgggctgtgtctggtgctatacacaaattatcatggaatcatataattaatgttttagataacattcctgttgaagtagatgatattgaattcatttccagcggaaatacattttatgtaatccaacagggtaagtatcaaggttatcttatcgctaataagcataaatataaaaagggtggcgggtcgtatgatgtttactccttggtttctccatcaggaaaagagatcagagagattgatgagcatcaagaaaaggtaaatgaatttctttatacatcaggtactaatgagacaataaaatga

SEQ ID NO: 293454 - DNA, 165 bp, Morganella morganii
atgaataatgaaaatgaatttactgaaagtgatatggcaaaggatagcattgcaattagtatctctatatttgccagtgaactgattgatttaatatctgcacctagtaatcctataaaaaaagtagatgatattaatgataacgacgcggatgatataaagtga

SEQ ID NO: 293455 - DNA, 240 bp, Morganella morganii
atggggacattaacagtcaggccacagccggaacatgaagatgcactggaggccgtaggcgtgttgttgcaggaaaaacgcgcttcacagacgttactcaaatcactgatggcctacgagcaacactgtaatgagatcgcccgattgaaagcagccttgtacaaggccgagaaagagcgtgatgagtacaaaggtaaaatagagcgctttaaagctgcccagctcgcgttatttgaataa

SEQ ID NO: 293456 - DNA, 285 bp, Morganella morganii
atggaaaatttaaaatttagtgttaaaaaatcagacgaaccagaaaaaaggaaattagaagaaatagaacagttaggtcgtaaatcagccaataaagtatacggggaaaaaatcaacaaaaaggtcgcaacacaaatctattttgatgaagaattattaaatcgtttaagaaaagacgcaatggataacaaaataataaaaaacaaagagttagatagtattgcaaaaatagttaatttggctgtttacgaatattacaaacaagaaggaaacaaaaatgcttga

SEQ ID NO: 293457 - DNA, 642 bp, Morganella morganii
atgataattgtgattggtggcaataaagcaagtggcaaaagtaccaccctgcaaaacctagttgttgctttgtctaaacatcaaaaaatcgctgttttagatacagatgttcaacaatcatttactaaatggcatatcagacggcaaaaatcagggattgaatcaaacttcaccgtccatgccgaacatggaaaaatcgcaaaaaaattattatcactcgaaaatgaaaacgatgtcgtttttgttgatgtaaaaggcagtaatagcgaagaatttattgtagccagcagcctatctaagctagttgttgttccattagaatcaacgataaaatcattagaaacattagctgagttacaaactcaatacgatgaaattaagaaaataaaccctgatgtaattttttctgtttttcaagttaaagcaactacaaatacatttatcgccggaaatcaacgcaacttctttttaaatgaatgcaaaaaatacccatcattcaaaacattaaatagcattatatattttaggaactcgtttatatccagtgatgaagaggggaagacagtattagaaaccagtgataaaaaagcaataaatgaggttgttgggctggctagtgaattagtaaatgttatagggtga

SEQ ID NO: 293458 - DNA, 771 bp, Proteus mirabilis
atgggattaataattcaagagcaatgtgttattgttgatcataattgccccgactggctaataactcagtctgaagggaatccaactattgattatacagatggcttaaaagtttatgctatttttaaaagacaattcctttcaggtaaaagaagacgtaatagaaaacaacgtcaactgggggataattgtcctttaatttatgctttgaaaaaaaaggatgatttatatacaaatatttctagcataaaaaaactcaatgatagcttcaaaatcatttgcaataaacttatggaattagaacctaaagggtatcaactaataatatcaatgccttcagcccataatattagccctattatcgcaaaacgtttagcaaaaaaatttaatgccacatatttaactgatattttaagaaaaataacagtcgataatgcttttcaacttctcgataaagcagatattaatattgaagaggctaaaagtcttagtttcaaaattaaattacaagcaaaagaagttggacttaaaggagggttttcactaaaaagtatccctactgaatttaggaatatatttccaccatttgttttaaacacacaagcatcatccaatactgaaaaaatcagaatattacttgtcgatgatcttatggctacaggaacaacattaactacagctagggatatcattgcacaacagtatccaaatgccattatacatgctatctgcctattcagttcaataaaaaaacaaaacaaaaaaacttga

SEQ ID NO: 293459 - DNA, 300 bp, Proteus mirabilis
atgtccactttaggtaaactacttaaaaaacaatcagccgaagcactggcaaaaattgaaacccgagcagaagaaattcgccgtgaaatcacactcgctaaaattcgtgaggaattaaaccgttcgcaaacagagttggctcaatcgcttggtatttctcaaccctctatagctaagcttgagaatgttgataacgatccaaagctatcaacgttaaagcgctatataaaagctttaggtggcgaactttctatagatgtgacgttaccaaatggtaagcgcatagggctgcatctttaa

SEQ ID NO: 293460 - DNA, 873 bp, Proteus mirabilis; identical to SEQ ID NO: 14470

SEQ ID NO: 293461 - DNA, 432 bp, Proteus mirabilis; identical to SEQ ID NO: 14471

SEQ ID NO: 293462 - DNA, 1353 bp, Proteus mirabilis; identical to SEQ ID NO: 103805

SEQ ID NO: 293463 - DNA, 1650 bp, Proteus mirabilis; identical to SEQ ID NO: 190830

SEQ ID NO: 293464 - DNA, 591 bp, Proteus mirabilis
atggcgactcaattagcacaggcagggaatcatctgctgacagaactggtgatggaaataaaaagcggaaatctgcggcgttgtgaggcgctgggactgacggacaatgagatccggttactgaacagtttaaccattgaagatctgcattatctttctcaaagtccggtctccattattacctgccagatccaccgggagaatttacggttattactgacccgggcaaaagaagttcaccgtcaaaatcagatgattgaacgctgtctgaggctgggggcatccatcgatttgctgaatcagtattttggcatgacgtcactggaggtgtcagcccgtcggcgtttgtccgggatccggggaaatgctggccgttcacagcggctgtcagatgtgcagcaaacggaattatggtatcgctggaaagaggagggcatgccggagccggatgatccggattgtcttcagatcatggtgtcctgtgccgaaaaaatgaatgtctctctgaccacggtatggaattcggttcaggaatggcaccgggacggcatactgaattcagctgacagggggaaatatcatgccggataa

SEQ ID NO: 293465 - DNA, 285 bp, Proteus mirabilis; identical to SEQ ID NO: 14475

SEQ ID NO: 293466 - DNA, 1296 bp, Proteus mirabilis; identical to SEQ ID NO: 103801

SEQ ID NO: 293467 - DNA, 519 bp, Proteus mirabilis; identical to SEQ ID NO: 190834

SEQ ID NO: 293468 - DNA, 705 bp, Proteus mirabilis
atggaacaaaataaacattctcaacagttacttcaggctggccctttaaagtcaacattaacactgaaactccataccagttatgcaatccggctatgggaagggcgggttgtacccaactctcagaatgacggtgacgaaaaaaagcgtaaatggatgatccccagtcttccgatgtttatttcccgggcgggtcatattactgatgatgcaaagaagggatacttatatgcagaaatgtggctgtatcagcttgagcaggcactggagcaagggactcggactattcagaaattactttcagaggttgaaaaacaattagttcagttacctgcggttgcggttatttcggatatctcatcaacatctcctgttgacctggcgatattcagtaaatctcctgttggttataaatgtgtctggttactcgtcggggttgatcaacttgctttgcgtgtattgcagggagagcattatggttttatttcccgtcagcaacgtgacaaggtccttaaattagcgggctatcaggttcgtcatgtgacagggatggccgtaaactaccggaaatatgagctcacccgtcataaccttgatttaaacagtgaaacttatcaacaggcttcccgttatttaggtgaaattgatccggatatcatttcaggaagaaaacgtgcgtcatttttaccgtctttaaaaaaataa

SEQ ID NO: 293469 - DNA, 537 bp, Proteus mirabilis; identical to SEQ ID NO: 190836

SEQ ID NO: 293470 - DNA, 2055 bp, Proteus mirabilis; identical to SEQ ID NO: 238143

SEQ ID NO: 293471 - DNA, 468 bp, Proteus mirabilis; identical to SEQ ID NO: 103796

SEQ ID NO: 293472 - DNA, 924 bp, Proteus mirabilis; identical to SEQ ID NO: 103795

SEQ ID NO: 293473 - DNA, 333 bp, Proteus mirabilis; identical to SEQ ID NO: 190840

SEQ ID NO: 293474 - DNA, 312 bp, Proteus mirabilis; identical to SEQ ID NO: 16660

SEQ ID NO: 293475 - DNA, 411 bp, Proteus mirabilis; identical to SEQ ID NO: 279430

SEQ ID NO: 293476 - DNA, 462 bp, Proteus mirabilis; identical to SEQ ID NO: 16667

SEQ ID NO: 293477 - DNA, 219 bp, Proteus mirabilis; identical to SEQ ID NO: 103816

SEQ ID NO: 293478 - DNA, 192 bp, Proteus mirabilis
gtgtttcttacgccatttgtcacattaacatttttggtgtttacacctgaaacctgggtacatggagcagatgctcatactgagtttccttatctttccggtgcgggaaggttagttctgaaagatactatgatgatagcagcaggatttgttgcaatggtacattctgcaaggtgtatcactaaaaagtag

SEQ ID NO: 293479 - DNA, 357 bp, Proteus mirabilis; identical to SEQ ID NO: 279433

SEQ ID NO: 293480 - DNA, 2082 bp, Proteus mirabilis; identical to SEQ ID NO: 16663

SEQ ID NO: 293481 - DNA, 2370 bp, Proteus mirabilis; identical to SEQ ID NO: 190919

SEQ ID NO: 293482 - DNA, 177 bp, Proteus mirabilis; identical to SEQ ID NO: 14595

SEQ ID NO: 293483 - DNA, 348 bp, Proteus mirabilis; identical to SEQ ID NO: 190917

SEQ ID NO: 293484 - DNA, 1065 bp, Proteus mirabilis; identical to SEQ ID NO: 103821

SEQ ID NO: 293485 - DNA, 534 bp, Proteus mirabilis
gtggccacgctttgccacgtgtttggggttcaccgcagcagctataaataccggaaaaaccgtcctgacaagccggatagcaggctagctgtattacgcagtcaggttcaggaactacacggcctcagtcatggctccgaggatgcaagaagtatcgccacaatggccacacacaggggcttccggatggaacgatggcttgccggccatcttatgaggaagctggggctggtgagttgtcagcagcctgttcaccgatatagacgtgggggacacgaacatattgctatcccgaatcacctcggacgtcagtttgcagtgacagtgcctgaccaggtatggtgcggcgatgtgacgtatatctggacaggtaaacgccggacttaccttgctgtggtactcgatctatttgcacggaaacccgtggggtgggcaatgtcgttctctccggacagcaggctgaccaccaaagcactgaaaatggcatgggaaagacgcggtaagccatccggggttatgttccacagtgattag

SEQ ID NO: 293486 - DNA, 303 bp, Proteus mirabilis; identical to SEQ ID NO: 190916

SEQ ID NO: 293487 - DNA, 135 bp, Proteus mirabilis; identical to SEQ ID NO: 103823

SEQ ID NO: 293488 - DNA, 189 bp, Proteus mirabilis; identical to SEQ ID NO: 103824

SEQ ID NO: 293489 - DNA, 243 bp, Proteus mirabilis
atgaatgcctatgtaaatattaaacacactccaacatcgacacgcatatccagccctttatctcgtcttttctggctttcatgtaaacataatgaagtcatcagtccattactaggaaaaccttacaagcttttatccattttcgaacaatgggcatctaccgaaggtattactgacaaattcagcggcgatacactgaaaacagcacttgaacgcggttctcccacttcagtgccttattga

SEQ ID NO: 293490 - DNA, 144 bp, Proteus mirabilis; identical to SEQ ID NO: 29491

SEQ ID NO: 293491 - DNA, 750 bp, Proteus mirabilis
atgagtaatagcaacttgtttatagataatgaggtgcatatctggattggtaatctacaaacgataccatgtttaagtaaagctaaatccagaatgcacatcttaaataacgatgaaatttcatcgttattcgactacccttttataaaacaacgaaatatttttttgctatcaagagtcatgttacgcgatattttatcattttatttaaaaatttcaccagaagatgtaagattttcaaaaaatgagtacgggaaaccatttattttaaacgaatcaaaggaaagcatttacttcaatttatcacattcaaataattgtgttgctctcgctatttcaaatacatcatccgttggtattgatattgaatatttcaaccgtgatatagaaataaatagcattatagattattatttctcaaaaaaagaaaaaaaatacctatcttattttgacgagactcaaaaaaaacataatttctataagatgtggacattaaaagaagcctatattaaatcaagaggcattggattatcagaagaaatcattaaggatttagatttttatataaagagagatcaatttgataaattatattttatagaacagcattactctgctcatctttcatatattaccaaatcaatattagatagctataaaatatccataatcacatatcaccatccatttaactataaattcttaacatggggtgatataaaaagcaacctgccacatcatttattatag

SEQ ID NO: 293492 - DNA, 1728 bp, Proteus mirabilis; identical to SEQ ID NO: 238178

SEQ ID NO: 293493 - DNA, 1767 bp, Proteus mirabilis; identical to SEQ ID NO: 292231

SEQ ID NO: 293494 - DNA, 774 bp, Proteus mirabilis; identical to SEQ ID NO: 238184

SEQ ID NO: 293495 - DNA, 1089 bp, Proteus mirabilis; identical to SEQ ID NO: 282027

SEQ ID NO: 293496 - DNA, 9216 bp, Proteus mirabilis
atgctgaattttgaaactttctatggtaatagtgaacctatagctgttattggtctttctggtcgcttccctgatgcacaaaatattgatcaattttggcataacataattaataaacacgatagctctcgtcttttttctgaagaagaactaaaagccgcaggtgtcgctgaacaaacttatcattcacctgattttgttaatcgtggcgcgccgttagatgaagcggaatattttgacgctactctatttaattattcacgctcagaagctgaacttatcgatccccagcaaagaatttttttacaaggtgcttggcatgctttagagcatgctggatatgccccttgcaatataaccatcaaaacaggcgtttttgcttcagcaagaatgagcagctatcctgcccagcaagatttagcattgcacaatattggccatgtccgtggcatgcaaaaattattagggaatgataaagactatctcgcaacacgtattgcatataaattaaatttaactggtccagcattaactatacaaaccgcttgttctagctccttagttgccgtacatatggcttgtgaaagtttacgctctggtgaatgcagtatggctattgctggtggaattggtatcacatttccacaaaccggtggttatctatatcagaaaggcatgatcttctcaccagatggtatttgtcgtccttttgatgcagaggcaaacggtacttttgctggtaatggatttggtattgtagtgttacgtcgtcttgaagatgccttagtggatggaaacacaattattgctgtattacgtggtagtgccattaataatgatggtcatcaaaaagcgggattcacagctccctccgtagcaggccaagtttcagttattagagaagcaatacaactggccgatattaaaaatgaagatattgaacttattgaagcacacgcaacagctacaccattaggtgatccaattgagtttagtgcattatgtcaggttttcgctgatcgctctcttactgcttctaaatgcgctattggctcagttaaaggcaatatcggacatctggatacagcagcaggtatcactggcctaattaaaacgatattagcggtaaataaagcacttattcctccatctatgcattttaatcacccaaatcctcaattacaaatagaaaaaagcccgttctacattcctaaaaaccctaaagcttggtctagcagaatacgaactgctggtgtttcttcatttggtattggtggaacaaactgtcatatcattgtgcaatcattgcctgactcattagtatcaatcaaacctgaacaagaggtagacaataattttgaatactcattattgcttagtgccgccacaaaagagagtctaaaaaaacttgctggtgattatgcaccattaataaaaattaccccagcaaacattctggctcataatgcattacagcaaagacaactcaacttaccatggcgcttatctatccccttaacaagtgagagtgatatttcactgttagctttctctcaaggaagtgctgattctttaatacaatatggtcatacatcaacaaataagaaaatagcgtggctattttctggtatgggatcacaatatcctgctatgggtaaagtgatgtaccaacattcaacaacatttgccgaaacaatcgatcgttgtgagcaagcatgcctgcaacacttaacatttccgttaaaagaagtcatgtttggcctacatagcgataaacttgttaatgccagttatattcaagcggctattgtcgcctatgaaatcgcaatggcagcacattggcgagcaatcggtattttacctgaaataattgtaggtcattcttgcggagaatatgccgcagccgttatcgctggtttctatacaatcgaacaaatgatgccacttgctgtatatagtggacaattaatggaaagtcatgttaatggtgaaatgattgctgtatttgcagaatatcaagatattcaaatcattgctaaacaatgtcatgttgaattagctgcaattaatggccataacaacttatcattcgcggggcaacccgatgatatgcaaaagtttactcaaatattgaaagcaaagaatattcgatttagagaaatgaataacgtgtgtgctgctcatacctcttatattgataatattcttgatcaattgatggaatttactgagtcattatcagcctcacaaggaaaaatagccttagtctcaggctatacagggcaattaatttctcaaaaagaacttcaacatccatcatattgggctcagcaactacgcaatacagttatgtatcaagatgcaatacaaacgttagtcaatcatggtgtcacccatgctatggaattaggaccaacttctgtattaagtgatcttggtgaacgtgaaggcattactgagattagttggataccaactgccagaatgggagttgatgaaattcagatgaaacaacaggctgcaacaaccctatttattgcaggctatgatttaccatggcagtcactgtttaaaactcaaggaagttatataccattacctctctatccctttgaaaaacaatattattggtatgaaaaaaaggatagtgaaaaatatcaaccacaaaaaagcgcatttgatttacctattagccaaggtcgtgaaacggcattaaaagcgcttacaacactcgatcttcctcgtttaaactcatttaattcaacacttaccactttacataattattacgtcgataaaatgatatgctcgtgtttaggccatgagttgaatacccccatgtctgtaatcgatattatgcgagcaggacgcattttaccccgctattatcaattattagtacgtttattagaggcctgtgttgaggatggatattatatttaccaacagataaatcagcacaactactataaaaaaataaaatctatttctagtgataaattaccattattattccatcaattacaattagatagcgaaggtcttcaatctattcctgacaccgtcaagcgagcaggagagcaactctacgatatgatgacaggcgtgattgaacctgtttcagtgatctttcctgaaggtgcatctcaaggtgttgaagttctctatcaagattttagttttggtcgttattttaaccaaattgctgccgcggtacttaaaggattactttctcactaccagcccactgtggctaagcctttgcgaattattgaagtcggtggtggcacgggaggaaccacctcttggctgctacctattttatcaaccatacaacatgttgaatacgaatttaccgatatttcacctatcttcacccgacgtgccgcacaaaaatttagtcaatattcatttgttaactatcgagagttcaatttacaacaatcccctgaaatacaaggttttcaatctgattattatgacattattattgctgctaatgttattcatgccactcaacatattggagatacattaactgctcttcgtactttactgcgttccaatggtcatttgcttatgcgcgaaataaccaaacaagctcgcttatttgattttgtttttggcccactggtgttacccctccatgatgaaaagatccgtaaaggaaaactatttttatcaccagaattatggcatcaacagtgtcgcttagcaggatttcaacatattcgctggttacctgatgcattaccagaaaccaaagatatgtgtgaacatattattctcgccagtgtttcgacagaaaacgatcactttgatcaagagttacctagtgacaccaagatacaacaaagttcacactaccaatggcaattaacaccttgtgtggaacaagatcttatcaagccaacattaatatttaaccatcaacaaacattgccttctgaaatcacagctattttatccgctattggatgtctttctgaacagggcgaaaatcaattaatcgttgccaaccttgcagatcctttaattatcgccgagcagatccgccaaatattactgtcatcgtctgatgggtttgttgttatcacgcaacaagcctgggcattaactgccatagaaacagttaatccagcacaacgtagtattcgaagtttattaaaaactattcaaaaagaatatagctcaaggttaattgccattgttgatttaggtataaatgcctcatggtctgaattagttcctgcttttatacaaatagaacaaggtaataatgaaattattgttcgtaaccattgctgctacttaccacaattaaccccactgccctcatcttctacgatcatagcgcagaacatcatggtatccccgcgctggcatattattactggtggttttggaggcttaggtcgaattacagcaagttggttagtaaggcaaggtgctaaacgtatcgctattttggcaccacgagctgatagcagcgcattagattggatgaataacttacagaaatctaaccagctagaaataaaatggctaacatgtgattgtcgtgataacgctcaatgtcatgcagcactcactcagcttgaaaatgaaggtggcattgaggggcttatacacagtgcaggtattttggatgatgcacttatgacacaactcacccctaagcgtatgtctgacgtattttctgttaaagcgatatctgccaagcaattttgtgatgctttagaaaaaacagatgccagttaccttattttatactcctctgccgctgcaactataggctctgaaggacaagcagctcattccctcgcttgtggatatttagatggattagctgaatatgcacgtcgcaatatcaagggattaaccgtcatttctatcgcttggggggcatggcaaagtgttggctttgtggcagaaaaacaactccatgataaattacaacacaaaggtatgagtacgcttactactgaggaaggactggcacatttagatgcttgtctgctagataatacctcttgtcgccttgcaatgcgcttagcgactccacctttaatgacacaaaaaacgcctttatttcatcagactaatcataatgatcattatgataaccatgaaattaatcacactcgccagctttgtgaaaccccaactcaaacggatcaaacagagccggtaagccctaacagggttgattatcgcgttggtgataacttagaacagtggctaacagcatgtatcaaacaactgttgcgtcttggtgatgaacatattgatactcacattgaactattccaattaggactagattctctctctttcctcgatctcagtgcggaaattaagaaacagtttgcggtcaatattgacgctgaacaatcttatgatgatatgactattgctggtttagcctcagttattcgaaccgcagcacctgagaaatttactgtgacagaagcactccataatcaagacaacatttcccacacaatggagtcagaacgatatgccccatttccattaacaccaattcaacacgcctattggatcggacgtaaaaacctctttaactacggaggcgttgcttgccatgcaatttttgaatgggattgtcaacgccatatatgggagccggcctcacttgaaaaagcttggaataaagttattcagcgtcatgatatgttgagaatgatcatagatgatgatggacaacaacgtatcttaaaagaagttccttattttcattttattcaacatgacctaacaaatttaacccaacaagagcaacaagagagcctaacacagataagggaagccctttcttatcgggtattaccgactgagtcatggccattatttgaagttgaaatttcttggctaaataacgattgttacagattacatatcaatctagatttactgcagtttgataccatgagctttaaaattctgtttgatgatctatttaacgcctattcaggacaagaattaataccacaaacatttaccttccgcgactactgcttaaaaaatcaaacaaatcgtaacagtgatgagtggaaaatggcatggtgttactggcaggatctattatctgatttaccttctgccccatatttaccgataaagaattcatccattactgaacaacctcgttttacgactttccaacatcatgtttctatagcgcaatgggacaaattaaaacagaggtggaaaaagcatggtattacaccatcagcagggcttttaacactttttgctttagttttaggtcgctggacaaaatacccagcctttacactaaacttaactttctttaatcgtcaaccatggcacccagatgttacacaacttattggtgattttacctctgtactccctatagatatttatctagataacgactgtacattaaatgagtcaatggcaaaaatacagcgcagactttggcaacatttaagtaagtcccaagtaaatggtgtagagattttacgtgaatggggacgctataaaggggatagtagccaatctctgttacctattgtatttactagcatgttaggtatgacactagatggtgacaatattgatgaagcattaaatcagcttttcggccaacccgtatatagcttcgcgcaaacacctcaagtttggttagatcaccaagtaatggaaggaaaagaggggctaacattaaattggttctgcatggatgacatctttgctgacggtttattaacaatgatgttctctgattatcaaagcttgatcactcaattatgccaagatgaagataataatcaatcagttgataagattattgcgcaacttccttcatatcaacatttagcaatagataatcacctccaatcacgctatcaacaactcgagcaaacattggaaaatcatccgcaaatcaaacgtgctcatgctatggtaatggtaaaagacgatacgaaagtagagcctcctctacaattactgtttgaagcctcttctgatattccactatccgttattaaacagcccaattggttacctaatttactttcgccatcagcttcactcagtgacattattgaaaagagttggcaacgatttgaggaacgagcacggtatggcatatgtcacacactgtatcgaaatgctctttttaccgagctaaacacaccaatcaccctagctgaaatagtggctcgtttaaaagcaaagcctcagtatgagaggctacttagtcagtggctagatttattatgcctgcatcacttattaaccaaagagggtgatcagttttatgccacaacacagtttattaacttatgtttatctgccccagtatttcaacaacctgttaatgattgggaatatgtactttgggattaccttgaacaatcactaacccaacatgaattactctttagtggtaaggtttctcctctttcactactttttaattcagatgaaattaccacagcactatacgccaaacaccctgcactaaattatttaaatcaatgtgcaaaagatattgttagtgcaatggttggtgcaacatcttcactcaatattttagaaataggggcaggtacaggagctaccactcaaggtatagtcgcagtacttaagaatacgcattactcatacacctttactgatatatcacattacttccttgataaagcgcgaaaaaaattcactgctgtaggagaaatgcgctatcaactctttgatattaatgcaccaatacaattttctcatcatccagataatggctatgatctgatcattgcatctaatgtattacatgatgcatcacatatcggccacgcactaaaacggattagaagcctgttaaaacctcaaggctatttattatttatcgaagcaaccgagtgtcaaagtgctatgcaaatggcgactgttggctttattgagggattaagtgcatatcaagataagcgtatattgacgaataaagcgatgcttgatagtgaaagttggcatgatattttaatcaatactggttttgaaactattggtcaatggccccaaacagattcctcatctttgcgacaaacactctttttagcctctcccactcgtggaggaaaaccttatttaggtaaattacgtgattatttatctcattctcttgatcagaatatcgactcttttgagttgttccaatgtgaaaatattgaagcaacccttaatggcatagcaacatcatccgctcaagagctaaatgaacagatacaacctgttgcaatacctgatgtaccaaccaatatgattaatgaaatcattgcattatggtctgagttattaggtcgtgaggtcaatagtacaaatgatttcttccgttctggaggagatagtttgattgcaaccaaaatgatcagccaattacatcaacggggatatccagcaacattacaacagatttttacctatccatgcttagccgatttttgtgctcatttagagcaggaaaagcaatctcaacgagagtactcctctttgatacctctaagcgctgtatctgctccaaaaccttaccactactttatggtacatgcttctgatggtgatcccggtgtttacctacctcttgctgagtcgttaaataatacagtgtggggattaacagttacagatgcttcaaaactaactgatttggatacattgttatcattacatttatctagcataaaaacagcacaacagactggcccttatattcttattggttggtcatatggtgcttttattgccagttaccttgcagaacaactctcgcaacaaaatcattccgtattattagtattaatagatcccgtctatcgacatgattttattaaattttgtcatgatgactcagatagttcatcagatgaaaataagcagcttgcatgcactaaaagacttatgtcattcctacctgaaagtgacctaccattatctgatgatatcgcctgtttatggctggaagccaccaaccacccaacagaatggacatcacctgaaaaagagtggtaccaacgattaccgccacatacccaacatcactatttttcaggggagcactggtcaatactgcaagatcgcgctaccagcacacatctggccgaaatcattgatcagtgggtgcaacaaaaactttctaataacggatatccatccgaaggaggtaattaa

SEQ ID NO: 293497 - DNA, 6105 bp, Proteus mirabilis
atgaaaatattaagtgatattaataacataaaagaattatgttccaagcaaataaacattgacaaaaataaattttcagataaggacaatctgataaaattaggtcttgattcaattggatttatgcaatgtttatatattttccaaaaaaatggttatgctataacattaaaagatttgtatttaaatccaacaataaaaggatggtataaaatattaaaaaaatcagatataaataaaaaagaaagaaaagataatatatatacacataaaacaataaaaaatgctggtgagttttcacttacacctatacaacatgcctattttgtcggccgtttgaataaacaaactcttggtggtgttgcttgccaaatttatcaagaatttgatggcacccctaaatttactccggaaagtctagagaaagcattagtattattatcaaaacgtcatcccatgttgaatatagtatttcaccaacagggtacacaattttggtctcctaacccaaatagaaaatatgttacatatcatgattttagtaaattaccaaaagatgagtatgagaaaaaacttttacaattacgggaaaaattaagccatcaggtactaaatgttgaaagcggtcagttaattgattttcacatgatatcgctacctaacaacagatatcgtttatgtactaatattgatatgttgattgcagatggtacaagttattcattactctttactgaactttgtttattattgagcggagaaatactgcctcagttagatgagcactatgacttttaccattatttacaagataaaaaacagtatgaaaacaaagaatcagcatatcaatattggaaaaataaaatcccaaacctaccagactctcctcttctgccattatatatggatccagaaaaaataaataaaataaaaattaaacgccttagctggacatttagctcaaaagaatggaaaaactttagtaatttggctaaagaaaataatattacaccttccattgcattagcaacctgtttctcatctgtacttgcaagatggactggccaaaatagcttattactcaactttacattatttgatagaaagccattagcccctgcagttaataatattatagctgattttactaatgtcattcttttagaaatgaaaacagacaatcgaccattaatttcattatctaaagacaatcaaaatacatttattgaagcttggcaacattctgattattctggtattgatatcattagagaccttcgtaaaaatggcacccatccttatgggtgtcctgttgtctttactagccatattaatcaaccacttattgataaaaatatagaatctgtattaggttctataggatggggaatatcacaaaccccacaagtttggcttgatcacatggcaattaacaaaagtggaaatattgttttacagtgggattataacaatgacttgttccggaatgatgttataacaacaatatttgatgtttatatttctcgtatacgccaacttgccaacgatcctaatgcctggattgaaacccaacctgatttaattcctaaaaaacaattaaaaaatagaatatcagttatcaaaaaagataattcactattaccacatacactgcataagtctattttccataattattcaaattcatcaaaaattgctgtcattgatatcgactctcaggaatggagctacaaaaaattattatctaaagcaacaatactcagtgatcaaataatacaacaaggttataaaccagaagacagaattggtgtatgtatgccaaaaggagtagggcaaatcattagcgttctggctattttattaatggggggaacttatgttccgattgatgtactacaaccagaagaacgtataaaccgcattgctaaaaatgctcagctttcattactcatcgtatctgatagcgatccatcctattcaatctatgctacattttgtaacaggattgtttggcaaaaagttcaaccctccgagaataaaccactacacaatatagatatatctcctcatcaagcagcttatgttatttatacttcaggttctactggagagcctaaaggtgttgttgtatcccatgccagcgcaatgaatacctgccttgatctcaatcggcgatataacatttcagacaaagatcgggtacttgccatatcagcactacattttgatctgtctgtttatgatattttcggtgttttaaatgccggagggactcttgtattagttaaagaagatgagcgccgtaatcctgatgcatggttacgacttattaaccaacataaaataacactttggaacagcgtacctgcactgtttgatatgttactaacctatgcagaaggaatagggtcatccattccacaatcgctgctattaatctatctctctggagattggattgggcttgatctcccgacacgttactataatttctgccctgatggacaaatagtcgccatgggaggtgccacagaagccgctatttggtctaactattttaatgtcacaacattagacccatcctggagctcgataccttatggatatcctttatccaaccaacgttatcgtattgttaatgctagaggagaagattgccctgattgggtatcaggagaactttggattggtggtgcaggcgttgcgttaggctacctaaacgatcccgaaaaaacagcacaacagtttgtaaaacaaaatggtgaaaattggtataaaacaggtgatatgggaagatatctccctggcggtatacttgaatttttaggaagacgtgaccgccaagttaagattggcggataccgtatagaaccaggggaaattgatgctgcattcaataagcttcagggtgtgcaaaatgcgattacactatgccttggtaatggtaataaagaaaaagcattacactcttttgtgatactaaattcgggtaattaccaggatattatcagttcaaatagcaccttttctcccctctactatctgcgctcaaccccaataaatgtacaacaacaatcccaagaaacggcaatcatagctggatttttatatgattatcttactgaacaaaatattgatttcgacaacctcttgtcagaaaaaaaatcagcagatgaccatagcattatcgctagctatcagtcattaatggctaattggctaaatttaatagcacaatatccacaaactacactcaattcccccccaactaatagtacccagcgaacgctaatagaaaatttgcagcgccacaaaaacaatttaacagacatactcaaaggtaaaaaatcagctctaacactatttgatgatccctattggtcaccagaacaagtcactatgcgtattgatggaatgcactactccttagaaaatttactacaacaaataagagaacttcatcattcactaaaaaggccaataaaaatcattcaattaggtgctagaagcggtatttcagcaaattatattctgcaacgattacccactaatatggttaccctactgctaactgatgagtctctttcaatggtaacgcaagctaaccaaaatttatcagattatcaaaatagttatgctgagcctcttacagaagtatttcttcataaaaatcgatatagtgcagatatcatttggatgaacaattatcttcatcgattagacagcccacaaaaagagatacaaaaattcgtttcactctgtgctccgagtggaatgatttttatacaagaagtgttacatgcccctgcacaatcactgataagcatctctttattacaacaaaatggtagtgatcctgctgatgaattattaacagcaaaaaaatgcaaagatatctttagcgcttctactgcgacttataaaagtgaaggagttaacggcgaaatattgacacagttataccaagcaccagaaaaaatttatttaccagataaaaataagctagagcatgatttgcgccaatttttaccagactatatgatcccaaaacatatttattttctaactgagttccccttaaccgcaaatggcaaaatagataaccaatcattaaaattgtattgtcaggaataccaagaagaatacctaaatcaacaacctatcaatggtaaagaacagatcatcataacaatatggcaaaagctccttggcaccaacaagatacaccgtcacagtcatttctttcgtgaagggggagatagcctagttgctattcgattgatctctgatttaaaccatattggctaccaagttgaactggagcatatctttgcttatccgatcctttctgattttgcacaaaatataaagcagagcgaagttttcgaaaaacagccagcaatttcacataacgaggcgtatagatacaatccatttccactcactgatattcagcaagcttacttagttggacggcaaaataattttacacttgggggtgttggtacacatttttttgtccattttatagcggaaaatttagatgtacctaaattagaacgtacaattaatcagttgatttctcgtcatgatatgttacgtggtgtcattattaatggacaacaacaagtacttaaaaaagttccttattattccgttaaaacgcattatatccctacagaaaaaagtgacgcttttctagtattacgagctcaacttgctaacattgtttatgatccagaaatttggcctttatttactattcaagttatcaagaccaaagaacaaccagatcatatttttattagccttgataacttattccttgatggaatgagtatgcagatatttttcagtgagctaaaaacactgtatatggagccaaatcaccaatttatccctctagatattacttttcgagattatattgattgtgatgcctatccgattaacacacaaaatgattgggaatattggttaacgcgtttaccacaattaccaccagccccacaattgccactaataaaagatccagcacagattgtgcaacctcgcttctcgcgtttacaaacatcattatctacttctgtttggcaagcactacaacaagttgctcagcaaaataatgttacgccagcagcacttttgattgctgcttattgcgccacattatccgcatggagtaaaagccctgagttaacaattaatttgacattatttaatcggcatcctgtacatcctcaaataaatgaagtacttggtgattttacctcattacaattactcgattggtatacctgtgatctttggtcaaacagtatctcaatgatgcaaaaacgtttacataaagatatgcaacatcgtagtgtttcagccattaaagtaatgcgtgaaatggcaattcaacgacagatgtctcatatagagatacctgtcgtttttacctgtgcattgggctataaacatgatgaaggttttctttctcatcattcatggctaaaacctgtttggggaatatcacaaacaccacaaacatggctagatcatcaagtatatgagtcagacggtgaattatatttaaactgggattttgtcgaacaattatttgactacacaaccattttttccatgttccagcaatatgaacatatactcactaaactggctactgaaccacaatcttggcaattgccactaaataaacttataccaagatgcaataatctcgtcatcaccccagttttcaatgccaaaaataatcaaaacacacattataaacaatctactgatacacaaaaaacaggtcagacaatacaaaaactacaacaacttgttaagcaagttattggaataacgttagcacctgaaacaaattttttcgaagcaggtgccagctctttacaattggttcaacttcatgcagcactacaaaaaaatggctatagccatattacaattactgatctgttcgctagtccaaatctaagtacattagcgcaattgctttggcaaaacacttcaccaacatgtgagcaatattccgaccgagacaaacacaaaaacaagagaaagaaacggttacaactacgaactcatagtagataa

SEQ ID NO: 293498 - DNA, 738 bp, Proteus mirabilis; identical to SEQ ID NO: 16657

SEQ ID NO: 293499 - DNA, 1230 bp, Proteus mirabilis; identical to SEQ ID NO: 16656

SEQ ID NO: 293500 - DNA, 1989 bp, Proteus mirabilis
atggaaaataaaggaactttatttaaatctatatcttttgtagcggctacaatggtaacagtaagctctgtagctgccacagaacagcatgataatacaataactgttactgcaactaagcgcattcaaagtagttttgatgtaattggtaatgtgaatgttcaaactgatgaacagttaaaaaaatctttagttaatcaaactgatgatttgagcgcagtttttcctgagttgttatctgcaaaccgaagttcgcgtatttataacaatatgactcttcggggccaatcttcggccgatttcttttctccaagtttgggactgtttgttgatggtgctccccagctttctcaatcgtatgctcaatctcttcaaggggttgagcaagttgagctacttaaaggcccacaaggagttatttatgggcgtggcacattgggagggattatcagtgttattaccaaaaaacccagtagtcacgctgaagcatggttaggggggcaatattttggtcaaggggaaagaatcaatacaggaggaagcactggctacatggaaaacggctgggcttttcaggggaatgttagtctcgatagaaataatggttctttgaacaatccagcatgggataaaaaaaatgttgatagcagagatataaaagctggatggttgtctgctaattatatttcccctgatacattatttgagtctaatttaaaagtaggtggagaaaattaccattctcatgaggaatattttgttcctttttcacctctttcacgttcaaaaattgatactgaatggttatatgaaacacctaatcttaaacgtaaattaaaaaatatttcctggaatacaggttatgattttaatgatgaatggaagtttaaaacgatactttcttatcaaaatatggatatagatagattgtttatggacggaacgttacaagatgattctcaggatattttgtattcagaagcaagagctaattatgaggggggggatctaagtggaattataggggtatcatttcaaaagatgggttatagacatgataatttatctgtagggaaagtcggaatgggaggaaaaaaatctgataatgatatttataattactctggatattttgatggtgcatacaggataaatgacaattgggagttaggtgcaggggctcgtttttctcacgaaaaagcaaaaactcgaatgattattttagaaaaaggaaaaggtgagtctaattataataataatgcagtttttaatgcctttattccacgagcaagtatcgcctggcttccaaatgagcagaatcgtatatggtttggagttggccgcggttttaaacctggtggttttaacaaagaaggggttgataaactagctctgacttcttataaatcggaaattgccacggaaatggaattaggttggaaatggcacagtgttaatgataaccatatggccgaaattactttatatcaaatagatagtaaagatgttcaaggatatgtaggtgttattggttatcaggcattatctaatatgggagattcaagaagtcgagggatagaatatctttggaaatcaaagcttacccctaatcatagtatttcactgggtggcatgttcaatcaatcagagtttaccagtggagaacataaaaataaaagacctgcttatactcctagttatagttcattaatttcatgggagggcttatatggcaaggagcaaaagtggtcttctcggattgcagtcagatttaatggaccattttactttaatgagcaaaataatttagaacaagggcattatactgttgttgatgcatcaatatcatggcaccctacaaagcaatatgaacttagtatctatgcgaaaaatattggtgatgctttatatcgaacgtatgcatttggtaataaagcacagctaggtaatccgagagagatcggggttcagggaagtattaacttttag

SEQ ID NO: 293501 - DNA, 300 bp, Proteus mirabilis
atgaaagactgtgaagtattggtgctaaatgttcagccagaccatgcttatttagttgtaatgatcccacctaaactatcaatatcaacactaatgggagtcctgaaaggacgtagtacgataaggttatataatcgatttccacatatacgtaagaaactttggggtaatcatttttgggctaggggatattttgctgatacggtgggggttaatgaagtcatcattaggcgttatgtaaggcatcaggataaagttgatcaagagctcgaccaacaaatggaattgttgggggattaa

SEQ ID NO: 293502 - DNA, 663 bp, Proteus mirabilis
atgcgtatgaaaactctcccgatatgtcttgccctgacctcactgttgttggggggctgtgcagacaagccagcccagcctacggaagcggcggcagacatcgcgattccgctcaacgtcggttatgctcagccgctgctcccagatatttatccgtcagccccggaagtggtgcgttatgaccgttaccggctggttgatatttcgccttcacaggcacagcgttacccgctggaacaaattgttcatctgcgtattcctgcttccgtctccccgacagtcggggatgcgctacattatgccctgcgtgattccggatatcgtctgtgcacgtccgatggacaggcgaaccacctttatcgtctgccgttacccgctgttcattatcagatgggatcgatccgcctgaatgtggcgttacagatccttgtcggtccggcctggcagttgtgggtggatgatgtgcaacgggaagtgtgttaccgacttcgtccggaatacacgccatctgcgccggatgcaggaatgagcggcgcttcatccgtctctgtggtcaccccactttctgcgggcagtacgccattaccggtgccaccggtgcttaacacttccactggtcataccgatgtgaataaggttcatcgcggaggggggctgaaatga

SEQ ID NO: 293503 - DNA, 741 bp, Proteus mirabilis; identical to SEQ ID NO: 190889

SEQ ID NO: 293504 - DNA, 735 bp, Proteus mirabilis; identical to SEQ ID NO: 103789

SEQ ID NO: 293505 - DNA, 639 bp, Proteus mirabilis; identical to SEQ ID NO: 14558

SEQ ID NO: 293506 - DNA, 555 bp, Proteus mirabilis; identical to SEQ ID NO: 103787

SEQ ID NO: 293507 - DNA, 198 bp, Proteus mirabilis; identical to SEQ ID NO: 14560

SEQ ID NO: 293508 - DNA, 2148 bp, Proteus mirabilis; identical to SEQ ID NO: 103785

SEQ ID NO: 293509 - DNA, 750 bp, Proteus mirabilis; identical to SEQ ID NO: 14562

SEQ ID NO: 293510 - DNA, 525 bp, Proteus mirabilis
gtgcagtccgacatgcagaaaaacctgtttttaatacgctggctggcaaccgccaaaaagcaacgccgttttgaccgtgacgttacgccggatattgactggctgcttcaacagggacgtacactggggagccgggccaaactgccacaaaaactggattatctgtaccgctcctgtacaggcgcattacacgagcagagcgatctgttccggctcacttatgcgcttgaatcggccaaggaggcaggctttgcctatcagttattgagtgataaatcgtggcacagacgacatgcggtgagcccggatacgctcagcaacaccatctgtttatccaaaaatgcactggagcaggcttttgatactgacggtcatcagaccgcacacctacctgtaaaaatcggaggtgatatcgccgcactagctgaactgctgacacaatgtggctggcaactcatcacgacagacaacccgccactttatttactgctcacactcatcaatccatcaatcagcgcaggataa

SEQ ID NO: 293511 - DNA, 327 bp, Proteus mirabilis
atgcgattattttctccgcttatttccctgtttgcgttggttgtcagtgcatttggggtattgcctgctcaggccgctgaaaaagatgaactggcgctgacgttaaagcagctcgatcacatccaggccagcctggagcgcgcccgtattcaggcaaatcaggacaatcacgcccgtttttattttgattattcccgcgcctccagagaggtggagattattcggcaggggattgtccgctatctggagccttcccgggcccagcccacggtgccggttaatgtggcggagccgctgcgcggggattaccgccgggagcagcgatga

SEQ ID NO: 293512 - DNA, 240 bp, Proteus mirabilis; identical to SEQ ID NO: 190881

SEQ ID NO: 293513 - DNA, 369 bp, Proteus mirabilis; identical to SEQ ID NO: 103780

SEQ ID NO: 293514 - DNA, 417 bp, Proteus mirabilis; identical to SEQ ID NO: 14567

SEQ ID NO: 293515 - DNA, 645 bp, Proteus mirabilis; identical to SEQ ID NO: 103778

SEQ ID NO: 293516 - DNA, 897 bp, Proteus mirabilis; identical to SEQ ID NO: 190877

SEQ ID NO: 293517 - DNA, 1530 bp, Proteus mirabilis; identical to SEQ ID NO: 103776

SEQ ID NO: 293518 - DNA, 486 bp, Proteus mirabilis; identical to SEQ ID NO: 103775

SEQ ID NO: 293519 - DNA, 438 bp, Proteus mirabilis; identical to SEQ ID NO: 14572

SEQ ID NO: 293520 - DNA, 2868 bp, Proteus mirabilis; identical to SEQ ID NO: 190873

SEQ ID NO: 293521 - DNA, 2226 bp, Proteus mirabilis; identical to SEQ ID NO: 190872

SEQ ID NO: 293522 - DNA, 441 bp, Proteus mirabilis; identical to SEQ ID NO: 103771

SEQ ID NO: 293523 - DNA, 975 bp, Proteus mirabilis; identical to SEQ ID NO: 103770

SEQ ID NO: 293524 - DNA, 1443 bp, Proteus mirabilis; identical to SEQ ID NO: 190869

SEQ ID NO: 293525 - DNA, 339 bp, Proteus mirabilis; identical to SEQ ID NO: 103768

SEQ ID NO: 293526 - DNA, 1515 bp, Proteus mirabilis; identical to SEQ ID NO: 190867

SEQ ID NO: 293527 - DNA, 408 bp, Proteus mirabilis; identical to SEQ ID NO: 16655

SEQ ID NO: 293528 - DNA, 300 bp, Proteus mirabilis; identical to SEQ ID NO: 16654

SEQ ID NO: 293529 - DNA, 240 bp, Proteus mirabilis; identical to SEQ ID NO: 16653

SEQ ID NO: 293530 - DNA, 909 bp, Proteus mirabilis; identical to SEQ ID NO: 103764

SEQ ID NO: 293531 - DNA, 612 bp, Proteus mirabilis; identical to SEQ ID NO: 14549

SEQ ID NO: 293532 - DNA, 363 bp, Proteus mirabilis; identical to SEQ ID NO: 14547

SEQ ID NO: 293533 - DNA, 318 bp, Proteus mirabilis; identical to SEQ ID NO: 103760

SEQ ID NO: 293534 - DNA, 423 bp, Proteus mirabilis; identical to SEQ ID NO: 103759

SEQ ID NO: 293535 - DNA, 513 bp, Proteus mirabilis; identical to SEQ ID NO: 103757

SEQ ID NO: 293536 - DNA, 648 bp, Proteus mirabilis; identical to SEQ ID NO: 103756

SEQ ID NO: 293537 - DNA, 975 bp, Proteus mirabilis
atgaaaaaatctgaccgtaaacgccgtccggcagcggataagccggttcgcgatatttatcaggaagtgactgaccgtattgtggccgcgctggaaaaaggcacccgtccgtggaaacgaccatggcggccgtcggaagggacaggcaccggttttccggtgaacgccctgaccggtcattcctaccaggggataaatgtgctgctgttatggttgtcggcggcggagcagggctttggttacgatatctggctgacttaccgtcaggcacagcaactgggtggccatgtccgtaaaggcgaaatggcgacgaatactgtgatattcaaaccggtgaaggtgccggcaaaagaccgtcacggtgagctgctgcgggatgaacacggtgaggtggtgatgacggaggtgccgatgataaaggcgaatccgttatttaacatagcccagtgtgatgacctgccggcgcatttttacgaaaaccggcgactacccggagaggagacagcagggataaccctgccggccacgcaccgggtgctggatatcctgaatgctagcggcgtgaaggtgatcagtgcggcgcagaaccgggcgtattacagtccgtcacaggaccggattgtgatgccgctgtcgtcacagtttgaccggaatgccgattaccaggccaccttactgcatgagttggtgcacagtaccggtcatccgtccaggctggcccgtgaaggcatcacctcatcgtccctgaagtttggtgacccgctgtacagttttgaggagctggttgcggaaatgggcagcgcttttctttgtgcgcagttaagcgtcgagggagaagtgaaccatgaaagctatcttgacagctggctgcgggtactgaaatcggacaaaaaagcgttgttccgggccgccgggcaggcccgccaggcctgtgagtttttactgaatgtggccgcatcccgacaggccgcgtag

SEQ ID NO: 293538 - DNA, 300 bp, Proteus mirabilis; identical to SEQ ID NO: 103754

SEQ ID NO: 293539 - DNA, 1002 bp, Proteus mirabilis; identical to SEQ ID NO: 238083

SEQ ID NO: 293540 - DNA, 327 bp, Proteus mirabilis; identical to SEQ ID NO: 103752

SEQ ID NO: 293541 - DNA, 1593 bp, Proteus mirabilis; identical to SEQ ID NO: 103751

SEQ ID NO: 293542 - DNA, 1071 bp, Proteus mirabilis; identical to SEQ ID NO: 14536

SEQ ID NO: 293543 - DNA, 1071 bp, Proteus mirabilis
atgaaaaaaatccttctcttgctgattatcgcccctctactcatctcatgtagtagtaaacccactaaaacttttgagcctgattacagcaaagacaccaatgccttcgatatattaatgggacaatttgccaataatatcgagatgatttggggaatgcaggaagtattaatcgcaggccctaaagactacgtaaaatatacggacgcttatagaactcgtagccatattaattttgaagcgggtactatcactatagaaaccctagggggtgacgcgcctcaataccaattacataaagcgattgtcacgacattgcttatgggagaagatcccggctctatcgacctctactctgatgtaaataatatcccccacagtacagagccttttttattaggacaagtacttgataatacagggcagcctatacgctgggagtggcgagcaaataaatttgcagattatctaattgccaataaattacaaaaacgtcaatcagggctgaacactatttggtatgtcactattaacttagtacctaaccacttagataaacgtgcacataaatacttaccttatgtacaacaagccgcggccaagtatggtgttgaaccttccctgatccttgccattatgcaaattgaatccagcttcaacccctatgcggtaagtagctcagatgcactaggcttaatgcaaattatgccagcaacagccggacgagatgtatttcgtatgcaaggtaaatcagggcagccaagtcgcagttacttatttgatccggcaaataatatcgatgttggtacagcgtatatctcgatattacaaaatagctacttaggtgacattaaagatcccgtttctcgtcgctatgcggtgatacaggcttacaatggcggtgcgggtagtgtgttacgcatcttccatagtgataagaaaaaagcagccgcgatgattaataacttagcgccgacggaagtttatacgacattgcgcaataaacatccggccgaccaatcacggcgttatcttgaaaaggtaagcaccgcacaacgtaactatcgttaa

SEQ ID NO: 293544 - DNA, 273 bp, Proteus mirabilis
atgagtagaactattttttgtactttcctaaataaagaagcggatggacttgattttcagttatatccaggagagcttggaaaacgcattttcaatgagatttctaaagaagcttggggacaatggatggcaaagcaaaccatgcttatcaatgagaaaaaactcaacacaatgaatcctgacgatcgcaaattattagaacaagagatggtaagatttttatttgaaggccacgatgttcatattgacggctacacaccacctgaaaaataa

SEQ ID NO: 293545 - DNA, 1041 bp, Proteus mirabilis
atgatggaagcacagcagttctcgcaagtcgtactcgactggtatcacaaatacgggcgcaaaacattaccttggcaacaagaaaaaacgccttatcacgtttggttatctgaggtgatgttacaacaaactcaagttgccacggtgatcccttattttgagcgttttattgcgcgttttccgaatgttagcgcattagcgaaagcgccacttgatgaggtgctacatttatggacgggtttaggttattacgcccgcgccagaaacttacataaggcggcacaacacattgtagataagcatcaaggacagtttcctgatacctttgaggacgtttgtgctttaccgggtgtgggacgctctacagcaggggctattttatcgctatcactaaaaaagccttaccctattcttgatggcaatgtaaaacgtgttttagcgcgttgttatgctgtagaaggttggccgggtaaaaaagaagttgaaaataaattatgggaaatcagtgaacaagtcaccccaaccaaaggggttgaatattttaatcaagcaatgatggatttaggggcaatggtttgtacgcgaacaaaaccaaaatgcgaactttgccctttaaatacaggttgtattgcttatgctcaccatagttgggcggattatccggggaaaaaacctaaaaaggctattccggaaaaaacaacttattttcttattttacaatatgataatctggtctggttagataaaagaccaccagcaggaatatggggaggactgttcgcctttcctcagtttgaaacaaaaatgcttttagaacagtggctaactgagcatggtcttgaaaataataaaactgagcaattaatttcatttagacatacttttagccattttcatttagatatagtaccaatttgcgtaaaactctccacgtttacttctctgatggaggcgcaacaaggactttggtataacttacaaaccccggcaagcgtagggcttgcggcacctgtagagaatttacttagacaattagcctaa

SEQ ID NO: 293546 - DNA, 720 bp, Proteus mirabilis
atgatcaagaatgtaatttctccggaattcaatgaagaagggcgtgctttacgacgcgttcgtagttttgttcgccgacaaggccgtttaacacctcgtcaagaacaagcattagaaaagcaatggcctatctttggcattgaatatcaaccggaacctatcgacttcagtcaggtttttggacgtaacgcccctgttgttttagaaattggttttggaatgggcgcttcgttggtgactatggcaaaaaattcgccagaaaataattactttggtattgaggtacatgcccccggtgtaggtgcttgccttgccagtgcacaagaagagaatatctcaaatctgcgagttatgtgtcatgatgcgatagaagtactcaatcacatgatcccagataatagtttacagatggttcagttgttttttcctgatccatggcacaaagcgcgtcataataaacgtcgtattgtgcaagtatcatttgcagagttaattttaactaaattagcgccaaacggtgttttccatatggcaacagattgggaaccctatgcagaacatatgcttgaagttatgacaagtgttgatggatatcagaacttatcagaaacacaggattatgtaccacgaccagaaacacgccccgtgactaagtttgaacaacgcggtcatcgtttagggcatggagtatgggatcttatgtttaagagggtaaaataa

SEQ ID NO: 293547 - DNA, 327 bp, Proteus mirabilis
atggctaaacagcgtagtcgccgtttacgcaaaaaaatgcgtatcgatgaatttcaggaattaggtttttcagttaaatggacgttcccagaaaatacccctattgaggaggtcgacagctttgttgatgactttatccttaatgtgatagagccaaatgggctggcatttgatgcgagtggttatctgagttgggaaggcctgatctgtctacaaaaaattggcaaatgtaccgaagagcatcgtcaattagtagaaaactacttaaaagaaaaaaatatgcaagatgtacagacctctgaactatttgacgtttggtgggactaa

SEQ ID NO: 293548 - DNA, 927 bp, Proteus mirabilis
gtgactacaacgttatctaacgcattattgtcagatatattgcaacaaattcgtcctttaattgggcaaggaaaagtagcagattatattcctgctctcgctcaagtacctgctaatcaactggctatggccgtgtatacggttgatggtgagctttatcaagcgggtatggccgataaacgtttctctattcagtctatatcaaaagtacttagcttaacccttgcgttaacacgttatgatgaaagcgagatttggcaacgagtaggcaaagagccttcaggattaccttttaattcgttaatccagttagaaatggaaaaagggctaccacgtaatccttttatcaatgctggagcgatagtgattacggatatgttgcaatcgcgattaagcgcgccaaaacagagaatgttagaagttattcgtgcactgacgaatacagctgatatttgctataacaccgttgtggcaaaatcagagatggaacatttaagtcgcaatgctgccattgcctatctgatgaaatcgtttgataattttgataatgatgttatcaccgtattagaaacctattttcactattgctcgattgaaatgagttgtgtagagcttgttcgttgttttagctacttagcgaatcaaggaatatgtgttggaagtaaaaatcagattattacgccaagacaagcccgacaaataaatgcgttaatgttaacttgtggtatgtatgatggtgcgggagagtttgctttccgtatcggtattcccggtaagtctggggtgggaggcggtattattgctgtggttcctgatgcctttaccgtagcagtatggtcaccagaattggataaatctggtaactcattggcggggtgtgctgcccttgaattattagcaaacaaagtagggcgctcaatattttaa

SEQ ID NO: 293549 - DNA, 738 bp, Proteus mirabilis
atgggatttaaaaagttggtcgttgcattggtttttgtcgcaagttcagccactgctgcacccagttttgactgtgctgtcacgccaaaagatgatttacgtattacacctgaatttgttgaagtgaccggctctaatggtttacttgttatttatcccgatggcacgttactgcgcgatgaaaagagcgtcacactaacccctgagcaacaagctattgcgaaaaaatatcaagcgacagttaggcaagatattccttggttaagaaaagagacgggaattaaattacaagagtcaagaaaagtactggataaagttgttattgaagcctttgggcaagatagccgtattttaaagcgcttaagtgacttagaaaaaaatcttaatcaacaaatggatactgttatttcgctcaagcctgataatgtcacattccatgctcaagcgattaaacaggtcgaaaccaaagggcgagaaataattgagagtagccttggggggatgttgcaagatagcattaatgaattaggtcaaaaacaattactagctgctgcgagtggtgataggaaaaaagccttaagtggattattaggtaatcttgatggttttcagcaaatcatcgaaaaagaatggaagcaacaagaagcttcatttaatcaatttgggcagcaggcatgtaataaaatcacccaaatggaaaaccaacgtgtcgaattgataaattcactaaacaaatag

SEQ ID NO: 293550 - DNA, 951 bp, Proteus mirabilis
atgaaaaagatccttgcgttagttactgcctctcttctgtcagttagcagtttttctgcattaagtaatacctcagttacataccagcctaatcaaattgttgaacagcaaaatgataaagttgttatcaagcacttattaggtgaaaccgcagtatctaaaaatccgtctaaggttgtactatttgattttggtctatatgactctttagttgcattaggtttagcggataaagtggttggtttaccattaggaaatgcacctgaatatattaaagggcgtattgcgaatgatgtagctaatgttgggggaatgaaagcccctgattttgagaaactcgctgagcttaaacctgatttaattattattaccggtcgtcaaggcgcttcttatgagaaactcacaaacattgcccccacgattaatttaggcgcaaatagtgcgaattatcttgattcagtggaagcgaatattcaattaataggtgaattatttgataagcaacaagctactcaagcacaattagcaacattgaataccgtgattgaacagactcagaaaaaagcggcaggatcagataaaaaagtgttggtcttactgcacaatgcaggcaatttaatgcccaataaccaaagcgtgatttacgatgtggttaaagcgaagaaagcagaattaccacctgttgctgaagaagagaaaggcaaacgtcgcgtggttacttctgaaatgatcgccaaagtaaatccggatgttatttttattatcgatcgcagtgaagccattggtgccggtaaattagagaaaaacacctttgaaaatgatgaagtgaaaacaacttctgcttataaaaatggtggtattgtttatctgcaatctgatctttggtatctctctggtggtggattagaaagtcttactcagcaaattgaagcggtgcaaagtgcactttaa

SEQ ID NO: 293551 - DNA, 1131 bp, Proteus mirabilis
atgcttaagttaccaccattaagtttgtatattcatattccttggtgtgtacaaaaatgcccttattgtgattttaattctcacaccttaaaaggcgaagttccacatcaggaatatgtgcaacatctgctcaatgatttagatgctgatcttactcatgttggctctcgtgaagtgcaaactatctttattggtggtggcacgccaagcctattaagtgctgaatcaatggctgatttactgtatggcgtaaaagagcgcatagccgttgctcctgatgctgaaattacgatggaagccaatcctggtacggttgaagctgaacgatttgccggttttcaacgggcgggaattaaccgtatatccattggtgtacaaagttttggtaatgataaactgatccgcttaggacgcattcatgatgccgatgaagctaaaaatgccgcgagactagcaaaagagttaggcttacgtagctttaatcttgatttaatgcatggcttacctgaccaatcattatctcaagcactctcagatctacagcaagcaatcgctttatctcccccacatctttcttggtatcaattaactattgaacccaatacacaatttggctcccgtccgcctaaattacctgatgatgatatgttgtgggatattttttctgaaggtgacaaattacttaccgcagcaggatatcaacaatatgaaacatcggcttattgtaagccaggttttcaatgtcaacataacctaaactattggcgttttggggattatttaggtattggctgtggtgctcatggaaaaataagttttgccgatggccgaattatgagaacggtaaaaaccaaacatcctaaaggttttatggcaggacgttatcttcaccagcaaaattgggttgataatgatgaccgtccatttgaattttttatgaaccgttttcggttattagaagcttttcctcggcaagattttagcgactacacggggcttgcacaagagactatccgtagacaaattgatgaggcactcgcattaggttatatcagtgaaacagaaacccattggcagataacgccccacggtaaactgtttcttaattcattacttgaactctttctttaa

SEQ ID NO: 293552 - DNA, 594 bp, Proteus mirabilis
atgcaaaaagtggttcttgctactggaaaccccggtaaagtaacagagttagcctcattactcgctgattttggtttagatattgtcgcacaaactgagctaggtgttggctcagttgaagaaacaggtcttacttttgtagaaaacgcactaattaaggcgcgtcatgctgccaaagtaacaggcttaccggctatagctgatgattcagggatctcggttgatgcattaggtggtgctccgggcatttactctgctcgttatgcgggtattgaggcaaccgatcagcaaaatgtagataaattactcgaagcaatgaaagatgttcccgcagagaaacgtcaagctcagtttaactgtgtgttagtttatctacgccatgaaaacgatcccactccgctaattttccatggtatttggcaaggtgtgttaactcaagaaatgcagggtgatggtggatttggttatgatcctattttctttatccctgagctaaattgcactgcggcacagttaaccagagagcaaaaaaatcaatactctcaccgtggtaaagcactaaaactaatgttggatgcacttaagaatgcttaa

SEQ ID NO: 293553 - DNA, 564 bp, Proteus mirabilis
atgaactttttaaatttcgtcattctgactcttattcaactctatatttccgtgctactacttcgtgtatggatgcaatgtgtaagagctgatttttataatccgttttcacaatttgtggttaaaattacccaacctgttgtgcgcccattaagaagaattatcccctctattggctctattgatactgcttcggtcatcttggcatatgttttagtgttattagaaattatcctcccttcttacttatccggagcaggtggtgctattccattttctttagtcctacccttcgcatttattgaattactcaccgcagcaggtaagattattttttggatgattatcatccgtgcaattctcagttgggtcagtcaaggacgtaatcctatcgatcatctgctcttccaattaactgagcctttaatggccccaattcgccgtgttattccggcaatgggaggattagatttctcagccatgattgttatcctgatcctttatgcccttaattatttacgtgtagatgttttacagtggctaatcaccatgacactttactaa

SEQ ID NO: 293554 - DNA, 819 bp, Proteus mirabilis
atggaacatcgcaatatcgcttttattggtgccggaaatatggcacacgctattattgcaggactggttaatggtggttatcccgcaaaaaatattacggtaagttcaccttcagaggttcgacgtgagcctttagaaaaagagtttgccatacagagtacttgcgacaacatcagtgctgttgaaaatgccgatgtcatcgtattagccgtcaaaccgcaaatgatggctgaagtttgtaagccattacaacatatcgattttggtcaaaaattagtgctaaccattgccgcgggtattccagcttctcgttataatgattatttagccacttcgctacgactgatccgcatcatgccaaataccccagcactggttggcaaagggttaagcggtatgtttgctcaaaacactattacccctgaagataaacaatttgctgatgcgttaatgaaaagtgtcggtacgacggtttgggtagagcaagaatcagctatcaatgatattatcgccgttgcgggtagtgcgcctgcttatttcttcttgtttatggaatctatgcaacaagaagccgagcgcttaggtttttcagccgacgtagcaagagctattgtacaacaagcagccagtggctctactgcattagctgaaaaacaaaatagcttacctttttcaacattacgtgaacaagtaacgtcaaaaggtggcacaacagctgcagcattggcacaattctatgcaggtaaattacctgagaatgttgctttagcgatgcaagcggcgattaaacgagcgcaagaaatggaaaaacagttttaa

SEQ ID NO: 293555 - DNA, 699 bp, Proteus mirabilis
atgaatactattaaacagaatctcgtcaatgtcaggtctcacattgacaccgcagcgcaaaaatgcggacgttctccagacgaaataactctacttgcagttagtaaaactaagcctgtgagcgatatcgaaaaagcaattgcatgtggacaaactgaatttggtgaaaactatgtgcaggaaggtgtagataaaatcagctattttgctgaaaacaaaaatttagtttggcactttattggcccattgcagtccaataaaacacgtcttgttgctgaacattttgcctggtgccataccatagatagattaaaaatagcgcaaagattaagtgatcaacgtccaactacgttaccgccactcaatgttttgatccaaataaatattagtgatgaaaacagtaaatcagggatctctcttaccgagcttgatggccttgctgcacaaatatccattctgccagggatcaaactgcgcggactaatggctattcctgccccagaaaatgactataacaagcaagtcgaggtactagaaaaaatgcatcaggcatttaaacagttacaaaatcagtaccccgatattgatacattgtcgatgggaatgactggtgatatggaagcagcaattgcctgtggctcaacactggtacgtattggaacggccatttttggcgctcgtgattacgccaataaataa

SEQ ID NO: 293556 - DNA, 1020 bp, Proteus mirabilis
atgaatatggaaaaattaattatatatagtgtaaagcataatgcttccgatctgcacctttgttgtggcgatgtgccacgattacggatcaatggcgtactttatcaacaaaatcaatgtaaacctattacttctgatacgctactcaaatggataacaccttatctgaccacagcgcaattgcaattttttggtaaggaggggcaagttgatacggcgataactcttgctgaggggcagcgcttacgagtgaatttatttcgccaacaattagggatatccgcagtactaagagtgataaattcacagctcccgacattaacatcactacgcgtaccaaaatcaatcactgcattattagataatgtttctaatggacttattttagtgacgggagcaacagggagtggtaaatcatccacattagcagcgatgattgattatctcaatcagcataagcgtcagcatattcttactttggaagcgccaatagagtttatttacaccaataagcaaagcattatccaacaacgtgaaatagggcgcgatgtacaaaatatagcgagtgcaataaaagccgcattacgtcaagatcccgatgtaattatgctaggggaattaagagatctagaaagtattaaaatggcattaattgcggctgaaacggggcatttagtactagcaacattacatacgcaaggcgttgttcaaacgttagagcgtgtcactaatgtattttcatccaatgaacgacaatggatctcggcacaattagctggaagcttaaaagcaattatttctcagcaattggttccagcaacacaaggcgggcgtgttgccctgtttgaagtgatgtatatgacgcaggggattgcacatctgatcagagaagggaaatatcatcaagtgacgacattaatgcaaactgggtttgaatatggcatgcaaaccttcactttaagtcgccaacaacgtcaatatgaaggtttgctcaatgagcacatcaatgaagaaaattaa

SEQ ID NO: 293557 - DNA, 420 bp, Proteus mirabilis
atgtcaaatagaacggtaatggggtttgattttggcaccaaaagtattggagccgcaataggtcaagaagttacagggacagcaaggccattagcctcctttaaagctaaagatggtattccagattggagtcaaatcgaaaaaatcattaaagactggcaaccggatttagtggtggtaggtttgcctcttaatatggacggcacagaacagctagtaactactcaagccaaaaaatttgccaatcgcttacatggacgttttggcgtacaaatcgccttacatgatgagcgccttagcacagtagaagcccgtgctcacctttttgaacaaggagggtatcgttctttagataaaggtagtgtcgatgcaacctctgccgttattattttagaaagctggtttgaacggcagtattaa

SEQ ID NO: 293558 - DNA, 564 bp, Proteus mirabilis
atgaatttactcaaccattttcttattgctatgccatcattaagcgatccgctctttcaacgctcggtcgtctatgtttgcgaacataatgaaaacggtgcaatgggtttagttattaataagccgattgaagatatctctattgaaagtgtcttagagcagttggagatattctcagtagatagagatagtgcgattagcttacaaaaaccagttatgtctggtggccctgtagcggaagagcatggttttatcttacacacccctgtttctggttttagctcaagtattaaaatcagcgatagcaccatgatcaccacatcaaaagatgtgctagaaacattaggcacagcaagacagcctgaaaaaaccttagtctcattaggatattccagttgggaaaaaggccagctcgagagagaaattttagaaaatagttggcttaccgttgaagcaaccccacaaatcatttttgataccccaattgcagagcgttggcataaagccgccgaactaattggtatcgatatccacacaatttcaccaacggctggtcatgcataa

SEQ ID NO: 293559 - DNA, 957 bp, Proteus mirabilis
atgattaaattaggtattgtgatggatcctatttcatccatcaaaattaaaaaagataccagctttgccatgttactcgaagcacagcgccgtggttgggaaatccattatatggaaatgaacgatctttatcttaatcaaggtgaagcccgtgctcacacacgtctgttaagtgtagaagaaaaccctgaaaagtggtttgaatttggtcaagagcaggatattgcgttaggctcccttgataccattttaatgcgtaaagatcccccattcgataccgaatttatctatgctacctatattcttgaacgtgctgaagatatggggactttaattgttaataaaccacaaagcttacgtgattgtaatgaaaaactgtttacagcatggttcccatcattaacgccaaacacattagtcactcgagaagccaaacaccttcgcgctttccatgaaaaacatggtgatgtgatttttaaaccacttgacggtatgggtggcgcctctattttccgcctgaaaaaagatgatccaaacgtcggtgttattatcgaaaccttaacagagcacggtcaccgtttctgtatggcacagaatttcttaccagaaattgttgatggtgataaacgtattctggtggttgatggagagccggttccttattgcttagcccgtatccctgccaaaggggaaacccgtggtaacttagctgcaggtggccgtggagaagcgcgcccattaacagaaagcgattgggcaattgcacgccaagtagcacctatcttaaaacaaaaaggccttatttttgttggattagatgttattggtgatcgtttaacggaaattaatgttacaagcccaacttgtgcacgtgagattgaagcagcttatcctgaggtttctattacaggtatgttaatggatgctattgaagctcgccttaacaagaaaaactaa

SEQ ID NO: 293560 - DNA, 732 bp, Proteus mirabilis
atgcgtattcctcgcatttatcatccagagccactcagtgcaggtacacaaacttcattagcagaagaagctgcaaatcacgttggacgagtattaagaatgtcaaaaggccaaaaactggcactttttgatggctccaatcaagtatttgatgctgatattatcgaaagcagcaaaaaatcagtgattgtgcagattaatgaaggacaaatagatgatagagaatccccacttgatctccatttaggccaagtactttcacgtggtgaaaaaatggagtttactatccaaaagtccgttgaattaggtgttaacactattactccgctgatctctgaacgttgtggtgttaaactagatcctagtcgtttagaaaaaaagcatcagcaatggcaaaaaattattatctcagcctgtgaacaatgtggcagaaataaaattccacagcttatgccggtgatgtcattagaggcgtggtgtgcccaaacggatgatagcttaaaacttaatttacaccctagagcaagccaaagtattaataccttgccacttccagttaaaaaagtacgactattaattggccctgaggggggattatcccctgaagaaattgccatgacagcaaaataccattttactgatattttattaggtcctcgtgtattaagaactgaaacaacagcactcaccgcaatcaccgctttgcaggttcggttcggcgatctgggataa

SEQ ID NO: 293561 - DNA, 633 bp, Proteus mirabilis
atgttattaccgcaaaacatcatgattacaatggccttttttacctttttaaaagggggtagcgattatttctctacctctgttttagcacgcctctcacctattcgttatcagcaattgtggcaagtctatttaattatctgtttttattggtcttttactatttctaattattcgttattaatattatttctattgtttagtttttacctcttaactctctcgtttttcgatgcagattatcttcagctacctgataacttaactttttggttacttttctttggaattacgcttaatttaacgccttatggcgtgatttcttcaacttgctctttttatggctgtttagtcgcaagcttgtttttttatagtatttattggctcggttattggatatatcaagagactattttggggttgggtgatgtaaagctttttagtgccataggcgcttggtgtggaacagaactactaccttatatcctctttttcgctgcactattagggattgttatttatatgcttatttgggcttttactaatgtgaagataaagcagattgcctttggctcttgccttgcattttcagcgatagttgttttaagagtaaagacaataataatgtattga

SEQ ID NO: 293562 - DNA, 666 bp, Proteus mirabilis
atggcctcagtaagccatgtgaaccaagaaaatagcaccaaaaagctgcactatatttacgatccactttgtgggtggtgctacggcattgccccacttattgaagtagtgagtcacgaatacccacatgtactaacactacatggtgggggattatttaccccgacaagaaaagtgacagggggcgatgcatggaaagagcatgttacccctatcgatgaacgtattagccagttatcgggacaaatttttagccagcaataccgtgataacctcgccaatacagagatgacattaaactcactgatgccaattgcagcgatattggtagcaagaaaaatgggcgatagagatgtcatgttattaaaagcgttacaagatgcctattatcttgatggattaaatattagtgataaagatgtgctattttttatcgtacaaaaactcgggtttgatatcacccttttttcgacgctatttacgcaagtaaatgagtatgaaataactcaacatatacagcaaactcaacaattaatgcatcaagtaaatggtcgtggtttcccaacgctatgtattgaagataaccaaacctaccagttgatcccagtagagaattattttggcgatacaaaaagttggacttcttttctaaaacaaacgctgtaa

SEQ ID NO: 293563 - DNA, 873 bp, Proteus mirabilis
atgaaaaaattacttcctttaacacttgcaactactgcgtttttcgccacttctgttatggcaacagagttaacattagatatctacaatcccggtgatgccagtgtattccctgtttcatctgaaatcatttatggtgataaagatgctgtcttaatcgatgctcaattccaaaaaaatgatgctcaagccttagtcgataaaattaaagcatcagggaaaaacttaacttatatctatatcagccattctgatcccgatttttattttgggttagatgtcattactgaagcatttccaaatgctaaagtgattgcctcagctcccaccgtcaaaatcattaatgaaacccaagcaggaaaacttgcctactgggggcctgtcctcaaagacaatgcccctaaaaaagttatcattcctgaagtcgttactggtgatagtttttctcttgaaggtgaaaaactctatatcaaaggattagatagccaatctccagaaagaacctatgtttatgtgccaaaactgaatgctattatgggtggggtaatactgtctgaaaatattcatgtgtggctagcagatactcaatctaaagcacaacgccaatattggctagaagcgttacaacagattaaaacgttatcacctaaaacggttattccgggacattatgttccaaaaagtaattatgatatgcgttctgttgatttcacaatgaattaccttaaagaggcagaaactaaactcgctgaaactcaaaactcagaacaatttattgcggcgatggaaaaaagttatcctgacttagcagataaatcgagtttagagcttagcgcaaaagtccttaaaggagagatgaaatggcctcagtaa

SEQ ID NO: 293564 - DNA, 921 bp, Proteus mirabilis
atggacaaaattaaagcatcagaggtttttgtgaccatcgttaagcaaggtagcatgattaaagctgctgattatctaggtatgtctagagcaatggtgacgcgctatcttaatgaaatggaggagtgggctggggtgcgtttgttgcatagaacaacccgtaagcagagtctgacttccgtgggagaattagtttatcaacaaagtttacaactgctagagatggcggagcgtattcccgcgaatattcccaaagagagtcaccaaatcagtgggctggtgcgtattacaacggcacaatcactcgctaattgtgcattatctgtggctataactgaatttatacaactttatcctcttattgcagtcgatttgcagatatctaatcagacagtcaatcttattgaagagcgtattgatattgcattgcgtattaccaaccatttagagcctaatctgatagcccgccctttagcaaaatgtctttctgtggtttgtgctcataaagattatttagctaaacatggtatccctaacacgccggatgatttgacttatcatcaatgtctcacatatcgcttttttggcagtagcttatgggagtttagtttaggtgatgagcgttattctgttcctgtaggtggtaatttaagtgccaatgagtctgttgtgttattgcaagccactttgcaaggtgccggagtctccttacaaccttactgctcggcaaaaccctatcttgaacggggtgagttagaaattttgttagcggattatcagccacagcctatgggaatttatgccgtgttagcgagccgacaaaatatgcccgcagccgtgcgtgttttactggattttctggttgactggtttgcctcttcgcctcattggttgtcattatcgggtgaacgcgtgagttaa

SEQ ID NO: 293565 - DNA, 927 bp, Proteus mirabilis
atgaaaactccatttagttggcgacatattgaaatttttcatgcagtgatgaccacacaaaacctaaccgaagcggcagatttactgaaaacgtctcaacccacagtcagtcgcgaactatcacgtcttgaacagctattgtcatttaagctatttgatagaattaaaggtcgcctacaacctaccacggagggattaagattttttgaagaggtacagcgctcttattatggacttgaccgcattattaccgcagccaatagtattcgccattttcatcaagcggaattaaatatcacctgtttaccggcatttgctcaatcactattaccctcaatttgccaacaatttctcagccaatatcccgaggttaatttaacgatagtgccacaggagtctcctttattagaggagtggttatctgcacaacattatgacttagggctaacagagcacacacaaacacctgccggaacccaacaagaaacactgctaacgttaaatgaagtcgctattttgccaaagtctcatgtattaagtaaaaaagcattactgcagccacaagactttcatcaaactcgttttatcagcttatctgctaatgatagttatcgacaacttattgatgctatgtttattaaacaggggatcactcgacaattgatcatggaaacacaaagtgcggcctcaatttgtgccatggtgagtaaaggcattggtgtttctatcgttaaccctattactgcccttgattatcaatatagtgatctctgtatacggccactgagttttaccattccatttacggtgagtttgatcacaccatctcatcgcccctcatcacaacttgtgcgctattttattgatgtgatgaaaaccactttagccaattatccaaaacaattaactcacgcgttcacccgataa

SEQ ID NO: 293566 - DNA, 1245 bp, Proteus mirabilis
atgatgacaacatccaacaatgcgatcctatctcaattagcacaaacttatggcacgccattatggatctatcaaggtgagactatttctgaacatattgagcaattaaaagcctttgatgtggttcgttttgcacaaaaagcctgctctaacattcatattttacggttaatgaaacagcagggcgttaaagttgattctgtctcactaggtgaaattgagcgggcgttggttgccggtttccaaggtggtcgagagcgtagtgaaattgtctttaccgccgatttactcgatgaaaaaacgattgaacgtgtggttgaattagatattccggttaatgcaggttctattgatatgcttcgccaacttggagaacgtcatcaagggcacgcggtgtggataagaataaatcctgggtttggtcatggacatagccaaaagaccaatacaggtggggaaaatagcaaacatggtatttggtatgaagatgtgccagaagcattagcggtgattaatcaatacaatttgaatttggttggtttccatatgcatattggctcaggggttgattatcagcatttagcgagtgtctgtgatgcaatggttgagcaagtactcacctctaatgttgatattaaagccatctcggccggtgggggattgtcaacaccttatcagcaaggagataaaagagtcgatttaaaccactatttctctttatgggatagtgctcgtcaacgtatagcgcaacaccttgggcatgatattgaactggaaattgaaccaggacgctttttagtggctgagtctggcgtgttagtgtcacaagtaagggcggttaagtcgatgggaaatcgtcattatgtgctggtggatgcagggtttagtgatttaatgcgcccagctatgtatggtagttaccatcaaatcacattattagataaatacggccaattaaaatctagcgagtttcaacaagaaaccatagttgcggggcctctttgtgaatctggtgatgtgtttacccagcaagaaggaggaatggttgctcctcgtttattacctccggcagaagttggtgattacttagttattcatgatacgggggcttatggtgcatcaatgtcatctaactataatagtcgtccccttattcctgaagtgttaatttcacagggcatacctcaattaattagacgtcgtcaaaccattgaagagctattagcgctagaaattaacctgtaa

SEQ ID NO: 293567 - DNA, 2448 bp, Proteus mirabilis
atgaccctactcagtattgtgcttttcttagttctcatcggtatacttagttaccgaaaatacagccttgtagtaagcagtatcttacttattgcttatactttcgtgatgggtttagccaatatctggagctactggctattactgcccgttgcattgatattattaccattcactcttccttctattcgcaaagcatatatctcagcccctgcactaaaggctttccaaaaagtgatgccatctatgtctaagacagagcaagaggccattgatgcgggaacaacatggtgggaaggtgaattattccgtggagcaccagattggaaacaacttcacaattatcctaagccacaacttaccgctgaagaacaagcttttctggatggtccagttgaagaagtttgtcgcatgaccaatgatttccaaatcacacatgaactagctgatttacctcctgagatttggcaatatttaaaagaccatcgtttctttgcgatgattatcaaaaaagagtatggcggattagagttttctgcctatgcacaatctcgtgtactgcaaaagctcgcgggtgtttctggtattctcgccatcactgtaggtgtacctaattcattaggtccaggtgagttattgcaacattatggtactgatgagcagaaaaaacgttacttacctggtttagccaaaggtgatgaaattccatgctttgcattaaccagccctgaagcaggctctgatgctggcgctatccccgatagtggtgtggtttgtatgggggagtggcaaggtgagcaagtccttggtattcgtctcacatggaataaacgctatattactttagcacctatagccacagtattagggctagcttttaaacttcgcgatccagaccatctactgagtgatgatgaaaaccccggtattacttgtgctttaattccaaccgacgtaaaaggggtagaaattggtcatcgccatttcccactcaatgttccttttatgaatggtcccactcgtggtaaagatgttttcgttcctatcgattttattatcggtggtccaaaaatggcaggccaaggttggagaatgctggtggaatgtctttcagtcggtcgtggtatcacactgccatctaactccactggaggcttaaaaagtgcagcaatggcaacaggtgcttactctcgaattcgtcgtcaatttaagcttcctatcgggaagatggaaggaattgaagagccattagcgcgccttgctggtaatgcttatctcttggacgcagcttcaaccttaattaccacaggtattatgttaggagaaaagcctgccgtactttctgcaatcgtaaaatatcattgtacccatagagcgcaacgcgggattattgatgcaatggatattgttggtggaaaagggatttgtcttggcccttctaactttgtggctcgctcttatcaaggctcccccatcgccattacagtggaaggcgctaatattctcactcgtagcatgatcatttatggacaaggggctattcgttgccacccttatgttttagatgaaattgcagcggctagagataacaacttacacgactttgatcatgccttatttggtcacttaggccatgttgccagtaatacattacgtagcctttggttaggtatcactaatggtcgcttaagtaccgcgccaacaaaagatgaaactcgtcgttattaccaacaaattaaccggctcagtgccaacatggcgttactttctgatgttgccatgggggttttaggtggtagtttaaaacgtcgtgaacgtatttctgcaagacttggcgatattttaagtcatattttcctcgcctctgcggtgctaaaacgttatgaggatgaaggtcgtaataccgctgatttaccactggtacactggggtattaaagagtgtttataccaagcagaaaatgccattgatgagctattacgcaatttcccaaatcgttttgttgcaggagctctgcgcgccattattttccctctgggtaaagtgcagaaactgccttcagataagttagatagtaaagtggctcaaattatccaacaaccttctgaaacccgtgatcgtattggtaaaggacaattcctcacacccagtgagcacaatcctcatggtttaatggaagaagctctgctcgatattttagccgcagagccactgtttgaacgtatctgtcgactctatgaaaagaaatttagcttcactcaattagataaattagcggataaagccttagccgataaacgagtgactcccgaagaagctgatatcttacgcaaagcggagcaaagccgtttacgtagtattaatgtggatgaatttgactttgatgccttggcggtgccggcaaaaaagtcgtcaactgatacaataaaaacagataaagcagcctaa

SEQ ID NO: 293568 - DNA, 579 bp, Proteus mirabilis
atgtaccaagatcttattcgtggcgaattaactgaagcggcagatacactctctcgttttttacaagatgatgcgaatattgaagccattcaaaaagcagctgtattattagcagactcatttaaagcaggcggcaaagttttatcctgtggtaatggggggtcacactgtgatgccatgcattttgcagaagaattaacggggcgctatcgtgaaaatagacccggttatcctgctatcgcaatttctgatgtgagccatatttcttgtgtgagtaacgactttggttatgaatatgttttttcacgttatgtggaagcggtaggtaaagagggtgacgtattactggggatctcaacttccggtaattcaggcaatattattaaagccattagtgccgctcgtgaaaaaggtatgaaagttattactctaacaggtaaagatggcggaaaaatggcggggagcgcagatattgaaattcgtgtccctcattttggttatgccgaccgtattcaagaaatccatatcaaagttattcatattctgatccagctgattgaaaaagaaatggaaaaataa

SEQ ID NO: 293569 - DNA, 768 bp, Proteus mirabilis
atgtgtgaattgttgggcatgagtgcaaatgtacccactgatatcaattttagtttaagtggcctcattcctcgtggtggtaaaactggccctcataaagacggctggggtatcaccttttatgaaggattaggatgtcgtacatttaaagatccacaagctagtgccgtttcacccgtcgctcgttttgtacaagaataccccattaaatcacatgctgtcattgcgcatattcgccaagctaatcgaggtaatgtcagtttagaaaatacgcatccttttacccgtgaactgtggggtaaaaattggacttatgctcataatggacaacttaaaggttatcaatcactggatacagggcgttttagagcggtaggacagactgatagtgaaaaagccttttgctggatattaaatcagcttgaaaagcgttaccagagaacaccatctaattggccggcggtctttcgtttcattgctattttagctgatcaattgcggcaaaaaggtgtgtttaatatgttgttatccgatggccggtttgttatggcatattgttcaactaatttacactggataacccgtaaagctccttttggtaaggccaaattgctggatcaagatattgaaattgattttcagcaacacactaaagcggatgatattgtgtcggtaatatcgacattacccttaacaggtaatgaatcttggcaaaaaatccctgttggtgagtttgttttatttgatcgtgggttgcgaattttgtaa

SEQ ID NO: 293570 - DNA, 753 bp, Proteus mirabilis
atgaccagtcacgcaaaacaattaatcatatttttaacaataatattaacctcattatttgttaatgccgaaaatagttcaaaatttcttatcaaacctgttaaaaaaagtacaggagagcccatctatattcaaatatttaaagaagaaaacttactagaactgtatatagaaaaacaggatggacaattagagaaaatacgtacttatcccatttgtagctattcgggaggattaggtccgaagaaatatcaaggtgatttaaaaagtcccgaaggcttttatcaagttaatcaaactcagcttaacccaaatagtcggttttatcgagcaattaacctaggatttcctaatcaatacgatcaagagcaaggttataccggtgatttcttgatgatccacggtgcttgtaaatcagtgggttgctatgcaatgaccgatactgtgatggatgaaatctaccaatatgccgaacttgcgctgaaaaatggccaacagagcattaatattcatattttcccttttaaaatgacggacgaaaatatgaaaaaattccaatactctgccaatatggatttttggcaacagttagcacctgcttaccaatatgtggaagaatacaaaaagatcccagcaattagtgtaaaaaacggtcgctatttggtgaataatcgtgaggctatttccacattaaatttagctaaaagtatcgatagtaaatggttacaaaattcgcaacccacgatcaaataa

SEQ ID NO: 293571 - DNA, 1341 bp, Proteus mirabilis
atgattaaaattaaaaaaggactcgacctcccaattgcaggagcgcctgcccaagtgatagaagacggacccgcgattcgacacgtagctttgctaggtgaagaatatgtcggaatgcgtccttctatgatggtttcggaaggtgagcatgttaaaaaagggcaggttctttttgaagataaaaagaaccccggtgtaatattcacaagccctgcgtgtggtaaagttgttgccattaaccgcggtgagcgccgtgtacttcaatccgttgttattgaagttgacggcgatgaagaagtcactttcgacagttatgatagctcatcactttcagaattgacccgtgaacaggtagaaacaaacctagtaaattcaggtttatggacagcgttaagaacacgtccatacagtcgttcccctaaattaggaaccacgccggtggcaatttttgtcactgcgatggatactaatccattagcggcagatcctactgtgatcattgaacaaaacgagcaggcttttaacgatggtctgattgttttaagtaaattaacagagggtaaggtgcatgtttgtcatggtgaaaaagcaccggcaaaactcaatgatggacaaattagctataaccaatttgttggccctcatcctgcgggattagtgggtactcatatccatttcttagagccagtcagcgcgaaaaaaatggtatggcatcttaactaccaagatgttattgcgatagggtatctctttactacaggctctttatataccgagcgtgttgttgcattagcgggacctcaagttaaagcccctcgattattacgtacctgtttaggtgctgatctttatgaattaacgaaagatcaattagtcgatggtgataatcgtattatttctggctctattttatggggttggaaatcggacgaagcgcatcactatttaggccgttttcataaccaagtctctgtattacgcgaaggtcgtgaaaaagagttatttggttggggttatccaggtactaataaattctccattacacgtaccacaattggtcacttcttaaagaacaaacgttttgcatttacaaccacaatgaatggtggtgaacgttcaatggtgccaattggtaactatgagcgtgttatgccattagacattatggcaacacatttgttacgtgatttgattgtcggtgatactgacagtgctcaagcattaggttgtttggaattggacgaagaagatttgggactatgcacttatgtttgtccaagcaaatatgagtatggcccagcactgcgccaagtattgaccaaaattgagcaggaagggtaa

SEQ ID NO: 293572 - DNA, 1239 bp, Proteus mirabilis
atggggttgaaaaatttatttgaaaaagtagagcaccattttgagcccggtggtaaatacgccaagtggtatgtactctatgaagcggtcacaacggttttttatacgccgggtacggtgacacgtaatggttcgcatgtacgcgataccatcgatctaaaacgtatgatgatccttgtttggttatctgttttcccagcgatgttctggggaatgtataacgttggtcaacaagcgatccctgctcttaatcagttgtatagtggtgctgagttacagcaagtgattgcttctgattggcactatgcacttgcacagtatttaggtgcatcattgacaccagatgctgggtggggaagtaaaatgctccttggggcaacttactttttacctatctatcttgttgtatttgcggtaggtggtttctgggaagtgttattttcccttattcgcggacatgaaattaacgaaggtttctttgttacttctattctgtttgcgttaattgtgccgcccacattaccattatggcaggctgctttaggtatcacctttggtgtcgtaattgcaaaagagatttttggtggaacaggacgtaacttcttaaaccccgcattagcagggcgtgctttcctcttctttgcttatccggcacaaatttcaggtgatcttgtttggactgccgctgatggtttctctggtgcaactcctctctctcaatggtctgtttctggtcaaagtgcattgttaaataatgtcactcagcagcctatttcttggatggatgcattccttggaaatatccctggttctattggtgaagtctcaacactgatgatcctaattggcggcgcaatcattttatttgctcgtatcgcatcatggcgcattgttgccggtgtgatggtgggtatgattgcaatgtcatatctgtttaacttgattggttctgactctaatccattattctcaatgccttggcactggcacctcgtattaggtggctttgcatttggtatgatgtttatggcaaccgatccggtatcagcttcattcactgataaaggcaaatgggcttacggtattttaattggcgtaatggctgtgctaatccgtgtcgtcaatccggcttacccagaaggaatgatgctagcaatcttattcgccaacttatttgcaccgctgtttgactatgtggttgttcaggcgaatattaagcggagaaaagctcgtggctaa

SEQ ID NO: 293573 - DNA, 786 bp, Proteus mirabilis
gtggctaaagaaaaaaacaaagatagcgtcggaagaacgttcctcgttgtatttattctatgtcttgtttgttccgtggtagtggctggctctgctgttggacttaaatctaagcaagaagagcaaaagctactggataaacaacgtaatattctagatgttgctggtttattggtgcctaaaatgagcgccagtgaagtactcaaagtttacgatacacgcattaaagctaagattgtaaacttcaaaactggcgaattgacagacagtaaaggcgactttgatttaaatagcgaactacgtagcgatgaaacttctatcgcactatcacctgaagaagatattgcaaaaattcgtcgtcgcgccaataccgcagaagtttactttgttcttgatgatcaaggtaaaacccaagaagtggtactgcccgtctatggttcaggcctatggtcggtcatgtatgcctttgttgcggtagatattgatggtgtaacagcgaaggggattacctattattctcatggtgaaacgccggggctaggtggagaagttgataatccgcaatggaaggctcagtggaaaggtaaacgcttactgaatgaagaaggtgtgcctgctattaaaatcgtacgtggcggggcatcagatagtccttatggtattgatggcctttcaggtgcaaccttaacctctaacggcgttcaacatatgttcgatttttggttaggtgataaaggtttcggcccattcctgaaaaaagttcgtgaaggagagatcaatggctga

SEQ ID NO: 293574 - DNA, 630 bp, Proteus mirabilis
atggctgatacaaaagagatcaaacgcgttttactcgggccgttgttagataataacccgattgccttacaggtattaggggtctgttctgcattagcagtaacaaccaagcttgagacggcattagtaatgaccattgcggtaacattagtgacggcattctcaaacttctttatttcactgatccgcaactatatccccagcagtgtacgtattattgtgcaaatggcgatcattgcttcattagtaatcgtggtagaccaagttttacaagcgtacgcttatgaaatatctaaacagctttctgttttcgttggtcttatcattactaactgtatcgtgatgggacgcgctgaagcctatgcgatgaagtcaccacctatcgaaagctttatggatggtatcggtaatggcctaggatatggggttatcttgatccttgttggatttttacgtgagctatttggttcaggtaaattatttggcattacggtgatggaatctatccaaaacggcggttggtatcaacctaatggcttattcctattagcgccaagtgctttctttattattggcttgctaatttggggattacgtacattaaaacctgcacaggttgaagaggactaa

SEQ ID NO: 293575 - DNA, 1227 bp, Proteus mirabilis
atggatataattattctaggtgttgcgatgtttaccctgattgtattggtgctaactgcattgattttgtttgcaaaatcaaagttagtcaatacaggggatattgaagttgaggtgaatggagatcctgaaaaaagtttccatgcgccagccggtgataaattactcaacgtattatcaaacgaaggtatttttatctcatctgcatgtggtggtggtggctcttgtggtcaatgccgcgtaaaagtacttgaaggtggtggagatattcttcctactgagctttctcatattaataagcgcgaagctaaagaaggttgccgtttagcttgtcaggttaacgttaaaaataatctgaaattagagctacccgaagagatcttcgggattaaaaaatgggaatgtgaagttatctcaaatgataacaaagccacgtttatcaaagagttggtattaaaaattcctgaaggtgaagtggtacctttccgtgctgggggctttattcagattgaatgtcctcctcacactgtgcgctatgaagattttgatgttcctgaagagtatcgtgaagattgggataaatttaatttattccgctatgtttctgaagttaaagagaccacagtgcgtgcatactccatggcgaactaccctgaagagcatggcattatcatgttaaacgtgcgtattgcgacaccgccaccacgtaatcctgatgtgccaccgggaattatgtcatcttatatctggtcattaaaaccgggtgataaagtgacaatttcagggccgtttggtgaattcttcgcgaaagaaactgatgcggaaatgatcttcattggtggtggtgctggtatggcaccaatgcgttcacatatttttgatcagctaaaacgcttacattctaaacgtaaaattagcttctggtatggtgctcgttctgtgcgtgaaatgttctatacagaagattttgatatgctggctaaagagaatgaaaactttacttggcatgttgcgctgtcagatgcattaccggaagataattggacgggttacaccggctttattcacaatgtgctctatgaaaactaccttaaagatcatccagcaccagaagattgtgaattctatatgtgtggaccaccagtgatgaatgctgcggtgatcaaaatgcttaaagatttaggcgtagaagatgaaaatattatgctggatgactttggtggttga

SEQ ID NO: 293576 - DNA, 2040 bp, Proteus mirabilis
gtgaataacactgctataaataccgcctctttaagttggaatgaacttggtactccgatttcaaaacagtttgatgacatctatttttccaaccaagatggtcttgaagaaactcgacatgtattcctacatggaaatcattttccatctcgttttggtacacatgtacgctctgagtgtgttatagcagaaaccggatttggcacaggattaaactttttaacactgtggcaagccttcgagcaatttcgtcatcactcacctgatgcgtcattaaaacgtttacattatgtcagttttgaaaaatttcctctgactaaagctgatttgcaaacagcccatagccattggccagaactagcacaatattcaacagcgctttgtgcacagtggcctttacctattgccggttgtcatcgtcttattcttgctaatggcgcgataacgcttgatttatggttcggtgatatcaatacattactgccacaaactcgccaagctttacataataaagttgatgcgtggtttcttgacggctttgcaccaagtaaaaacccacaaatgtggagtgaaacattatttcaagcaatggcagactcgatgcgtgaaaatggcacttttgccacctttaccgcagctgggatagtaaaacgaggattgcaacatgttggttttgaaataaagaaaataaaaggctttggtcaaaaaagagaaatgttaacaggggtatttccccatcctcctgccaatgcatttgttccctactatgccagaccttgtgctacacaaacaaaagatatcgccattatcggtggggggatcgccagtgcattaactgcgctcgcctgcttaaaaagaggcgccaaagtcacgctctattgtgaagatacacatcctgcggcaaatgcctcaggcaatcggcaaggtgtgttatatccattacttaatggtaaatctgatgagttagaacactttttcactaacgcttttttatatgcccgccgttattatgatgagttaaaccataaaggcgtaaacttttcacatcaatggtctggtgttgcccaagttatctataatgaaaaagtacgcaaaaaaatagcgcgaataatcgagcattccacacctttttctcaactcgctcattatgttcatcaagatgaaatgaattcactttgtggattagctatcaaccaagatggtcttttttatcctcaagcaggttggctttctcccacagagttaaccaccaatgcattaaaatacgctcaacaacaaggtctcaagctactctttgaacatcaagtcactcaattaacctcacaacaacagcattggcagttagaggtgactcaccaagcaacaacgtataaaacacaacatgattgtgttattttagctaatgggcaccgtattactgattttatacaaagtgaaaaactgcctatcagtgcagtaaggggtcaagttagccatatttcaacgacacctgatatcgcacaattaaaagcggtgctctgctatgatggctattttacgccggttgatcctcaagataatctgcattgtgttggggcaagctttcgtcgtgatcgactagatttaaatgtttcaattgaagagcaacaaaataatcaatggcatctcacacactgtttagcacaatcaccttgggcacagcaggtagattttagtgataacgatgcgcgtgtcgggatccgctgtacaataagagatcaccttcctttattaggtgaagtacccgattttgaaaaattagttgtcgcctatacgcatttagatcgatttaagcgtagaaagcaaacacctattttggcgccgagttatcatcagctttatattattagtgcattaggttcacgtggtttatgctctgcacctttatctgcggagatcttagcaagccaaatctttgatgagccatttcctgtagaagatagtgtgttaaatgccttacatcctaatcgtttctgggtaagaccattactgcgcggaaaagccattgaattaaaatcatag

SEQ ID NO: 293577 - DNA, 1212 bp, Proteus mirabilis
atgaagcgcgcagtgatcacgggtctgggtattgtttcgagcattggtaataaccagcaagaagtgctggactctttaaaagaaggccgttccgggataactttctcagaagaatttaaagagatggggctacgtagccacatttggggtaatgttaagcttgatactgaaggtcttattgaccgtaaaatccgccgttttatgagtgatgcatcggtttatgcctatttatctatgcaacaagcgattgaagattcaggtctaacagaagatcaagtttctaacattcgttctggtttagttgtcggctccggtggtggttctcctcgtaaccaagtacaaggttcggacggcatgagagctaaaggtctacgcggtgtaggtccttatatggtaactcgtgcaatggcgtctggtgtatcagcttgtttagctacaccgtttaaaattaaaggcgttaactattcaattagttcagcttgctcaacatcagcacactgtattggtcatgcggttgaattaattcaattaggtaaacaagatgtggttttcgccggtggtggtgaagagctaagttgggagatgacctgtgagtttgatgctatgggggcactttcaacaaaatataatgatacaccagccaaagcttctcgtacctatgataaaaaccgtgatggtttcgttatcgctggtggtggcggtattgtggttgttgaagaattagagcacgcattagcacgtggtgcgcatatctacgctgaaattgtcggctatggtgcaacatctgatggtgctgacatggttgctccatcgggagaaggtgccgtacgttgtatgcaaatggcaatgcaaggtattgatcatgttgattatatcaatactcatggtacatcgacgcctgtgggtgatttaaaagagcttgaagcgattgctgaagtttttggaactaaaacaccggctatttctgcaactaaggcaatgacaggtcactcattaggggctgcaggtgttcatgaagccatttacagtctactgatgttagagcatggttttatcgcaccaagtattaatattgaagagcttgatgataaagcggatggtatgaatatcattaccaaaccaacagagcaaaaactagatacagtgatgtcaaatagctttggtttcggtggcactaatgcttcacttgtgatgagtaagtataagaaatag

SEQ ID NO: 293578 - DNA, 921 bp, Proteus mirabilis
atgaaaagtataatcttcccgctgttagcggtacttatttggtcaattaatgcggttgtcaataaagcggcaacatctgtgatagatccagccgctatctcattttatcgctggttcttagcatttttactgatgacgccgtttctattagtccctgtttggcatcatcgtaaaaccgtaaaacaatattggtggaaattatttattctcggcgcattaggtatggggttatatcaaagtttagcttactatgcggcttattatgtgacagcaacctttatgggaatattgaattcacttattccattattaaccgttattattagtatttttgtactgcgtgtcgtgcctactgtagggattgcactcggaactattttatctattagtggacttgtctggttagtcagccacggtgatccttcacaactcctttctcaaggattaggacgtggtgaattaatgatgtttatcgcatcaactgcctatgcattttacggagtacttaccaaacgttggtcaattcctttacctaattggcagtctctatatgtacaaataggttttggtgttttattactaatacctaattttcttaccgcagaaagtattgcattaacaaaagataatgttggattagttatttttgcaggggttggcgcctctattttagcgccttatctgtggatcttaggtgtaatgaaattaggtgcaaatacaacctctatctttatgaatttaattcctctatttaccgcaatgatcgctgtagcggtgctaggtgaagagatgcacagttatcattttattggtggaggcgttattttattgggaatattcttagtacaaaaactaagagcaccactgaatttccgtcgtcaatctgtcacaaaaaaagcagattgtcagcaggagatgtga

SEQ ID NO: 293579 - DNA, 786 bp, Proteus mirabilis
atgacaattgaacaacaaaaagagatgcagtggttactctctgatccagatacggtccgttttcgtgatgagcaattgcttgcagaaactgaatttcgttatcatcaacatgagtttggtcaattgctttatgtgatctctggagtaatggatttagaagctggcgggcagcgttttttagcgccacctgaatttagtgtatggatccctgaaaaagtagggcacgcaagctacaataaaaaaaccttatcttttaaggtgctagatattgcacccagttggtgtgaaggtttattggataaaccctgtcttattcaactaagtcctattttttcgacgatttttgccgatttcttccgtcgtggtgtttgtaaaccgcaaacaaaagaagatctacgtttatctcaagtgttaatagaccaactaaaagtatctcctattcaccatacctatttaccttcctcaaaagataagctgttagcacccgttttggcagcattagagcaaaatcctgctgataatacctcattagaattatgggcaaaaaaacgttatacctcagaaagaaccttatcacgtcgttgtcagcaagagttaggcatgtcttttagtgaatggcgtaagcgattacgttttttacatgctatctctttgttagaacaaggaaaaagtgttaatgatgtggcctttgatgttggatatagctcatcctcctcatttattgccatgtttcagcaatttgctggaacaacaccagaaagatttcgtcgcttacccaatggttaa

SEQ ID NO: 293580 - DNA, 1128 bp, Proteus mirabilis
gtgaaaattctggttgatgaaaacatgccttatgcgcagcagcttttttgccaattaggtgaagtaaaagctgtaccgggtcgccctttacctattgaagagcttgatgatactgatgcattgatggtgagatcgattactaaagtcaatgcatcactattagcgggcaaaccggtaaaatttgtcggcaccgcaacggcaggttttgatcatgttgatacagcatggctagagcaacaaaaaatagcgttttcatctgcgccaggttgtaatgcgatcgctgttgttgaatatgtcttctctgcgttgatggtgtttgctgagcaagaaggatttcaattaacagataaaaccgttggcattgttggcgttggcaatgttggagggagactggcaaaacgcttacgcgcattaggtgtgaatgtactactttgtgatccgcctagagctgatagaggggatgatgaacaatttcattctttagaaacgctattaaagcaggcggatatcctgactttccatacaccgctaaataaatcgggtcgttataacagttaccatttaattaatgagagcaacctcgatattttacctgaaggtcgtattttaattaatgcaagccgtggcgaggttattgataatgctgcattattatcagccttaaaccaaggtaaaaagttacgcgttgttctagatgtttgggagccagaacccgatctttctcttgagttattaaataaagttgatatcgcaacaccacatattgccggctataccttagaagggaaggcgagaggaacaacgcaggtttatgaagcttattgtgattttattggtcaacctcaacacgttgaattatcaacactgttaccaaaaccgttgatctccacaatttctgtacaaggtgaattaactcaaacattactcaaacagcttattcatcttgtctatgatgtacgtcgtgatgatgcaccattgcgcaaagttgccggtatcaaaggggagtttgataagctacgtaagttttaccctgtccgtcgtgaatggtcttcattacaggtggtatgtgataacccgacaacggcgagcttactcaatgctattgggtttaatgcaacacataaataa

SEQ ID NO: 293581 - DNA, 1011 bp, Proteus mirabilis
atgggagagggttggaatattgcgcttgtgggcgcaacaggtgctgtgggtgaagctattttagagcttctgcaagagcgtgattttcctattggcgaattaacggcgatcgccagtgaagacagtattggcaaaactatccgagtaaagggtaaaagtgttgcagtacaaggtattcataatatcgaatgggcggatattcaactcgctttttttgccgcgccggttgagattagtgcgcaatacgcacaacttgcagcagattcaggttgtattgttattgattgcagtggtttatttgcgatggagtgggatgtacctttagttgtaccaggggtgaatacatctatgctggcagagtatcgtaaccgcaatattatcgctattgctgatagcatggtaagccaactgttacgcgctatctatccattaaccgaagccgcaggcttaactcgcttgaatgtgacaaatttgatgtcagtatctcgttttggtaaacaagctgttgatgaattagcggggcaaagtgcgcgtttactgaacggtgttcctccagagcttggtcgctttaataaacaactggcatttaatattttaccattgttagttgataatgaaggctctattcaagaagagcgccaaatggttgatcagatccgtaaaatcttgcaagacgatggactacctatctcagtgaccacattacaagcgcctgttttctatggtcatgcacaatctgtgcagttggaaacatcacgtccaatgggaagtgaagaagcacgggaaacattgcaagaacatgactccctcaatattagtgatgaaaatgattttccaactcaagtcaccgatgcctccggtaatgttagcttgaacttaggttgcttacgtaatgattatggtgtgcctgaagcgttacaattttggtctgttgcagataacgtgcgttttggcggagcattaatggctgtagaagtggctgaaaaattagtgcaggagcagttttactga

SEQ ID NO: 293582 - DNA, 870 bp, Proteus mirabilis
atgaacgaccaagagagtgctgatgtgatagcgcaatcaatcagtgagcctgcgattgcgacagaaagcacaccattaaagatagcgctaggcattgaatatgacggtagccactattatggctggcaacgtcaaaatgaggttcgtagtgtccaagaaaggttagaaaaagcgttatctcaagtagcaaatgagcctatctctgttttttgtgccggcagaactgatgccggagttcatgcaaccgggcaggttgtgcactttgagacaacggctcatcgcaaagatgcggcatggacgatgggggttaatacccatttaccacaagatattgccgttcgttgggtaaaaacggtagcgaatgattttcatgctcgatttagcgcaaccgcaagacgttatcgttatgtgatttttaatcatcgctatcgtcctgcaattttatcctcaggggtaacgcatttccattaccctctagatgcacaacgaatgcatcaagctgcccaatgtttattgggcgagaatgattttacctcgtttagagccgtacaatgccaatctagaacaccttggcgtaatgtgatgcatgtgaatgtttcacgctatggtgattatgtggtggtagatataaaagccaatgcttttgtccatcatatggtaagaaatattgtggggagtctattggaaattggctgtggtaatcaggctattacttggatggctgaattattagccttaaaagataggactaaagcagcagcaactgcaaaagcaaatggtttatatcttgtttcggttgattaccctgaacgtttcgaacttcctaaacctgcaatggggccgctatttttagcagataacccattttaa

SEQ ID NO: 293583 - DNA, 702 bp, Proteus mirabilis
atggaattattaacgcaatttgctgatttaataaaatttctaattgattttattttacacattgatgtccatttagccgagttagtcgctcaatatggtacatgggtatatgccattctatttttaattattttttgtgaaacggggcttgttgtcacaccattcttaccgggcgattcgttactgtttgttgcgggggctttatctgcgttagataccaatgatgttaatgttcacctaatggttctcttactgcttttcgctgcgattttaggtgatgcggttaactattctattgggcgcatttttggtgaaaaactctttagtaatcccaattcacgtatctttaaacgagaatacttagataaaacccatgctttctatgaaaaacatggtggtaaagcgataattttggcaagatttgtgccgattgtccgaactttcgcgccattcgttgcaggaatgggcaaaatgtcatatcgtcattttgctttttataatgttacgggtgccattgcatgggtactgctatttacttatgctggatacttttttggtgacttagatattgttcaaaagaacttaaaattgctaattgttgccattattgttatttctattttaccaggtgttatcgaggtgatacgccatcgtagagcgagtgcaaaggccaaaaaagagagtgataaccaagaggtttga

SEQ ID NO: 293584 - DNA, 963 bp, Proteus mirabilis
atgagctggattgaaaaaattcttaataaaagcaatatcacgagttcacgtaaagccaatatcccagaaggggtttggacaaaatgtgatagctgtgggcaagtactttaccgcgcagaattagagcgtaatttagaagtgtgccccaaatgtgatcatcacatgcgtatttcagcacgccgtcgcttagaaacttttcttgatacaggaagcacgactgagctgggcagtgagttagagcctaaagatattctgaaattccgcgactctaaaaaatataaagacagaattgctgcggctcagaaacaaacccatgaaaaagatgccctagtggtgatgaaaggtacgttaaaagaaatgcctgttgtggccgcatcttttgaatttgcatttatgggcggctctatggcgtctgttgtgggtgcgcgttttgttcgtgcggttgaacaagcattagaagataattgtccactgatttgcttctctgcaagtggtggtgcacgtatgcaagaagcattgatgtcattaatgcaaatggcaaaaaccagtgccgcattagctaaaatgcaagagcgtggtttaccttatatctcagtgatgaccgatcctaccatgggtggggtttctgcaagtttagcaatgttaggtgatattaatgttgctgagccgaaagccttgattggttttgccggtccacgtgttattgaacaaactgtacgtgagaaattacccgcgggtttccaacgtagtgaattcctgctagaaaaaggggcgatagatatgatagttcgccgtcctgaaatgcgtgatgagctagctgaattactggctaagctgactcagtatgatttagcgaaagatgaagatgaactgctaggcgaagaaatgatcgctgatgacatcgaatcttctgacaatgagccagaaattaacatcgaaacgaataaaaaagaagatgtctaa

SEQ ID NO: 293585 - DNA, 1299 bp, Proteus mirabilis
atgtctaatatcataactgctcctcaagccacatcgcctttgtcggtgtggctttcttatcttgaacacttacactcaagtgctattgatatgggacttgagcgcgtgggcaaggtaggtcaattactgaatgtattacgtccttcccctaaagttatcactgtatcgggtactaatggtaaaggaaccacttgccatatgctcgagtcaattttgatggcttcaggattgaaagtgggggtttatagttcacctcatcttgtccgttataccgagcgtgttcgcattcaaggtaaagagctttcaccagctgatttttgtcaagtatttgctgaaatagagcaaaccagaggcgatatttcgctgactttttttgaatacggcacactcgccgcattgaaactatttcaacaagctcagcttgatgtggttattcttgaagttgggttaggggggcgtttagacgcgaccaatattgttgatgccgatattgcagctatcaccagtattgcccttgatcataccgattggttaggggctgatagagagcatattggtcatgaaaaagccggtatcttccgtaaaaatcactatgctgttgtaggcgagccagatatgccactttctattgcacaagtcgcgcaacagaaacaggctaaattatttcgtcgtggtgttgattggtcattttctattgatggtgatcactggcattggcgtagtgcagataagcagtttgaaaaacttcccatccctaatattcccttagccaacgcaggtacggcaatggcagtaatacgctgcttattgaaaaccgatgataaagtgagtcaagggatcacccatcaaagtatcgttgagggaatgagtaaagctcagttgccgggacgttttcagataatttcgcagcatccattagttatttttgatgttgctcataatccgcatgctgctgggtatttagccgaaaaactggcgcaattaccgcgttattctgataccaaagtgcgcattgttgttggtatgctgggtgataaagatattgcgggtacattagcgtgtttatcccctcaagccgatcagtggtatgttgcaccattgaatgagtttcgtggcgcatcagctcaggtattagctcagcacctcgactatccggcagtatttgatagtgtcgagcaagcatggcaacaagcaatatctgaggcgcaaaaaaatgatattgtggttgtatgtggatcattccataccgttgctcatgtaatggaactattggaaaaggagagtgcgagtggcaagtaa

SEQ ID NO: 293586 - DNA, 639 bp, Proteus mirabilis
gtggcaagtaaatttcaaaatcgcttagtcggagccgttgttcttgtggcggtaggggttatttttcttcctacattatttgacggcgataagaaatataacgaagaccaatttgcctctattcctttagtccccaaacccggtgatgagcaagatattgaatcaatagcaccgattgagcaaaccacaacaccgtcaacgccatcagagggagcttctgaggcgatgatctctgaagcggtaacgggggttgaacagcctcaagtttctactcctgaagtatcggagcctcaagtagcaccatcaacaccggttgttgagccacctaaagtggttaatccgcctgtagagccaccaactactccgcctcccgcagtaccagaaacaaccgcgccgaaaggtgaggcttgggttgtgcagttaggtgccttgaaaaatgcggcgaaagttgaagaaattattgcaaaaatgcacctctccggttatccagtatatactgtgcctgctcgtcctgtttcaggaaaagtgacacgtatctatattgggcctaatgcctcaaaagcagagttacaggcgatgttacctcgccttaaagagctaacaggcctgcaaggtgaagtaagagcctataaaccataa

SEQ ID NO: 293587 - DNA, 492 bp, Proteus mirabilis
atggtctggatagattacgccattattgccattatcggtttttctgcattagttagcctgatccgtggctttgttcgtgaagcattatcacttatcacctggggttgtggtttttttgttgcaagtcagttttatccttatctagccgtctattttactcggtttgaagatgagctggttcgtaacgggattgcgattgtcacactgtttattgcaacgctaattgtcggtgcggtgattaattatgtgattagctctcttgttcaacgcacagggttatcaggtacagatcgtgtgttggggatctgtttcggggctttaagaggtgtgctgattgtatcagcgttactttttgtcttgggtgcttttactcctatggcagacagtgccgattggcaacgttctgagcttattcctcaattcaaccatattattaggtggttctttgactacctacaaaatgcgtcaagtttcgtgtcggagaaaatgtaa

SEQ ID NO: 293588 - DNA, 1518 bp, Proteus mirabilis
atgtgcggtattgtcggtatcgctggagttaatccagtaaaccaatcgatttatgatgcgttaacggtgttacaacaccgaggtcaagatgcagcaggcattgcaacaattgatgagaataacggttttcgtctacgcaaagcaaatgggctggtgaaagatgtctttgaaacgcgtcatatgttgcgtttaaaaggaactatcggaataggacatgtacgttatccaaccgcgggcagttcgagtgcatcagaagcgcaacctttttatgttaactcaccttttgggatcacacttgcacataatggtaatttaaccaatgcgcatttgttgcgtcgtcaattatttgaaactgctcgtcgacatatcaataccacctcagactccgaaattttactcaatgtgctagcgtatgaattagatcgcttcgatcattttccgctagagccagataatatttttaccgctgttgcggctatgcataaaaaattacgtggcgcttatgcttgcgttgctttgatcatcggccacggcttattagcttttcgtgatccttatggcattcgtcctttagtgttaggcaaacgtactttagaagatggacgcagtgagtatatggttgcgtctgaaagtgtcgctctagatacactaggatttgaattcttgcgtgatgtagcacccggtgaggctgtttatatcacagagcaaggacaactgtttacccgtcaatgtgctgaaaatccgcaattagtgccttgtctatttgagtatgtttattttgcgcgcccagactcttttattgataaaatttccgtatataacgcccgtctacgtatggggcaaaagctcggcgctaaaattgctaaagagtgggaagagttacaaatagatgtggtgatccctattcctgaaacttcttgtgatattgcattagaaattgcccacatcttaaataaaccttatcgacaaggttttgtgaagaatcgttatgttggacgtacttttattatgcccggccagcaagagcgtcgtaaatcagtacgtcgtaaactaaatgccaaccgtgcagaatttcgcgataaaaatgtgttacttatcgatgactctatcgtacgtggcacaacatcagagcaaattgttgagttagcgagagaagcgggggctaaaaaagtttattttgcctcagccgctccagaagtgcgtttccctaatgtttatggtattgatatgcctaatgccaatgaattaattgctcatgggcgtgaagtggatgaaatacgtaaactgattggtgctgatggacttatttttcaagatctctctgatttaattgccgctgttcaagaagaaaatccagatatcaaccaattcgaatgctctgtatttgatggtgtctatatcacaaaagatattgatcaaggctatttagattaccttgaaaatttacgtcgtgatgatgaacataaaattcgtgatcaacatgaagctgagaacttagaaatctataacgaaggctaa

SEQ ID NO: 293589 - DNA, 582 bp, Proteus mirabilis
atgaaaaagctgattgtcgggctaacaggtgccagtggtgcaatttatggtattcgtttattagaaatacttaaatccgtgccatccgtagaaactcacttggtgatcagtcaagcggcgcgtcgtaccatttcattagaaacggattattctctcaaagatattcatgctttagctgatattatttatgacgatcgagatataggggcgactatctcctcaggctcgtttcgggtcaatggtatggttattttaccttgttcgattaaaagcctctccggtattgtacatagctatactgatacgttagtgacacgtgccgctgatgtcgtgttaaaagaaggacgtaaattagtgctatgtgtacgcgaaacaccgttacatttagggcacttacgtttaatgactcaagctgctgagcttggtgccatcattatgccaccagtacctgcattttattttcagcctaaaacgatcgatgacattgttaatcagacagtaaatcgagtgcttgatcaatttgacattgacttgccggatgatctttttcagcgttggcaaggggataaacctgcccgttga

SEQ ID NO: 293590 - DNA, 906 bp, Proteus mirabilis
atgaacatacttatcacaggtggaaccggattaattggcagagcacttatctgccaactcgcattagataaacataatattaccgtactttcccgttcgccacagaaagtctactctcatttctgtaatgaaatgacgtgttggactcatttagatgataaagaaaacttaaaccaatttgatgcagtgattaatcttgctggagaaccaattgcagacaaacgctggacaccggagcaaaaacaaacgttagttaatagtcgatgcaaattaacccaaaagctggtggatttaataaaagccagcgactctccccctggtgttttaatttctggctctgcggtgggtttttatggtgatcaaggtgaaaataatgtcactgaagagacgccacctaaggatgaatttactcatcaactctgtgccaaatgggaaaatattgcactcgatgcacaaacgccattaacacgggtgtgtttgctacgtactggtattgtactctctacaaaaggaggggcattacctaaaatgagcccgccttttaaattaggtttaggtggaaaattaggtaatggtaagcaatatatgccatggatacatattgatgatatggtcaatgccatcgtatttttacttaataataacaatacccaaggcgcctttaatctgacagcccctcatccagtacaaaataaagcatttaccacgactttagctcacgtactgaaacgccctgcatttatgacggttcctgccacaatattaaaattaatgatgggagaaagtgccacattagttttaggtgggcaacaagcatttcctaagaaactgctcgatgcaggattcagctttcgttacccacaactggaaggcgctttagaagatattattcgccataaaaaatag

SEQ ID NO: 293591 - DNA, 615 bp, Proteus mirabilis
atgatcgatctttattatgcaaacaccccgaatggccaaaaaattacgcttttcctcgaagaagtcgccatgccttatactttgcatcatgttgatattggcaaaggtgatcaatttaaacccgaatttttagctatttcacccaataataaaattcctgctattgtcgataatgctcccgctgacggtggtgagccactctctatttttgaatcaggtgctattcttatctatttagcagaaaaaagtggcaaattacttagccatgatctgcgagaaaaaatgacccaactgcagtggctattttggcaagtggggggatttggtcctatgcttggacaaaatcatcactttacgcgttacgcccctgaaaaagtaccttacgcaatcaatcgttatacaaaagagaccgagcgtttatatcaggtgttagagagccgactcgctcaatctccctatcttggtggaaacgattatagcattgctgatatagccacctatacttgggctcgttaccatgacacacaccatattgatctagcagattatcctgcggtagaaaaatggctaaatacaataagccaacgtccagcagccaaaaaactgtttggttag

SEQ ID NO: 293592 - DNA, 543 bp, Proteus mirabilis
atggaacaagaaaatacggcagtggtcgagtgggttgatattgttgatgaaaaaaatgaagttgttgcacaagcaacacgtcaacaaatgcgagcagaaaacctacgtcaccgagcaacttatattgtcgtgcacgatggcatgggaaaaattttggcacaacgccgtactgaaacaaaagatttctatccaggttggttagatgcaaccgcgggtggtgtagtacaacaaggtgaaaatgcactcgaaagtgcacgtcgtgaagcagaagaagagctaggtattgccggagttccttttgccgaacatggacaattctattatgacgatgagagttgccgcgtttggggaagcttatttagttgtgtatcacatgggccatttgcattacagccagaagaaattgaggaagtatgctggcttactcccttagaaatcactgaacgttgtgatgaatttacccctgattcacttaaagcactctctctatggttaacgcgaaataatagtactcgcttggacacaaaagaaactactgactaa

SEQ ID NO: 293593 - DNA, 1047 bp, Proteus mirabilis
atgataaaaacacgtaaacgccgaaatacaggtcgcgtcactttacaagaagttgctaaacatgccggagtcggttcaatgaccgtatctcgcgcattgcgtacgcctgaattagtgtcggataaattaagagaaaaagttaaccaagcagtggcagagttgggatatatccctaatgcctcagcaggggccttagcttccgctcaaagccatattattgctgtactactgccctcttttactgataaagccagtgctgattttatgcaatcattgcagcagatcctcagccgtcatcattatcaaatattagtgggatgttatgaatatcagctccataaagcaactgatgtaattaatatgctattacagagtaaccctgccgcattagttgcctttggctcccaattaagtgatgtacagttcttacatatcagtaatgccaatgtgcctgttgtcagtgtcgcgagtcaatctaatgagcaatctgcaataagtattgattgcggttatgaaaaagcggcatttgatttaacccattatttaattcagcaaggtaaacgttgtgtcggctatgttggtgcgctacaaggacaacgtttacaccaccagcaaattactggttggtcgcgtgctttattaaaaaattatttaaatgctgagcaaagtgttactacgcccgaccccgcttctatggcatatggtcgacaagcattaacagagatcttattacgtcagcccgaactagatgccgttatttgtagccatgagagtattgctttgggaatgatgtttgagtgccaacgaagattaattaaaattccccaagatctcgctatcgcctgcttagaaggctctgaaaatagcgcccaaatagcaccttccctgacatctatacattttaattaccataaaataggtaaagaggcaggtaagcacctaattgcactattgcaacatttacgtgatgaggttgataacgctatgtttgaaaataccgttatcaactatgcttatcgtttagaactcggacaaagtaccccttag

SEQ ID NO: 293594 - DNA, 444 bp, Proteus mirabilis
atgcttaaaacattattaacaccggatgtggtacaagtgatcccacaagtcaaagattggcgtgaagcaattaaaatcgcctgtcagccattaattgacaaaggttgtattgagcctcgttatgttgatgcgatttataaatcacacgagcaaataggcccttactatgtattaggaccaggtattgctatgcctcatgcacgtcctgaagaaggggttaatcagctctctttagcattaactatcatcgaaaaaggggtggaatttggtgctgatgaaaatgatccggtgaaacttttaattgttttagccgcaacagataacgatagccatattaatgccattgtgaaattagctgaactttttgataaccaagatgatatagacactttgttgcaagcaaaaagtaaggcagaagtattggctgttattaatcactattaa

SEQ ID NO: 293595 - DNA, 291 bp, Proteus mirabilis
atgatgaaaattaccgttgtatgtggaaatggtttaggcagtagcttaatgatggaaatgagcatcaaaagtattttaaaagatctggccgtcaatgctgatgttgatcatgtcgatttaggttcggcaaaagggacaccgagtgatatttatgtgggaactcgtgatattgcggaacaacttaatgctcaagcggttaatggcaaaattgtttctttagataatatgattgataaagtcgcgatgaaagagaaactttcgaccgcattacgtgaattaggcgcgctataa

SEQ ID NO: 293596 - DNA, 1257 bp, Proteus mirabilis
atggactttttccgctttctaatgagcgatgtgctttcagagcctgctatattagtgggtttaatcgcattgattggtttaattgctcagaaaaaacctgcgacagaatgtattaagggcaccgttaaaaccattatgggttttgttattttaggtgcgggggcaggtttagtcattaactcgcttggtgatttctcaacgattttccaacatgcatttggcattcaaggtgttgtacctaataacgaagccatagtctctattgcacaaaaaagctttggtaaagagatggcactgattatgttctttgccatgttaattaatatattaattgcacgcttaacaccgtggaaatatattttcttaacgggtcaccacactttatttatgtcgatgatggtcgcggtgattttggcaacagcgggtttagaaggggcggtattagttgcagtaggttcattagttgttggggtatcaatggtatttttcccagccattgcacatccttatatgaaaaagatcactggctctgatgatgtcgcattaggccatttctctactatttcctatgttgtatctggttttattggtagtaaatttggcaataaagcgcattcaacggaagagatgaatgtacctaagagtttactctttttgcgtgatacgccagttgcgatcgctttcaccatgggcataatttttattattacgtgtttatttgccggtgacacttttgttcgtgaagttagtggtggtaaaaactggtttatgttctccttaatgcaatccatcacctttgcggcaggtgtttatattatcctacaaggtgtacgtatggtgattgcagagattgttcctgcatttaaaggcatttctgataagttagttcccaatgcaaaacctgcgcttgattgtcccgtggtatttccttatgcacctaatgccgttttagtcggttttctgagtagttttgcagcgggtgtcattggcatgtttattctttatgctttagattggactgtgattatacccggggtggtacctcatttctttgtgggtgcaactgcaggcgtatttggtaacgccacagggggacgccgaggtgctattttaggtgcttttgctcaaggtttattgattactttcttacccgtatttttattacctgtacttggtgatattggtattgccaataccacatttagtgatgcagacttcggtgtgattggtattctattagggattattgttcgttaa

SEQ ID NO: 293597 - DNA, 1230 bp, Proteus mirabilis
atgtgtatgtctttagctattcgatatcttgcgttattaccacttttcgttattactgcttgccaacagcctgtaaattataatccaccagcaactcaagtggctcaagttcagcctgctattgtcaataattcatggattgaaatttcacgaagtgcactcgactttaatgtaaaaaaagtccaatcattattaggtaagcaatcctctctttgtgcagtgttaaaaggagatgcttatgggcatgatttatcgttagttgccccaattatgatagaaaataatgtgcaatgtattggtgtaacaaataaccaagaattaaaagaagtacgtgatttaggatttaaaggccgtttaatgcgagtgcgtaatgcgacagaacaagaaatggcacaggcaaccaactataacgtagaagagttaattggtgatcttgatatggcaaaaagattagatgctattgccaagcaacaaaataaagtcattcctattcatttagcattaaattcaggtggcatgtctcgtaatggtttagaggtcgataataaatctgggcttgaaaaagcaaaacaaatttctcaattagctaacctaaaagtggttggtattatgtctcattatcccgaagaagatgctaataaagtaagggaagatctggctcgttttaagcaacaatctcagcaagtgttagaggtgatgggattagagcgtaacaatgtcacattacatatggcaaatacctttgcgacaattaccgtgcctgagtcatggctggatatggtacgtgtgggaggtattttttatggtgataccattgcgagtacagactataaacgtgtgatgacctttaaatctaacattgcttcaattaattattatcctaaaggtaatacggttggttatgatcgtacttacacattaaaacgtgactcagtactagccaatattcctgtaggttatgcagatggttatcgtcgcgtttttagtaatgcggggcatgcattaattgctgggcaacgcgtacctgttttaggaaaaacatcaatgaataccgttatggttgatattaccagtcttaacaatatcaaaccaggtgatgaagttgtattttttggcaaacaaggtaatagcgaaattaccgcagaagaaattgaagatatcagtggtgcattgtttaccgaaatgtcaattttatggggagcaaccaatcaacgggtattagttgattaa

SEQ ID NO: 293598 - DNA, 2400 bp, Proteus mirabilis
atgaaaatatcacatttctatcgatggatagtattcatcatactcacaatattggcgctttactttactgtactcggagggtatttagtttcattagcaggatcgcctttttatctctttaccggtgtcatgcttcttattattgcagcttgctttctaagtcgaaagaaaagcaccctattactctttaactttctatttttaataacgattgtctggagtatctgggagtcaggatttgatttttgggcactcgctcctcgcttagatattatttttattctaggcttactccttattcctttcacactcaataataatgtttacacttgtcataccaataaaattggcttattcacactattagccacaacacttatcattatattaggtagttcactaaccgatcctcatgccattaatggtcaatttacacaacaacagcccaccaactctatatctcctatcggagtaaatgataatgactggcccgcttatggcagaacgcaagccggaatacgctattcaccattaactcaaatcaacagtgataatgttgataagttagttgagaaatggacttttcataccggtgatgaaaaaagggctaatgatgccgttgagataaccaacgaagttacgcctataaaaattgaagataatctctttctatgtacacctcaccaatatttaattagcttagatcccgcaacaggtaaagagaagtggcgttttgattctaaattgcaatataacaaaagcttccagcatatgacttgccgaggggttgcctattataatcaaaataatagtgccgaatttgccaaaagcctcgacgttcgccaaccaagcatatcagatgaatgtcctgaaaaagtctttcttccagtcaatgatggccgcctaatcgcagttaatgcgcaaacgggtaatgcatgccgtgattttggtcagaatggagaaatcaatctgttagcttctatgccttatgcttatttgggtggatataacccaacatctccccctatcgtcaccggtaatactattattataggtggctctgttactgataacttatcaactcaagagccttctggtgtgatccgtggctatgatgttaatagcggaaaattaatatgggtatttgatactggcgcagaagatcccaatgcgatgccaggtaaagagactcaatttgttcataactctcctaatgcatgggcgcctttagcttatgatgcacaaacggatgtggtctatattccgacaggagtaggtacacccgatatttggggaggcgatcgtcatccattaaaagagcgttacgctaattcagttttagcactaaaagggtcgacaggcgagctattgtggcatttccaaaccacccatcatgatttatgggatatggatgtaccttcgcaaccatcactggttgatatcaaaactgataaaaatgaaacaatacctgccatttatatcgtcacgaaaacagggaatgtgtttgttcttgatagaagagacggtacacctattgttcccgtaacagaaaaacccgttcctaccagtgtcaaatatggtccacaaacacaaggtgagcattactcacccactcagcctttttcagcacttaatttagcacctaaaaataagttgcaaggttcagatatgtggggcggcacaatggcagaccagctgttatgtcgtatcgccttccatcagttaaattatgagggaatttatactccaccatcagaaaacggtacgcttgtttttcctggtaacctcggtatttttgaatggggcggtatttctgttaatcaagatagacaagtcgcggtaatgaactttattaccttgccttttatctcaaaactttatttaaaagatcctcaagatagtcaagcaattgacgcaggccacggagagcaaggtttacaacccatgacgggaacaccttatagtgttgatattcatccattcttatcaccactaggattaccttgtaaacaacccccttggggacttgttgctggtgttgatttaacaaaaaatgagcttgtttggcaacaacgatttggcaccattagggatagtttgcctaatttagtggaattaccaccattaaaaattggtgttcctgggctaggaggcgctatctcaaccgcaggtaatgtgatgtttgttgctgcttctcaggataattatattcgagcatttaatgtgacgaatggcaaaatgttatgggaagcacgattacccgcaggtggacaagcaacgccaatgacctactctattggaggcaagcaatatgtggtcattatggccggcggacatggttcatttggtactaaaatgggcgatagcttagtggcttatgggttacctgataatttatag

SEQ ID NO: 293599 - DNA, 2145 bp, Proteus mirabilis
gtgtcccgtacaattatgctagtcccaactgatacacgcgtaggtttaaccagcgtcagcttgggtgtaatccgttctatggaacaaaaaggcgttcgccttagtgtattcaaacctatcgcacagcctcgtgttaaaggcgcattagatcaaaccactgcgattatccgctctcactccacaattcaatccgcagaacctttaaatatggattacgttgagtcattactcagctccaataaaaaagatgttctgatggaagaaattgttgctagatatcacgaaaatactgctgatgcagaagttgtactgattgaaggcttagtgccaatgcgtaagcacccttttgcacaatctttaaactatgagattgccaaaacattaggtgctgaaattgttttcgttactgcattaggcaacaacaccgctgagcagttaaaagagcgcattgaatttgctcgtgctgaatttggtggtgtaaaaaatcaaaatatcacaggtgtgattgttaataaattaaatgcccctgtggatgatcaaggtcgtactcgccctgatttatcagaaatttttgatgactcaagcaaagcgattatctctaatatcgatttaaataccatcgaaaaaaatagcccacttcctttattgggttgcattccatggaacttcgatttaatcgctactcgtgctacagatatggcaaaacacttaaatgcgactatcgtcaataaaggtgatattgaaactcgtcgtattaagtctgtgactttctgtgctcgtagtattccacatatgttagagcatttccgcccaggttcattgcttgtcacttctgccgatcgcccagatgttttagtttcagcatgtcttgctgcaatgaatggcgttgaaatcggtgctatcttactcacaggtggttaccaaatcgatgcaccaattaaacaattgtgtgagcgtgcatttgagactggtctacctatctttatggttaattcaaacacttggcagacttcattaaatctgcaaagctttagcttagaagtgccagcagatgaccatgagcgtatcgaaaaaattcagaactatgttgctcaacatatcaataaccaatggattgattcactgacagcaaactctgaacgtcctaatcgtttatcaccaccagcattccgttatcaattaacggaattagctcgtaaggcgaaaaaacgcatcgtattacctgaaggtgatgaacctcgtaccgttaaagccgcgtctatttgtgctgaacgtggtatcgcaacctgtgtactgttaggtgatcctgaagaaattcgtcgtgttgctgcagcacaaggtgttgaattaggtacaggtattgaactcgtcaatcctaaagaagtacgtgaaatttatgtacctcgcttagttgaactgcgtaaaaacaaaggtatgacagaagttgttgctcgtgaacagttagaagataacgttgttctcggtaccttaatgttagaaaaaggcgtcgttgatggtcttgtttctggcgctgttcatacaaccgctaacactattcgcccaccactacagttaattaaaactgcacccggtagctcattagtgtcttctgtgttctttatgctattaccagaacaagtctatgtttatggtgactgcgcaattaacccagatccaaccgcagaacaactggctgaaatcgctattcaatctgcagactcagcaaaagcgtttggtatcgacccacgcgttgcgatgatctcttactctacaggtaactcaggtgctggcagtgacgttgaaaaagtgcgagaagcaactcgtttagcacaagaaaaacgtccagatctgattattgatggtcctttacaatatgatgcggctgtaatggctgacgttgctaaatctaaagcaccaaactcacctgttgcgggtaaagcaactgtgtttatcttccctgatctaaacaccggtaacacaacctataaagcagtacaacgttcagcagacttggtttccattggaccaatgttacaaggtatgcgtaaacctgttaacgacctttctcgtggcgcgttagtcgatgatatcgtctacactgttgcattaactgcaattcaagcaagccaacaagaaaatgcctaa

SEQ ID NO: 293600 - DNA, 456 bp, Proteus mirabilis
atgaacgaaccgacagtgactcccccaggtttcttcaaaaagttacgcctagggaacgagtatctaaaaacctggccggttgagaagcaattagccccagtttttcctgaaaatagaatgataaaagcaacgcgttttggcatacgttatatgcctcctatcgctatttttacattaacctggcaaattgcattaggtggcgatttggggccggcgatcactactgcactttttgcctgtagcctgccaatgcaaggattatggtggttaggaaaacgcgctgcaacgccattacccgctgtgttactcaattggttttatgaaattcgtgaaaaatttgagcaagcgggtattgcattagccccagtagaaaagacgccaacctatctctcattagcgcatttgcttaaacgtgcttttaagcaacttgatcgctcttttcttgatgatgtgtag

SEQ ID NO: 293601 - DNA, 498 bp, Proteus mirabilis
atgatggaaatgacacacgcacaacgcttgatcctctctaatcaatataaaatgatgactatgatggatcctgataacgctgaacgttatcgtcgctatcagacaattattgaacgtggttatggattacaattacgtgaattagaccgcgattttgatgagatgtcagaagagacctgccgaaccattattaacatcatggaaatgtaccatgcattgcaagtttctcgagaaaatttaaaatcaccagaaatgccggatgctcgtcgagtggcatttatgggctttgatgcagcaacagaatctcgttatcttagctatgtacgctttatggtcaatactgaagggcgatatacgcattttgatagtggtagtcatggttttaactctcaaacgcctatgtgggagaaataccaaagaatgctggctgtttggttagcctgtccacgtcaatatcacctaagcagtgttgagatccaacaaatactgaatgcgtaa

SEQ ID NO: 293602 - DNA, 663 bp, Proteus mirabilis
atgacaatcacctgtaaaggctttctttttgatttagatggtacattagtggattcattgcctgttgttgaatactgttgggcactatttggtgagcgagtaggggtatcaacacaagaaattaataactatatccatggaaagccggccattgagtcgattcgtcattttatgcctaatgctacgcaagcacagattgaagagacttttcgttggctagaaaagttagaagcgacacaaacagaaggattagcccctcttccgggggctatcgaactcattaatcgcttaaacgacttagcgatcccttgggcaattgtcacctcaggcacagtaccaattgcctctactcgtcagtcagttacaggtattcctgagcctaaacattgggtgacggcagaatgtatcactcaagggaaacccaaccctgagccttatcttttaggggcaaaaaaattaggcttggctcccgaagagtgtgtggtttttgaagatgctgctgcaggtatttattctggtttagatgccgggtgtcaggttattgccgtacatgctccgatttcccttcctcgtcgtaatgaaattgatttaatcattgattcattaaatgatttacaaattgacaaagaaaatcagcaagtcgttattaagcataaatgttaa

SEQ ID NO: 293603 - DNA, 1830 bp, Proteus mirabilis
ttgaatagcgaattattatgggttttaagcctgctattgatagctattgtcctttttacgaccaacaaaatccgcatggatgtggtcgctttacttgtcatcgtcgcttttgttcttagcggcacactctcattaaatgaagccacggtaggatttagcgatccgaacgtattactgattgcggccctttttgttattggggaaggattagtaagaacaggtgtggcatatcaaatgggagattggctagtacgagttgcgggtagtagtgaagtaaaaatgctggtgctattaatgatctgtgttgcaagtttaggggcttttatgagctcgacaggggtggtggctatttttattcctgtggtgctcagtgtggcggcacggatgaaaacttctcccagtcgattaatgatgcctcttggctttgcggggttaattagtggtttaatgaccctagttgcgacaccgcctaatatggtggttaatagtgaattagttagggaagggctacccagttttcagtttttctctattaccccaatagggatcgctgtattagttgcgggtgtgttatatatgctggtggtacgtcgttggttaggttcaagtgaagggggtaagcaaaaagaggtttatcgtcgtacttttcgtgatcttatccgtgattaccaattagcagggcgtgcacgtcgcttagccatacgtaaaggttcaccactgattggtcactctctagatgaattacatttacgctctcgctatggagcaaacgttgtcggtattgaacgctggaggcgttttcggcgtgttatggtcagtgcgacaggaggcactgaattaagagagcgagatgtcctattagtggatatgtcagcaagtgaggtagatttacgagagttctgtcgtgaacaaatgttagagccgatggtgttacgtggagagtatttttctgagcaatctcgtgatgtgggattagcagaagtctctatgaaccctgactcagaattattaggaaaatcattaagagaaatcaaattccgtacacgttatgggctaaacgttgtggctattcgccgtgaagggagtgctttaccggggaaaattgttgatgagccattacgtctgggagatgtgttactggttattggtgattggaaattaattcgtatactttcgacaaaaccgcgtaattttattgtattaaatttagcggctgaaattgatactgttgcaccggcctcatcgcaagcaccacatgcacttttttcattagcattaatggttgcattaatggtgaccaatgaagtacctaactttattgccgcgttaattgcttgcttattgatgggaaaatttcgctgtatagatatggaaagtgcttatcgttctattcattggccaagtattatcttgattgtcgggatgatgccttttgcggctgcattgcaaaaaactgggggcatcgagcttatcgttaatggacttatggatgtagcagggaatgcagggccacaggttatgttagtctgtttatttgtactttgtgccactattggtttatttatctctaatacggcaacggcggtgttaatggcaccgattgcaatagcagcagctcatcaaatgaatgtctctccgttaccttttgcaatggttattggtgttgctgcatcggcggcgtttatgacacctgtatcatccccggttaataccctgatccttgagcctggtggttataaatttgctgattttattaaaataggggtgccttttaccatcattgtgatgttgattagcgttttcttaataccgctattattcccattttaa

SEQ ID NO: 293604 - DNA, 582 bp, Proteus mirabilis
atgagttacttttttgcccacctttctcgtttaaagctaattacacgctggcctctgatgcgtaatattcgccaagaaaatgtctctgagcatagtttacaagtggcttttgttgcccatgcattagcggtgattaaaaatcgtaaatttgatggcaatgtcaacgccgagcgtattgcactacaagcaatgtatcatgatgccagtgaggttatcaccggtgatatgccaactcctattaaataccacaatccacaaattgctcatgaatataaaaaaatagaaaaatatgctcagcaaaaattgattgaaatgttacccgaagagttacaagaagattttcgccctcttatcgatgagcaattacatagtgaggaagaaacgtttattgtcaaacaagctgatagtttatgtgcctatttaaaatgccttgaagagttagctgcgggtaatagcgaatttaatttggccaaaaatcgtttagaaaaaacgttagcagaaagacatagccctgagatggactattttatgaaagtgtttgtaccaggctttagtttatccctagatgagatcagtgaataa

SEQ ID NO: 293605 - DNA, 1215 bp, Proteus mirabilis
atgaatcaaataaaaaaatcaagtaaactcgaccatgtttgttatgacattcgaggaccggttttgcaagaagcaaaacgtctggaagaagaaggcaataaagtattaaaactcaatattggtaacccagcacctttcggttttgaagcgccagatgaaatcttagtagatgttattcgtaacctacctagctctcaaggctatagcgactctaaagggcttttttcagcacgtaaagccatcatgcaacattaccaagcccgtgatatgcgtgatgtaactgttgaagatatctatattggtaacggtgtttcagagcttatcgtacaagctatgcaagcattattaaatgatggcgatgaaatgctagttccagcgcctgattacccattatggaccgctgcagtttctctttctgggggtaatgctgttcattatatgtgtgatgagcaacaaggttggtttcctgatttagatgatatccgtcgtaaaatctcccccagaacgcgcggtattgtgattataaaccctaacaatccaaccggcgcggtatatagcaaagagattttgctggaaattgttgaaattgcccgtcaacacaatttgattatttttgctgacgaaatttatgacaaaattctttatgatgatgcccaacatcactctatcgccgcaatggcacctgatttattaactgttacctttaacggtttatcaaaaacctatcgcgtcgcaggattccgccaaggttggatggtacttaatggcccgaaaaaacaagcaaaaggctatattgaaggcttaaatatgctggcatctatgcgcttatgtgccaacgtgccgatgcaacacgcgatccaaacggcattgggtggctatcaaagtatcagtgaatttattctacctggaggccgtttatacgagcaacgcaaccgcgcatgggagcttatcaatcaaatcccaggggtttcttgcgttaaaccaatgggagcgttgtatatgttccctaaaatagacttaaatcgttatagtattaaagatgaccaaaaaatgatcctcgatttactattacaagaaaaagtcttattagtgcaaggtactgcatttaactggcctcaccctgatcatttccgtattgtgacactccctcgtgagaatgatttagagatggcgattcaaaaattcggtcgttttattgtcggctaccatcaatag

SEQ ID NO: 293606 - DNA, 918 bp, Proteus mirabilis
atgattaatgcaaatcgtccgataatgaatctcgacctcgatctgcttagaacgtttgttgctgtagcagatttgaatacttttgcagccgctgcggccgctgtatgtcgaactcaatctgcagtcagtcagcagatgcaacgtttagagcaattagtcggcagagaactctttgcccgtcatggtcgtaataaactgttaacagagcatggcttacaattattaggctatgcacgtcaaattctccgtgctaatgatgatgcaactgcttcattaacatatagcgatgctgaaggtgagttacgtattggtgcatctgatgattccgtcgatacactactaccatttttgttaaatcgtattgcatcagtatatccacgtttagcggttgatgtgcgtattaagcgttctcaatttattgagactatgcttgataaccacgaaatcgacttagcattaaccactgcacgtattggacatcatccacgcacagcgttacgtacagcgcctgttttgtggcattgtgcccctgatttccaattacaaatgaatgagcctattcctttagtagtcatggacgaaactaacccattccgtcagttggcaacaaatacactagatgacgcaggtattcaatggcgtattgcgtatgaagcggcttctttatctgcggttcgtgctgctgtaaatgccgaagtggggatcacagctcgtccattagaaatgcaaaatgctgatttacgtatattaggcgaaagcgaagggttacctcgtttgcctgagactcagtactggttatatcgtaattttgatgagcaaaacgaagctgtattaacggtattcaatgccatcgaaaataagaaaacgccttatactgtcacttcagttgaagaagcgcattctttagatttagagtaa

SEQ ID NO: 293607 - DNA, 453 bp, Proteus mirabilis
atgagtatgtctacgaccaccgaagttatcgcccactattgggcatttgctgtcttcttaataggcgcattggggttatgttcgctcatgttgctgggtgcccgctatttaggcggccgtgcacaagcaagggctaaacatgttccttatgaatctggccttgattccgttggcagcgctcgtctgcgcatgtcagctaaattctatttagttgccatgtttttcgtaattttcgatgttgaagcactgtttctttatgcttgggccgtttccgtacgtgaagtgggctggttaggctttattgaagcagctgtctttatcgcaattttattagctggattattctatttggttcgtattggtgcattaaattggacaccagttcgctctcgccgtgaaaccgcgggtaaaagccatgtcagattaaccagcggcaaacatccgcagcagtaa

SEQ ID NO: 293608 - DNA, 675 bp, Proteus mirabilis
atggattatacgctcacccgcatagatccgaacggtgagaatgaccgttatcccctgcaatcacaggaaattgtcagtgacccgttagatgctcacgttcatcgcagcgtgtatatgggaaaactggaacatgcgttacatgacgttgtgaactggggcagaaaaaactctttatggccatataattttggtctttcctgttgttacgttgaaatggtgacgtcatttactgcggtccatgacgtagcgcgttttggttctgaagtattacgtgcttcccctcgtcaagctgactttatggtggttgcaggaacctgctttacaaagatggcgcccgttattcagcgtttatacgatcagatgttagagcctaagtgggttatttccatgggagcttgcgctaactctggtggtatgtatgacatctattcggtagtgcaaggtgtcgataaattcattcctgttgatgtgtatatcccaggatgcccacctcgtccagaagcttatatgcaagcattgatgttattacaagagtccattggtaaagaacgtcgcccattatcttgggtggtgggcgaccaaggcgtttaccgtgccaatatgcagtcagaacgagaaagaaaacacggtgagcggatcgcagtaaaaaatctgcgtactccagacgaaatttaa

SEQ ID NO: 293609 - DNA, 1797 bp, Proteus mirabilis
atgaccgatcagatagcgcaaaatagcgcacggccagcgtgggaaaccagcgatcatattgatgatcaggtggttaacgaactgcgtcagaaatttgggccagatgcgtttacattccagccgactcgtaccggcatgccagtggtatgggttaagcgggaacaacttattgaggttatgcaatacctcaaatctttaccaaaaccatatgtcatgctgtacgacttgcatggcgttgatgagcgtgtacgcacgcatcgtcaaggcttgccggcagctgatttttccgttttctatcatctgatatcactcgatcgtaataaagatatcatgctgaaagtcgcattaagtgaaaaagatcttaatctaccgactctcacttctatctttccgaactcgaattggtatgagcgtgaagtgtgggatatgtttgggatcgtctttaacggacaccctaatctacgccgtattatgatgttgccgaattgggaaggtcatccactgcgtaaagattatcccgctcgtgcgacagaatttgatccttatgtgctgactaagcagaaagaggatctggaaatggaatcactgacctttaaaccagaagagtggggaatgaaacgcggtactgagaatgaggactttatgttcttaaacctcggtcctaatcacccatcttctcacggtgcattccgtattattttgcaacttgatggcgaagaaatcgtcaactgtgtacctgatgttggttatcaccatcgtggtgcagagaaaatgggcgagcgtcaatcatggcatagttatattccttataccgaccgaattgaataccttggtggttgtgttaacgaaatgccttatgtactggcggtggaaaagcttgccggtattgaagtacctgagcgcgttaaagtcattcgtgtcatgctgtctgagctatttcgtattaatagccatttactgtatatcagtacctttatccaagatgttggtgcgatgacaccggtattctttgcctttactgatcgtcaaaaagtttacgatattgtggaagcaattaccggtttccgtatgcatccggcatggttccgtatcggtggtgttgcccacgatttaccaaaagggtgggagcgcttactacgtgaattcttagattggatgccaaaacgtctggattcttacgttaaagccgccttgcaaaacagcattttaaaaggccgtaccattggtgttgcctcttataacgctaaagaagcgttagattggggggtaacgggtgccgggcttcgtgctacaggggttgagtttgacgtgcgtaaatggcgtccatactcagggtatgaaaactttgagtttgaaattccagtagcaagcaatggtgactgttacgatcgtgtcatgctgaaagtcgaagaattacgtcaaagcttacgtattctcgagcagtgctataaaaatatgccagcagggccatttaaagccgaccatccactgacgactccgccaccaaaagagcgcacattacagcatattgaaaccatgattaaccacttcttacaggtttcatggggccctgttatgcctgcgaatgaatcattccagatggtggaagccactaaagggatcaacagctattatttaaccagtgatggcagcacgatgagctatcgtacgcgtattcgtacgccaagttttgctcacctgcaacaaatcccagcggttatccgcggtagtctggtttctgacttgattgtctatctgggaagtatcgattttgtaatgtcggatgtggatcgttaa

SEQ ID NO: 293610 - DNA, 546 bp, Proteus mirabilis
atgcaaaatgaattaaaccataaagaggatgccgcgaagattgaaatcgttgatgtaactcattcaaagaaaaacacgtttgttttaacgcaagaagagcgtgctgaaattgaacaagaaaaacatcactatgaagatccccgtgctgcatcgattgaagcgctgaaaatagtgcaaaaaaatcgaggttgggttgaagacggtgctatctatgctattgccgatgtgcttggtataccggctagcgatgtagaaggggtagcaaccttttatagtcaaattttccgccaacccgtcggccgtcacattattcgtttttgtgacagtgtggtttgccatattacaggttatcaaggcattcaggcagctattgagaagcacctcaatatccttcctggccaaacaacaccagatggtcgttttaccttactgccaacctgttgtttaggtaactgtgacaaaggtcctactatgatggtagatgacgatactcacagttttgttaaacctgaagagattgaaacgttactggagcagtatccatga

SEQ ID NO: 293611 - DNA, 1365 bp, Proteus mirabilis
atgacagcaatttcaggagcaaaaccgattattcgtagcgcagaaacgcatccgctaacgtggcgcttacgtgatgatcgtcagccagtatggctggatgaataccgtgcaaaaaacggttataaagcggcagaaaaagcattaaaaagcatggcacctgatgaggtgacttctgaagttaaagatgcaggcttaaaaggacgtggtggtgctggattctcaacaggcttgaaatggagtctgatgccaaaagatgaaagtatgaatatccgttacatcctttgtaatgcagatgaaatggagccgggaacctataaagaccgcctgttaatggaagaactgccacatctgttaatcgaagggatgattatcggtgcgcatgcattgaaagcttatcgtggttatattttcctacgtggtgaatatattgaagcggctaagcacctgcgccatgctattgaagaagccaaagcagcgggttttttaggcaaaaatatcttcggctctggtatcgattttgagctatttgttcacacaggagcaggtcgttatatctgtggtgaagaaacagcactgatcaactcactggaaggtcgtcgtgctaaccctcgctcgaaaccgccattccctgcaacctccggtgcttggggaaaacctacctgcgtgaataacgttgaaacgctgtgtaacgtacccgcgattattgagcatggcaaagattggtatatcggtttaagcgccggtaaaagtccagatgcaggtaccaaattaatgggattctctggtcgcgtgaaatatccaggcttatgggaattaccttttggtactacagctcgtgaaatcttagaagattatgcgggggggatgcgtgatgggctgaaattaaaagcttggcaacccggtggtgcaggaacggatttcttaacagaagatcatctcgatctccctatggattttggcacgatcgccaaagctggtagccgtttaggtactgcgttggcgatggcggtagataatgaaattaacatggtttcattaacccgtaacttggaagagttctttgcgcgtgaatcttgtggctggtgtacaccttgtcgtgatggcttgccatggagtgtcgaaatcttacgcgcgatagaaaaaggtcaaggtcgtcctggtgatattgagactcttgagcacctctgccgctctttaagcccagggcatacattctgtgctcacgcaccaggggcagtagagcctttacaaagcgcaatcaaatatttccgtgaagaatttgaggctggcattattcaagaagactataccaatgccaatcttatccgtggtattcagcctaacttgctgaaaagccgctggtag

SEQ ID NO: 293612 - DNA, 2733 bp, Proteus mirabilis
atgctgactatggctacgattcatgtagacggcaaagaatatgaagttaacggggctgataacctgttagaagcctgtcttaatttaggcttagatattccttatttttgctggcacccagcgctgggaagcgttggcgcttgccgccagtgtgcggttaagcagtatcaaaatgctgaggatacccgcggtcgtttggtaatgtcttgtatgacacctgcggctgatggcacgtttatctcaattgatgacgaagaagcgaaaaaattccgcgaaagcgttgttgaatggtatatgactaaccatcctcacgattgtcctgtttgtgaagaagggggaaactgccaccttcaagatatgaccgttatgacaggtcatactatgcgtcgctatcgctttactaagcgtacacatagaaaccaagagttagggccgtttatttctcatgaaatgaaccgctgtattgcttgttaccgctgtgttcgttactacaaagattatgctgatggcactgatctgggtgtctttggtgcacataacaacgtgttctttggacgggttgaagatggcacattagagagcgaattctcaggtaacttagttgagatttgtccaacgggtgtctttactgacaaaactcactcatcacgttataaccgtaagtgggatatgcagtttgccccaagtatttgccaaggttgtagcatgggttgcaatatcagcccaggtgagcgttatggtgaattgcgtcgtattgaaaaccgttataacggtacagtaaaccgttacttcctttgtgatcgtggtcgttttggctacggttatgtcaatttagcgagtagacctcgtcaacctaaaaaacgtttaggcagtaactggcttgaaatcagtgcagcacaagcaacgcaagccgctgcagaaatgctgaagaaagggcaacgtgttgtcggtatcggctcaccacgagccagtattgaaagcaactttgctttacgtgaagtggttggggctgaaaatttctatagtggtatttcggctgcagagcaggctcgcttgaccttaatgctggatattttacaaaaaggtggcgtttatactccatctctccgtgagattgaagactatgacgcagtactggtgttaggtgaagacttaacacagacaggtgctcgtatggcactgtcagtacgtcaagccgtaaaaggtaaagcacgtgagatggcagccgcacaaaaagtggctgattggcaaattgctgccatcatgaatatcggtcaacgggcgaaatatccactgtttgtcacccatgttgatgaaactcgtctggatgatgttgccgcttggagttatcgtgcgccggtggttgaacaagcgcgtttaggttttgccattgcccatcatattaatggtgaagctcctgcggttgatggcttagatgaagcattgaataaacagattgacatgattgttcaagccttatcgcaagcgaaaaaaccgttaatcattagtggtagtcatgcgggtagcgaagaggttatcaaagcggctgctaatatcgcttttgccttaaaagccaaggggagcgaagttggtctctcttatgtggcagatgatgccaatagcatggggctggcgatgatgaaagcgaaaccactggatgacgcattgaaagtgatgcgtagtggtcaagcagatagcgctattgtgatggaaaacgacttgtatcgccattttgccgccgacgtcattgatgacgcgattgctaaagtggatcacctaattgtgattgaccatcagcaaactgagatcatggaaaaagcacaccttgtgttacctgcttcctcctttgctgaaagtgatggcactatggtgagtcaagagggcagagcgcaacgttacttccaagtgtttgaaccttctttctataacaaagaagtggtgatgcatgaaagctggcgttggctaagtgctgttgattcacaatggcatgaaggtaatcttgactggacgcagttagatcatgtgattgagctatgtgcaacgcgtctaccgcaatttgccggtattgtgaatgcggcacctaatgcatcattccgtattcgtggtcaaaaattagcccgtgaaccgcatcgttatagtggtcgtacttccatgttggcaaatgtttcagtacatgaacagcgtcaacctaaagatattgatagcccatttgctttctctatggaaggaaacaacagtccaacggctcctcgccagcaaattccatttgcatgggcaccgggttggaactcaccacaagcatggaataagttccagtctgaagtcgggggaagcttacgttttggtgatccgggtgtacgcttaatcgaatgcagtgataacacattaggttatttcactgatattccaccagcctttaacctagttgaaaatcaatgggttgtagctccttactatcgtctgtttggtagcgaagagttatcgcaacgttcacaagtgatccaacaacgtatggacaacgcttatttaaccgtgagtgaatctgatgccatcgcattagcattatctcaaggtcaacaagcgatgtttacttacgaaggtcgtgaattcaccttacctgtgaaaatcagtgctcacttaactcgaggtcaaattggccttccgttagggatggctggcatttcgccatcactggtgggtgtatcggttcgtcaactgcggggtattgcataa

SEQ ID NO: 293613 - DNA, 978 bp, Proteus mirabilis
atgagctggttatctcctgaagttacagagattttactcactgttttaaaagccgtggtgatcttgctggtggttgtcacttgtggtgcttttatgagtatgggggagcgtcgtctactggggttattccaaaaccgttatgggcctaaccgtgtaggttatgcaggttcagcacagttaattgcggatatgatcaaaatgttctttaaagaggactggatcccaaaatttgctgatcgctttatctttaccattgcaccagtgattgccttttcttccttattattgtcatttgctattgtgccagttagctcaacctgggttgtggctgatttaaacatcggtattttatttttcttgatggtagcgggtttagcggtgtatgccgttttatttgctggctggtcaagtaacaataaatattcgttattaggtgcaatgcgtgcttcagcacaaacagttagttatgaggttttcttaggactttctattttaggtgttgtggcacaagcgggttcgtttaacttaacggatattgtcaattcgcaagcccatatgtggaacattatcccacaattctttggctttattacctttgcgattgctggcgttgccgtttgtcaccgtcatccttttgaccaacctgaagcagagcaagagttggcggatggttatcacattgaatattccggtatgaaattcggtctgttctttgtcggtgaatatatcggtatcgttgccgtttctggcttaatagtgacgttattcttcggtggttggcaaggtcctttcttaccgtcattcgtttggtttgcactgaaaacaggattcttcatgatgatgtttattctgatccgtgcatcattaccgcgtccgcgttatgaccaagtgatggcttttggttggaagatctgcttaccgttaactttaatcaatctgttggtcactgctgcagtgatcctctacaacgctcaataa

SEQ ID NO: 293614 - DNA, 543 bp, Proteus mirabilis
atgactttaaaagagttagtgactggtttcggcacccaggtacgcagcatttggatgattggcttacacgcctttgccaaacgcgaaacgcagatgtacccggaagaacctgtcaatgttgcaccgcgttatcgtggacgtattgtattgacccgtgatcctgatggtgaagagcgttgtgttgcttgtaacttgtgcgcagcggtgtgccctgttggttgtatctcattacaaaaagcagaacatgaagatggtcgttggtatcctgaatttttccgtatcaacttttcgcgttgtatcttttgtggcttatgtgaagaagcatgtccaacaacggctctacaattaacccctgatttcgaaatgggtgaatttaagcgtcaagatctggtttatgaaaaagacgatttattaatttcagggcctggtaaatatcctgaatataacttttaccgtaaaacaggtatggcgattaatggcaaagataaaggtgaagcagatgatgaagcgaaacctatcgatgtcaaaagcctgttaccgtaa

SEQ ID NO: 293615 - DNA, 534 bp, Proteus mirabilis
atggaatttgcattctatattgcaggactgatttcaatccttgccactttgagagtaataacgcataccaatccggtacacgcactgctgtatctgattgtttcattaattggcctttcagtggtgttcttctcgttaggtgcctattttgcaggtgctttagagatcatcgtttacgccggcgcgattatggtgctattcgtattcgttgtgatgatgcttaacttaggaaaatcggtcgttgagcaagagagaaaatggttacagcctagattttggatagggccggcgattttgtctctggtactgttaattgtattggtttatgcaattagtagtgtcactcatggcgagattagtggcgagattattggggcaaaagaagtcggtattagcttatttgggccttatattctggctgttgagttagcctccgttctcttattgtcaggattaattgttgcttatcacatcggtcgtgatcagagccatgacgatctcgtcgaaaacgaaaaagtaggggagccaaaatga

SEQ ID NO: 293616 - DNA, 303 bp, Proteus mirabilis
atgatacctcttcaacatggtttgatcttggctgcggtactatttgtgttaggttttacttgcttagtacttcgccgcaacctgttatttatgttgatcggactcgaaattatgattaattcagctgcgctagcctttgtggttggtggtagctattggggtcaaacagatggtcagattatgtatattctggcaatcagtttggcagcggcagaggcaagtattggcttggcattgttattacaacttcatcgtcatcgccaaaacctcaatattgatacagtcagtgagatgcgcggatga

SEQ ID NO: 293617 - DNA, 1836 bp, Proteus mirabilis
atgaatatactctatttaacctttgtgctaccactgctgggatttttactgctcgcattctcaggtggtcgttggtctgaaaatgtatcagcatggattggcacgggcgctgttggtttatcagctttagtgacactttgggtggggatagatttctttgctcacggacaagaaacagaagtcttaacactctggacttggatgtcagcggggaactttactatcccatttacgttggtgcttgatggcctatcattaaccatgctaggtgttatcactggcgttggttttcttattcatatgtatgcatcttggtatatgcgtggtgaagaaggatattctcgcttctttgcttataccaacttatttatcgcgagtatggttgttttagtattggctgataatatgatgctgatgtatatgggttgggaaggggttggtttatgtagttacttattaattggtttctactataacaacccagctaatggcgcggcagcaatgaaagcatttattgttacccgtattggtgatgtcttcttagctatcggtatgtttatcctgtttgatcaattaggtacgctaagtttccgcgaaatggcggtactggctcctgaacaactgaccgcaggatcaagcatcattaactgggcaatgttaatggtcttagggggtgcggtaggtaaatcagcacaactgccattacaaacttggttagcggatgcgatggccggtccaacacctgtttctgcgttgatccacgccgccaccatggttaccgctggtgtgtacttagttgcccgtagtcatgcgctattcttaatggcacctgatatcttagaattagtcggtatcgtcggtgcagtgacattagtattagcgggttttgcggctttagtacaaaccgatatcaagcgtattcttgcttactcaaccatgagccaaattggttatatgttcttggcgttgggtgctcaagcatgggatggcgcaattttccacttaatgactcacgcattctttaaagcattactgttcttatctgcaggttcagtgattattgcctgccatcatgaacagaatatctttaagatgggcgggttacgtaagaagatcccatttgtttatgcatgctttttaattggtggaggtgctttagcagcattaccactgttaacagcagggttcttcagtaaagatgaaatcttatggggtgcgtacgcaaacggacatttcaatttaatgttagcaggtttaattggcgcattctttacgtcactttataccttccgtttaattttcatcgtattccatggtgaaaccaaaaccgaagcacaccaagttaaaggcttcactcatactttcccattagcggtattagcgttgttatcaacctttattggggcgttaattacccaaccgttaggcgatgttttcccagaaagcaccgttactcatgaaggtaagtatgtattagaaatcctttctggtgtggtagcgattgtaggcgttgccattgcagcatggttatacctgaaacagcgtcaacttgtttctcaggtggcaaataccaaaacagggcgtttcttctcaacatggtggttccacgcatggggatttgatgcactgtatgaggtgctgtttgtcaaaccttataaaggtgcggcatggcttatccaaaatgatcctgttaaccaattctttaatctctttggttgtctctttaaaggcgccaataaaggcttgagtttcagtgaaaacggattagcgcgttggtatgcggcttctctcggtttaggtgcagtgctggttatcgctctgctgcttctggtttaa

SEQ ID NO: 293618 - DNA, 1530 bp, Proteus mirabilis
atgttattaccctggctaatacttattcccttcatcggtggcctgctaagttggcaggctgaacgaatcggctcgcaagttcctcgctgggttgcgttgctgacgatgggattaacactcgttatttctgtgcaactgtggttgcaaggtgactatcaactgattagtgttgatggtgcacctcgctggacagagttttactttgtaccgtggatccctgctttggggattaatattcagtttgcacttgatggcatgtcattattgatggtggtattaactgctattttaggtattttagcggtgctctcttcatggagcgaaaatcaaccatcacaaggggctttccatttcaacctgctgtggatcttagcaggtgttatgggggtattcttagcgactgacttgttcttattcttcttcttttgggaaatgatgttgatcccaatgtatttccttatctctctttggggacataaaggaagtagcgatgaaaaacatgttagtgcagcaactaagttctttatttatacacaggcgagtggcctgttaatgttgctggccattatcggtttagctgtcgctttttacagcaaaacaggtatttggacgtttaattatgacaccttactacaagcgcacaccttattaggtagtgaactgcaatttattctgatgcttggcttctttgctgcattcgcagtaaaaatgccaattgtccccgttcatggctggctagctgatgcacatgcagaagcaccaacggctggctctgttgacttatcaggtattttgctaaaaacagccgcttacggtttattacgttttaacttaccgttatttccagaagcgtctgcattactggcacctgttgcgatgtggctaggcttaatcaccgtattctacgctgcactgttagcattccgtcaaacggatattaaacgtctggccgcttacagtagtatttctcacatgggctttatcgtaattgcgatttatgctggctctgttttggcttaccaaggtgcgattattcaaatgatcaccaatggtttgtctgctgctggtctgtttatcatgtgtggcatgctgtatgagcgtttaggtacgcgtgatatgaatcaaatgggtggattgtggaaaagcatccgtttcttaccagcattttcactgttctttgcggttgcctctttaggtatgccaggaacaggtaactttgttggtgagtttatgatcctatttggtacttatggccactttaagctgatcactattatttcggtctttgggttagtttttgcttctgtctacgctttgtggatgatgcaacaggcttactatggttcaccgaaaacagcagaaagaacctataaagggttaaatctgagagaatttttgatcctgtttatcttggtggttttattggttattttgggcttcttcccacaaccagtattagatacttcgatatcagcaatggaaaatctccagacttggtattccgcttctctttcaacagtaaggctgtaa

SEQ ID NO: 293619 - DNA, 1470 bp, Proteus mirabilis
atgacaataactcctgaacaattgatcgcaatgctaccgctgttagtcgtcatcttgacggtggtggttgtgatgctgtccattgcgtggcgacgcgatcactttactattgccaccttgacagcaactggttttatcatcgctctcggatcactttactacgttaatgcattaggcgtagttgatgtgaccaccctctaccatgtagatggttattccagctttttcacggcattaactattattgctggtttaggtacggttgcttttgcttatccttggttggaaggctatcaagataataaagaagagttttatatgctggtggcgattgctgtcattggcggtattttactctcttctgcgcaccacttggcgtcaatgtttattggtattgagttactaacattgccgttatttggtctgattggttatgctttccaacaacgtccttcactggaagcgagcattaaatatatgctgctttctgcggcggcctcttctttcttgttatttggtatggcactactttatgctgaagcaggaaatctctcctttacggcgatggggcaaagtttaagtgatagcaatatccataaaccattagtacttgctgggttaggcatgatgttagtgggaattggttttaagctctctttattcccattccaattatggacaccggatgtataccaaggtgcaccagcaccaacaggtgcatttttagcgacagcgagcaagattggtatatttgcggtagtgatgcgcttattccttgaagcaccggcggcggatagcgaaacattacgcatgatcttaggctttatggctattgcctctatcctgtttggtaatatcatggcgctgactcagaagaacgtaaaacgtttactcggttactcttctgtctctcaccttggttatttactggttgcattaattgtcttgcaatatagccctatactggcacaagaaaccgctgagatttatttagcaggttatctctttgcaagtttaggtgcatttggtgcgattgctgtggcttctagcccgtacaataaaggtgaattagagtctcttgaagattatcgtgggcttttctggcgtcgtcctgttgctgccgtcgtgatgtcattaatgatgctatcactggcaggggtgccaataacattaggctttattggtaaactgtatgttattcttgctggtattgattcaagtttgtggtggttaacaggcatggtagtgttaggtagtgcgataggtttattctactatctacgtgctgcagctatcgttttcttacgcaaaccagataacgataatgcaccagcggttacgaccacatcacaaaatatggcaacattaattactttagtttgcgccattatcgtgattgtattaggtgtatggccacaaccattgattgagctgacacgttttgcaattattgcacctgcgataaattaa

SEQ ID NO: 293620 - DNA, 1008 bp, Proteus mirabilis
atgaatagcgtaacttcacaattacaggaatttgattgcaatcaatttttccatactattaaatcaattagaaaaataacttctgaactatttgaacatgataatatcttaaatcataatcttattaccatatcaataaacaataataaaatttatgatgaaataattattttctctattctactaaaaagccggctaaaccagaaattgttaacagggatatttaaaaatattaatgaaattaatcatgcaatggctgatagagagttaacacagcatttatcagaaaaactgctccaagagaaaatgtttattgagcagttatttaaagatgaattaactgaatctatagaaattatagaaaagcacatcagttttattaatgataaaaaacagctcttaacaaccaccactattattagtgaaatagataaattaattagaaataaagaagaaatatctattgaaatcaatgagaaaatagccaagcaaaagttatcgattaatgaaattaaagaacaactcgatataattactaaaagtgaagatattatttataataaaaatatcctcgatttttttacctctcacctgccaagtaaacagacaatttctaaactgcagttggcttcttcagaaaaagatattctctctgtttttatcgatctgctaaagcaattttttacccatctggagaaagggttttcttaccaaaaactggtagagacacgtcatactcttattgataactatttgatacagataaaaaatttaaccaaactagaacagaaaaaacaagctctcttatttaccctaagtcgttattatgcagtcacagaaatcaatcaatatattgatatgttaaatcaacaattatcgctattagagcagtattggcatacattaatagagcaactgatacaattaaaacgcaatctttccgaggccaaaaccgtgctctcacctcatcttgtattccttaatcacttttcacaccattatcaataa

SEQ ID NO: 293621 - DNA, 1212 bp, Proteus mirabilis
atggatacaaccacccttgatcatatagataaagtgattgaacaataccaacttcccgaagtcactcttagcttaattctaggtaaaaatatcgatcatggacgtagtgcgggtatttttacaccttatgatcttaataaaatcaaatcttatattgataaagtattaaaattaccttatcaaaaagacactattattgaattattaggctacgaagatattaacatttcccaaatatcagctgaaactattcaaaccctcttcttaaatatgagaacacatgcctttgaatggcaaaaaattgaatactcagtaaaacagcaagctattgatttagagatcaccggtagagaaatcacgagtacaggtgagcaactattggcatttattaataaaatgccaattataaaaaaaataaataggaaaattgaagatatcacaccagaagaactcagttcaataaaatattcaacacaagataaaaaagtgtctaagcaacttgttgccattttagaaagcatgaaaaatgatattaatgagcaatataataataccttaaaaataaaaaacatgatttatgattttagaatagaaattgtcggcggtgaaaatagtaaaggtaatatatgtcattcaatttattatgatatcattaataaaaagaaatatattaatgatttttttgataatagtgatgattcactaaatgaacagagaattttattagaaaatgaaattgaaatattaaaaaaagagtatcaacacttcgtgaaactcgcctttacggggttagcattcggtattattggtgtgatcattactggagggatctttggttcaaaagctgaaaaaatccgtaaaaaaagaaatgaaacaatagagaaactacataatatcaataaaggaataaaacaacaatcaactatttctgagtgtttacaacgttttcaagtcgatttagacgaaatagaacaatatattgaagatgctgatatgtctgtggagcatcttctttatatgtggcaaacaattttaactgaaattaatgcttcattaattaattttaaaaaaattgataatgcaatggagttaattagatttagtatttatttagaaaaaatcattgcaccttggtatatggtggtcggttactcaaaggaaatgatggcggtatttgatgaagctttatcctctttttattcatctaaataa

SEQ ID NO: 293622 - DNA, 1329 bp, Proteus mirabilis
gtggaaaaggttaatcctgtgttttcgacactgtacgaaaaagttaaaaatataaatctgacagcacaagatgatcttttacatttgaaagttatcttgccatcagaggtgtcattttccttactttcatggctagcagcacaaacgtattacccgcaattttattggcaacatcgtgatgaaagcgaagaagtagccgcttgtggacaagttaagtgctttaatcatatccgtgatgctcatcgatttttagcaacacatcggcattcattgcatgctgatgatgtgcgtatttggggattaaacgcgtgggataccattattccagggcgtattgataaagaaaagggggatgatgcttacctttttttacctcgtattgaaataagacgtcagcaacaactgtcgatccatattaatttattggcagaagaagataagcaaagtgcgcttgcttttattcgctcacttaaaaatgcactgaatattgcacctttatctgtcaaagtaacatctgtagagcactcgttaacgcaacagcaatggactgactatcttaatattgctttagaggaaatcaatcaaggcgtatttgaaaaagtagtacctgcacgggcaacctgcttaagcttagataatccgttaaaagctattcaatttatgaaagcaagtcgagatgttaatcatcattgctatcattatatgctggctttttcacctactgatgcttttatgggctcatcaccagaaagattgtataaacgcgatgaatttgtgctttataccgaagcgttagcgggcactgtggcaagttctgataatgaacaacaggccagagcatttgctgattggctaatgaacgataaaaaaaatcaacatgaaaatctggtggtagttgatgatatttgtcagcgattacaaggtgggatagaagggattgatgtatcatcagcagatgtgatccgcttacgtaaagtgcaacatctgcgtcgctatatccacggtaaacttatccatgctgatgatgtggattgtttacagcgtttacaacctaccgcggctgtttgtggcttaccgcgctctattgcgcgcacttttattcgtcaacatgaaccttttgaacgccgttggtatgctggctctgcgggctatttgtctttgcctcatgccgaatttgcggttagcctgcgttgcggtgaattgcatgatgatgcattaacgctttatgcgggcgcaggggtggttgcgggatctgatcctttgcaagagtgggctgaaattgaaaataaagcagcaggtttgcgcactttattagaaaaagagtgttga

SEQ ID NO: 293623 - DNA, 1686 bp, Proteus mirabilis
atgtctaatagttcgtttaatcgccaatgggctaaagttatactggaaactttgactcgtcatggtttacgtcatatctgtatcgcacccggatcacgttcaacgcctttaacgcttgcggcagccgccaatcataaacttatttgtcatacgcatttcgatgagcgtggtttaggtcacttagcattaggtttggcaaaagccactcaacagcctgttgcagtgattgtcacctcaggtactgcagtggcaaacttatacccggctttaattgaagcgggacttactggtgaacgggtgatttttctcacggcagatagaccgcctgaactgattaattgtggcgccaatcaggctatacgccaacaaggtatttttgccagccatccctcagaaacactctctttaccacgccctacagcagatattcctgctcgttggctggtttctacattagataatgccatgaataatcttgtgcatggtgctttgcatgtaaactgcccttttgcagagccattatatggtgatgatatagagcatgacacaccatggacacaagcattaggaaagtggtggcaaagtgataaaccttggttacaagaaacgctttctccctctgtgactacacaccctcaatgggatcgactacgtcagaaaaaaggggtcgttattgctggacgtatcagtgcgaaagaggggattgccgttgccaaatgggcctcacaattgggatggcctctgttaggtgatgtgttatcacaaactggacaaccactaccttgtgctgacttatggctaaataatccacaagtgaaggctgaattaaaccaagcagaaatagtgatccaatttggctccagtttaacaggcaaacgcttattacaatggcaagcgaattgctcaccgcaaatgtattgggtgattgatgctattccgggacgtttagatccggggcatcatcaaggggagaaatttaccttatccccgagtcaatggttaacggcacatcctgctattgataatttaccttgggcgttgtcattaagtcatattgctacacaaacttatcaacatgttactgaagtaacagactattttggtgaagcacaagttgctcatcagttagatcatttacttcctcacaatggccagctttttgttggcaatagtttaattgtgcgcttaattgatgcttttgcacaattgccacagggctatcctgttatgagtaatcgtggtgctagtggcattgatggattactttcaacctcagcaggtgttcatcgagccactcaaaaaccgacgttaactatcttgggtgatttatcggcattatatgatttaaatagtttggcactacatcaacaagtctatgccccaaatgtggtgattatcgtcaataacaatggtgggcagatattctctatgttaccgacgcctatggcagagcgggagcgtttttactgtatgccccatgctttaaattttaaacatgctgctgccatgtttggtttagattatgttgcaccaaactgttgggatgatctgtttactacagtgactgcatgttggcagggggaagccaaaacaacattaattgaattgattgtcaatgaaactgagggtgctgaaaccttaaatcagttggtaaaacaggtaaccgcttatgactttagcttgtag

SEQ ID NO: 293624 - DNA, 768 bp, Proteus mirabilis
atgactttagcttgtaggcaatataacacgcataacgaagggccatggttagtttggttgcatggactattaggagacagtcatgagtgggagaccgtcattaaggcttgccatgaatatccctcactcgtgattgatttgccccgtcatggtaactctgcctctattggggtaaataattttgtcgagatgagtgcattactccatgacactttaaaagaatacgatattaatcattactggctgattggttactctttaggtggcagaattgcgatgtatcacgcatgttttggtgaaacatcgggattaatgggattgattgttgaagggggaaacccaggtttatatgatgcaatagaaagacaaaaccgtattgcacatgataaacgttgggccgcgcgttttcgcaatgaacctattaatgatgtattaacgcaatggtatcaacagcctgtatttgctgatttaagcgatgaaatgcgtcagttattagttgaaaaacgcagtagtaatgcaggtttttgtattgcggaaagtttagaaacactctctttaggccatcagccttggttagttgcagaattacaacaactcaccttaccctttatttggttgtgtggtgagcaagataaaaaatttcaatcaatagcgcagcaatattcgctgccattaacgactatcccgcaagctggtcataatgcccatcaggcacagcctgatgcttatgctgcggtgataaaccatgtattatccctctttggttaa

SEQ ID NO: 293625 - DNA, 858 bp, Proteus mirabilis
atgctttacccgagcgaagaaaagctatatgcaccgattgaatggcaggattgttctgaaggttttgaagatatcctctaccacaaatctgtcgatggcattgccaaaattacgattaaccgcccgcaagtgcgtaatgctttccgtcctttgactgtgaaagaaatgatccaagcattagccgatgcacgttacgatgactcaattgggactattattcttactggcgctggcgaaaaagcgttttgtgccggcggtgaccaaaagatccgtggtgactacggtggataccgtgatgaaagtggcactcaccacttaaacgtattagatttccaacgccaaattcgtacttgtcctaaacctgttgttgctatggtggctggctactccattggtggtggtcatgtcttacatatgatgtgtgatttaaccattgctgcagacaatgccatttttggtcaaactggtcctaaagtaggctcatttgatggtggatggggtgcttcttatatggcacgtattgtcgggcagaagaaagctcgcgaaatctggttcttatgccgccaatataatgcgcaagaagcattagatatgggattggtaaataccgttgttccttatgcttctcttgaaaaagaaacggtacgttggtgtcgtgaaatgctagaaaatagcccaatggcactacgttgcttgaaagcagcattaaatgctgactgtgatggtcaagcgggtctgcaagaattggctggtaatgcaaccatgctgttttatatgacagatgaaggtcaagaaggacgtaatgcttttaatgaaaaacgtcatcctgatttcactaaatttaaacgtaacccataa

SEQ ID NO: 293626 - DNA, 972 bp, Proteus mirabilis
atgcgaaacgccaaactctattcattcagcctgccaatggaggcaggtgttgttctgcgctaccaaagattaaaaacgcgtgatggttttcttgtctgtttagagcaaaatggcaaacaaggttggggtgaaatttcacctcttcctgagtttagccatgaaacgttagaacaagcacaagatgccgcacaatcttggctagcagcttggtgtctaggtgaaaatcctactgacagtgaattgccaagtgtcgcttttggtattagttgcgcattagcagagcttgaaggcactttaccagaagaagccaattatcgtgccgcacctttatgcaacggtgatcctgatgacttaattttaagtcttaatgaaatgagcggggagaaagttgctaaagttaaggtcggtctgtatgaagcggtacgagatggtattgtcgtcaacttattactagaggcgatccccgacttaaaactaaggcttgatgccaatcgcagttggacgccagctaaagcagaaggttttgccaagtacgtgaacccacaatggcgcgaccgtattgcatttttagaagagccatgcaaaaccccagaagagtcactcgccttttcacaagcaacaggtatcaatattgcttgggatgagactgtgcgtgatgaaggttttgaagtgaaagctcaagagggtgttacggcgattgttatcaagcctacgctagtaggaagtcttgctcgttgccaatctatcgttgaacaagcgcatgctttaggtctagaggcgattattagctcgagtattgaaagtagctttggattgacacaactggcaagagtggctcagtggttaacgccagattctattcccggtttagataccgttgatcttatcaaacaacaacttattcgttgttggccagatgtagatattccgcttatcacgcttgaacagcttaagacagtatggcaacagtag

SEQ ID NO: 293627 - DNA, 1425 bp, Proteus mirabilis
atggcaacagtagttaattttacacaatggccgtggcatcactgggcgcagcttaacccaaatgaaacggccatcatattcggtgattcacctataacatggcaacaattaagttgtcatattaatcaattggcgaaccatttagcgaaacagggtgttaatactaaaagtaccgtgttgctacgtggtaaaaatcatatccatgttgtttttacgctacttgctgtttttcaatgcggtgcaaaagtattaccgttagatcctcagctccctaagtctctacttgatgatttattaccccatttaaacatcgatttttatgctgatttaagtggatcaacacttgagttagatgcgaggttactcgatctttcaggtgtcgaattcaataacaaatcacatcaagataaaaataacatggcaggtgttgcatggacatcttctcgtatggcaacactgatcttaacctctggatcatcaggtttacctaaagccgcagtacatacttttcaagctcatctttgtagtgcagaaggtgttcttgaattgataccctttgaaaaaagcgacagttggttattgtctttacctctctttcatgtatctgggcaaggaattctttggcgttggttattacgaggcgctaccttggtagtgcgtaatatgcacccctttattgctgctttgcaaggctgtactcatgcttctttagtgccaacgcaactttggcgtttattacaaaatacacaacaggatagttcgcagcccatcacattaaaagcggttttattagggggagcgatgatcccaactgaattaacccaatgcgccgaaaataaaggtattcagtgttggtgtggttatggcatgactgaaatggcctctactgtttgtgcaaaacgcgcagatggtaaagcgggagttggtacgccattaaagggtaaagcggtcagattagtggataatgaaatccagatcaaatctgatagtgttgcattaggatattggtttgatggtcaattaaagccgttatcacagactcaggatgattggtatgcaacacgggatagaggttgttttaaagagggggaatggtgcattttagggcgattagataatctgttttttagtgcgggtgaaggtatacagccagaagatattgaaaaggtgctaaatagtcacccgaatgttcgccaaacatttattgtcccgattgacgatattgaatttggtcaacgtcccgttgctgttgttgatactgatattgagacaattaatcaattaccacaatggtatcatacgcgtttagcaggctttcaacgtcccatcgcttgtttactattaccagaacagctaaagagtggagggatcaaaatctctcgtaaacaagtgcaacagtgggtgaaagggcaacaagtaaattga

SEQ ID NO: 293628 - DNA, 1455 bp, Proteus mirabilis
atggaaaagaaaaagctcacaacggcggctggtgcaccagttgtagataataataatgtaataacagcaggacctcgtggcccaatgttactacaagatgtctggtttttagaaaaactcgcccattttgatcgtgaagttattcctgaaagacgtatgcacgcaaaaggctctggtgcctttggtacatttacggtcactcacgatattacgaaatatactcgagctaaaattttctctgaagtgggtaaaaaaacagaaatgtttgctcgtttttcaacagtggcgggtgaacgtggtgcagctgatgctgagcgcgatattcgtggatttgccttaaaattttatacagaagaaggtaactgggatatggtgggtaataatactcctgtattctatctacgtgatccccttaaattccctgatcttaaccatatcgtaaaacgcgaccctcgcactaatatgcgtaatatggcttataaatgggatttcttttctcatttaccagaatctctacaccaattaactatcgatatgagcgatcgtggtttacctttaagctatcgctttgtgcatggttttggtagccacacttatagctttatcaataaagataatgaacgtttctgggttaaattccatttccgttgccaacaaggcatcaagaacttaatggatgatgaagcggaagctctagtaggtaaagatagagaaagctctcagcgtgatctttttgaagccattgaacgtggtgattatccgcgttggaagttacaaattcagatcatgccagaaaaagaggcatcaaccgtgccttataacccatttgatttaaccaaagtttggccacatgctgattatccgctcatggatgtcggttactttgagttaaaccgtaatccagataactacttctctgatgttgaacaagctgcatttagccctgcgaatattgttccaggtattagtttctcaccagataagatgttacaaggtcgtctattctcttatggtgatgcgcatcgttaccgtttaggcgttaaccatcatcaaatccctgttaatgccccaaaatgcccattccataattatcatcgtgatggtgctatgcgtgttgatggtaatagtggtaatggtattacttatgagccaaatagtggcggtgtgttccaagagcaacctgactttaaagagccaccactttctattgaaggtgcagccgatcactggaaccatcgtgaagatgaagattatttcagccaacctcgtgcactgtatgagctattaagcgatgacgagcatcaacgtatgtttgcgcgtattgcgggtgaattatcacaagcaagtaaagaaacacaacaacgccaaatcgacttatttaccaaagttcatcctgaatatggcgctggtgttgaaaaagcgattaaagtgttagaagggaaagacgctaaataa

SEQ ID NO: 293629 - DNA, 543 bp, Proteus mirabilis
atgaaaaagtttttattattaggagcaatgagcgcattgcttatttctgctaatgccaatgccatatcgatgaatgtgcaagcgggtaaacattataccgatgtacaagcaggtttaggtgatgccgattctggactttcttttaacggtaattgggcacgtagtgatcacgatggtcaattaggtagtttaggtgcaaaatttgcgttacctcttggcccattctcagcaagtgttggtggtaaagcactttacctctcccccaaaaatggtgatgacggcgcggcattagctggtggtgttggacttaattggcgtgttttaccttcactgagtgtttatggtgaagcttatgcttcgccggaaggattaacatcaggaagtaaatcctattatgaagctgatgttggtgctaaatacacggtatttaaaccacttcatgttaatgcgggttatcgggtgattgaaattgaaaacgcgcataatcacagtaacaataaacttgctgatggtttctatgtaggagctggtttaagtttctaa

SEQ ID NO: 293630 - DNA, 234 bp, Proteus mirabilis
atgaaactaaaaactattttaccgatttgcgccgcctctttctctttactgctattagcaggttgttcatcgccacaaaaaattgaaaccgtcgatgggcaaactattttgaccacagataaacctcaagaagatgagtctaccggattaattatttataaagatgctgaaaccggtgcaatcaaacaaattaatcgtgatcaaataagaagaatggttgagcttgatgattaa

SEQ ID NO: 293631 - DNA, 279 bp, Proteus mirabilis
atggcatctcataaagtgaccctgcaccagcagggtctatcaaccgcattagaatttagctctgaaacgcatccttccttgttggatacgttagagcgcagcaaaattcaaatcgaatatcaatgccgagaaggttattgtggctcttgccgattacgcttagtaaaaggcaaagtatgttatcgcaatgagcccttggcatttattcaagctgatgaaattttaccttgtagctgtcaccctgtgagtgatatcgaaatcgagatctgcacaaagtaa

SEQ ID NO: 293632 - DNA, 852 bp, Proteus mirabilis
gtggcatttttacctttaatttcgattccagaattagaaacttgggtagaaacatggtcgttctctgaaaccatccattcacgctcttatacccatattattcgtaatatcgtcaacgatccgtcggtcgtttttgatgatattgttgaaaatgaagagattttaaaacgtgctcgtgatatctcatcttattatgatgagttaatcaatttaactaacctttaccatatgtttggtgaaggtacgcatcaaataaaaggtaaaactgttgaagttactttacgtaagctcaaaaaacagctttacctatgcttaatgagtgttaatgctttagaagcgattcgtttctatgtcagctttgcctgttcatttgcctttgcagagcgcgaattgatggaaggtaacgctaaaatcattaaattgattgcccgtgatgaagcattacacttaacaggcacacagcatatgctcaatttactgcgttcaggtcaagatgatcctgaaatggccgaaattgccgcagaatgcgaacaagaatgttatgacctatttgttgaagcagcagagcaagaaaaagagtgggcagaatacctattctcagaaggctctatgatcggtttaaataaagagatcctttgccaatatgttgaatatattactaatattcgtatgcaggcagtaggacttaaattgccgtttaaagcacgttcaaaccctattccatggattaatgcttggttagtatctgataatgtgcaagttgcaccacaagaagttgaagtaagctcatatctagtaggtcaaatcgactcacaagtagatactgatgatttaagtaacttcgaactgtaa

SEQ ID NO: 293633 - DNA, 297 bp, Proteus mirabilis
  misc_feature (280)..(289): n is a, c, g, or t
atgtcttataccactttttcacaagttagaaatgatcagcttcaggagcccatgttttttgggcaacctgttaacgtagcgcgttatgatcagcaaaagtaccctatttttgaaaaactaattgaaaagcaactctctttcttctggcgtccagaagaagttgatgtttctcgtgatcgtattgactacaatgcgcttcccgatcacgaaaaacacatttttattagtaatttaaaatatcaaactctgcttgattcgatccaaggtagaagccctaacnnnnnnnnnnagccctaa

SEQ ID NO: 293634 - DNA, 2292 bp, Proteus mirabilis
atgaatcacagcctgctcgtcacaaaacgtgatggtcataaagaacgcattgacttagacaaaattcaccgtgttattacttgggccgctgaaggtctagaaaatgtctctgtttctcaagttgagttacgttctcagattcagttttatgatggtatcaaaactgccgatatccatgaaacactggttaaagctgctgcagacttaatatctggtgaaacacctgattatcagtatcttgctgctcgtcttgctgtctttaatttacgtaaaaaagcctatggtcaatttgagccaccggcattgtatgatcacgttaaacatttagttgaactcggtaaatatgaccgtcatcttctcgaagattacaccaaagaagagttcgaacagatggataagtttattgttcatcaacgtgatatgaatttctcttatgcagcagtgaaacagctagaaggtaaatattttgttcaaaaccgtattaccggtgatatttacgaaagtgcacaatttctctatgtgttagttgccgcttgcctattttcgcgttatccaaaagagacgcgtatggattatattgagcgcttttataacgcggtatccacatttaaaatctcactcccaacacctattatggcgggtgtaagaactccgacacgtcaatttagctcctgtgttctgattgagtgtgatgatagccttgattctatcaatgcgacctcaagtgctattgttaaatatgtatctcaacgtgcaggcattgggattaatgccggtcgtattcgtgcattaggtagtgctattcgtaatggtgaagcattccacacgggttgtatcccattctataagcacttccaaactgcggtaaaatcttgttcacaaggtggggtacgtggtggtgcagcaacgctattttatcctttatggcatttagaagttgaaagcctactggtattaaaaaataaccgtggtgttgaagataaccgtgtacgccatctcgattatggtgtgcagttaaacaaattaatgtatgaacgtttaatcaaaggtcaggatattacattatttagcccgtctgatgtgccgggtctctatgatgcattctttgctgatcaagacgaatttgaacgtttatatgtacaatatgagaaagataagagtattcgccaaaaacaagttaaagcggttgaattattctcactcatgatgcaagagcgtgcctctacaggtcgtatctatattcaaaatgttgaccactgtaatacacacagcccgtttgatccggcgattgcacctatccgtcaatcaaacttatgtttagaaatagcactaccaaccaaaccattaaatgatattaaagatccaaatggtgaaattgccctgtgtacactttcggcctttaatcttggggcgattgaaaatctagacgatttagaagagctagcacgtttagccgttcgcgcgttagatgctttgttagattaccaagattatccaattttagcagctaaacaaggtgctatgggtcgtcgtacactgggtattggtgtgatcaactttgcttattatctggctaaacacggtgttcgctactcagatggtagtgcaaacaacttaacacaccgtgcctttgaagctattcaatactatttattaaaagcatcaaatgaattagcaaaagagcaaggggcatgcccatggtttaatgaaaccacctatgcagaaggtatcttacctattgatacttataaaaaatcattagatgtactgactaatgaacctctgcattatgactgggaaagcttacgcaaagagatcaaacaatacggtttacgtaactcaacgctctcagcattgatgccatcagaaacatcatcacaaatatcaaatgcaaccaatggtatcgagccacctcgtggttatatcagtattaaagcttctaaagatggcatcttacgtcaagtggttccagaatatgagcgcctaaaaggggcttatgaattactgtggcaaatgccaagtatcgaaggttatttgcagttagtcggtattatgcaaaagtttgtcgaccaagcgatttctgccaacactaactacgatcctactcgtttccctagtggtaaggttcctatgaaccagctgctaaaagatttgctgctcgcctataaatatggtgtgaaaacactctattatcacaatacccgtgatggtgcagaagatgtacaaggtgatctggaagaagtcgttgaaacggcagattcagattgtgaaggcggcgcgtgtaaaatttaa

SEQ ID NO: 293635 - DNA, 738 bp, Proteus mirabilis
atgaatgataaaacaacctctttgcatgctaacgtagatcagcatgaaatcgacaaatttgagagtgtcgcatcaagatggtgggatcttgaaggtgaatttaaacccctacatcgcatcaatccactaagacttaattatatccaagaacgtgctgatggcttatttggtaaaaaagtacttgatgttgggtgtggtggcggtattttatctgaaagtatggcccgtgttggtgcagaagtcaccggactcgatatggggaaagagccattagaagtcgctcgtctccactcactggaaaccggtatccctgtcacctatatacaagataccgttgaaaaccatgccgcagaatatccacaacgctatgatgtggtcacttgtatggaaatgttagaacacgttccagacccttcctccattgtaagatcatgtgccaaactggtgaaaccaggtggacatgtattcttttctaccatcaaccgtaataaaaaagcgtggtttatgctggtggtaggcgcggagtatattctgaatatggttcctaaaggcacccatgatgcgaataaatttattcgtccctcagaattattaagctgggtcgatgaaaccaatttacgtagcaaaaatatgattgggttacattacaatcctattacagacaaattccgattagcgccaaatgttgatgttaattacatggtgcacactcaagcgaccgataattcggatttgtga

SEQ ID NO: 293636 - DNA, 2634 bp, Proteus mirabilis
atgagcgacattgccagagaaatcacaccagttaatatcgaagaagagctgaaaagctcatatttggattatgcgatgtccgttattgtaggacgcgcattacccgatgttcgagacggactgaagccagtacaccgccgagtgctatttgcgatgaatgtactgggaaacgattggaataaaccttataaaaaatcagcccgtgttgttggggatgtaatcggtaaatatcacccgcacggtgacagtgctgtctatgaaacgattgttcgtttagcacagcctttttctatgcgctacatgttggttgacggtcagggtaacttcgggtcagttgatggtgactccgcggcggctatgcgttataccgaagttcgtatggcgaagatcgcccatgaactgctggcggatttggaaaaagagacggtcgactttgttcctaactatgatggaacagaaaatataccggctgttatgccaacccgtattccaaacttgttagttaatggctcttcaggtattgccgttgggatggcaacgaatatccctccgcataacctcggtgaagttatcgacggttgtcttgcctatgttgataatgaagacatcaccatagaagaattaatggaatatattaccgggcctgattttccgactgctgcgattattaatggtcgcagaggaatattagatgcttatcgtacagggcgtggaaagatttatatccgtgctcaggctgatattgaaactgatgagaaaacgggtcgcgaaaccattatcgtgacagaaattccttatcaggtgaataaagcccgtttaattgaaaaaattgcggagcttgtaaaagataaacgtattgaaggtatcagcggattacgtgacgagtctgataaagacggtatgcgtattgttgttgagatcaaacgtgatgcagtcggtgaagtagtattaaatcacctcttttcacaaactcaaatgcaagtctcttttggtattaatatggttgcgcttcatcaaggccaaccaaaattattgaacctaaaagaaattatcgcagcctttattcgccatcgtcgtgaagtggtgactcgtcgtaccatttttgaattacgtaaagcgcgtgatcgtgctcatatcttagaagcacttgcggtcgctttggccaatatcgatcctgttattgaattaattcgtcaagcaccaaccccagcagaagcgaaagcggcattaattgcccaaccttgggatctcggtagcgtgtctgcgatgttagagcgtgctggtgatagcaatgttgctcgccctgagtggttagagccacaatttggtgtgcatgacggtaaatactatctaacagaacaacaagcacaagccattttagatctgcgtttgcagaaactaaccggacttgagcatgaaaaactgctagatgaatatcgtgaattactgctacaaattgctgagttattgcatattttgagaagccctgagcgtttaatggacgttattcgtgaagagctaacagcaattaaaacacaatataacgatcctcgtcgtactgaaatcactgaaaataccgctgatattaatatcgaagatctgattaatgaagaaaatgtggttgtgacactatctcaccaaggttacgttaaatatcagccattgactgattatgaagcgcaacgtcgtggaggaaaaggtaagtcagccgcaaggatcaaagaagaagactttatcgatcgcctactggtggctaatacacacgatactattttgtgtttctcaagtcgtggtcgcctgtactggatgaaagtttatcagttaccagaagcgagccgcggtgctcgtggtcgcccaattatcaatttattacctctagagcaagatgagcggatcaccgctattcttccagtaagagagtatgaagaaggtaaatttgtctttatggcaacggcgagcggtacggttaaaaagacaccattacaagacttcagtcgtcctcgtagtgccggtattatcgcggttaatttaaatgatggcgatgagcttatcggtgttgatttaaccgacggtagtaatgaagccatgctgttctcagcagatggtaaagtggttcgtttcgcagaagagtgtgttcgcccaatgggtcgtactgcgacaggtgttcgtggtatgaaactggttgatgatgataaagtggtttcactgatcattcctcgtggcgaaggtgatatcttaacagtgactgaaaacggttatggtaaacgtaccgttcaaagtgaatatccaaccaaaaatcgtgcaacacaaggcgttatctcgattaaagtgagtgagcgtaatggtaaagtggtaggcgctattcaagttgaagaaactgaccagattatgatgatcaccaatgccggaacgttagtgcgtacccgagtatcagaagtcagcattgtgggacgtaatacacaaggtgttaccttgatccgtactacagaagacgagctagtcgttggcttacaacgtgttgaagatgaagatgatgcattagatgatgatgaagttgatgaaatgatcagcgacaatatctctgatgttccagagtctgaaccaacagatgatgcggatagtgaagaagaataa

SEQ ID NO: 293637 - DNA, 2760 bp, Proteus mirabilis
atgttgtgggcaatgggcgcattattaaccatgttttatctcatcaacatctttaatgatactaaatcagatatccgacaagaatatagtaataactataccgatttattgggcttctttcgccaaacctcgagtactatccgcgatttgcaatatttagcagagcggcatcaagagcaactcaatttaaaccctaagatgaataattcttttttttatgaagggcctttttcacttcataaattaagtgaaagtgccgattgtgaattattcaaagggcaaacaaacaattattttcgatcatttaatagtattctgtattactggaaagataatacccctgctttacaaggtatcaaccaagtatttatggttggctctcatagtatgtgtatgattaatttcccattgcgtgcatcacctattgatactgaactgttgaaaaaaatggtttatgaaaatacacgtaattacattaatcaacgagctcaagggaaagagagtaatcaatactggatagtacctgatgccaaaggggatagcggtatcctctatgtcatgtcgccagtttatgcgtcagggaaatttattgcactcattggtatcgaaagggcgatccgattggagtatttttcacctacgaaagatcgcgttatctctattcatcttttaaacaataaaaataatccagtcttaagttatcctgaagagaataattatcgcagtgtaagggatgtaccggatgttagtgctccttactttggttttgatgatgattttagtgatttagttgcaaaacgtaagctacttccttcttcttttagtgtggtttattcactaccattaaaacaaattttaaatgaatttaagtttactatttttaatgccattattttaaatatcatttcggcgattgttatctttattttcgtttggatttttgagcgaaaaatattttcacctgcagaaaataatgcttcacgcttagaggagcatgagcagtttaatcataaaatagtcgcgtcagccccagtaggaataagtatcttaagaatacgcgatggcatgattattttaagtaatgagctcgcccataattattttcgcttattaagccatagtgataaacaaaatattctctctattattgctgaaaaaagtagcaatatagtggatgtggtcactaataatcataatcatttgcaaattagttttgtgaattcacgttatcagaatgaagatgtggcgatttgcgtattagtagatatcagcgctcgtgttaaaatggaacgctctctacaaaatatggcaacggccgcagaacaagcaaaccaagctaaatcaatgttcttagcgacagtcagccatgaattgcgtacaccactgtatggcattattggtaacttagaattattacaatcattgacgcaaaatgaagagactgccagattattaaaaacaatggataactcttcatcgctgctactcaaaattatcagcgatatcctcgatttctcgaagatagaatcgaaacaattaaaaattgacgttaagccattcaattgtcgccaagttgtctcttttgttatctctaactatttgccgttaattgctaaaaaagatttagctatttactgctttattgagccggatgtacctaaaatcgttaataacgatccggttcgtgtccaacaagttatctctaatctactaaataatagtattaaatttaccacgacaggatgtattactttgcacctgtatcgagatgaatattatctctatttcgatattcatgataccggcagagggataaatgaaaaaatgcttcatcagctttttgaacccttctttcaagtctcgcaaaatacagaaagtgcttcagaaggtacaggattaggattagcgatttgtgaaaaactgattaacttgatggatggtgatatcagtgttgtttctcaagaaaatgtaggtagtcgttttactgtgcggatccctttatatggggcactaaattcgagtgatggacaaaccaaatataatctctataaagagagtactattcgctgctttatcagtattaaaaatctctatctagaaagctttgttgaacgatatctaagttatgtgggcttacattgtcaattattcacggaagtgactcaggtctctgagaatgattttattatcaccgatcatgatgaatgtttagataactcttgccaatttatccgtatttatgaacactattttgagcctgcaaagaaaatctctgagaataattggttatgtagtacatataaattaaatgaattaattaagattatcctacaattaccacaaacaaaattagagtctgatgactcagaaaataacgcgttaatgacggatcacgatctacaattattgacagtactcattgttgatgatcaccctatcaatcgtttattgttgaccgatcaactgaaaaaaattggttttaataccgcaacggcagaagatggttgtgatgctttagcctttatgcaagaaaatcatgtcgatattattttaaccgatgtcaatatgccaaatatgaatggctatcaattagcgacaacagtgcgtgaattgagtcgcactattcctattattggcgttacagcaaatgcgattgccgaagaaaaacaacgttgtattgatgcgggaatgaatgattgtgtctccaagccagtctctcttactgtattaaaagatgtattactcacctatgtggcataa

SEQ ID NO: 293638 - DNA, 657 bp, Proteus mirabilis
atgaataaccttaatattattattgccgatgatcatccaattgttttattcggcattcgtaaatctttagaacaaattgaatgggttaatgttgttggtgaatttgaagattccacttcacttatcaataacttatctaaattaaatgcagatgctcttatcaccgacctatctatgcctggtgataaatatggtgatggtattacgttgataaagtacatcaaaagacattatcctaatttgtctattattgtactcactatgaacaataacccagctatcttaagtgctgttcttgaccttgaaatcgaaggtattgtattaaaacaaggtgcgcctgctgatctacctaaagcacttgcagcattgcaaaaaggcaagaaatttatgcctgaaagcgtggctaaactgttagaaaaagtgaatgccaatggttatggtgataaacgcttatctcccaaagaaagtgaagtgttgcgcttatttgccgaaggtttccttgtcactgagattgctaaaaaactcaatcgtagtatcaagactatcagtagtcagaaaaaatcagccatgatgaagctcggtgtcgacaatgatatcgctctgcttaactacctatcatcagtcactattgataaggaaattaacggagaaagctaa

SEQ ID NO: 293639 - DNA, 2694 bp, Proteus mirabilis
atgcgtacactgacccaattaaagccaaatacattaactcgcttatatgctctgtttcttctgtttatggccatatccctttttctatatgcttatagctattttgatacttggctagaaagtaaaaaaaatgccattaacaacacgactaataagtttgcatctcaagttgaagattaccgctatcacgctaaccaactattccagttatcaaacaaaattaatgatccaaccctctttctgcctttaaaaatcaatccggtcaaactacgctctgatgtttattggcttgaaggacgcgatcagaccgttgacgcaattgtttttggtaaatcgaatgaacaaacctttcagttagccggttattttgcaaacgcgttagaaattatttggggggtacgtaataactatagctctctctattatcttaatggtaaaggcaatgatcttatccttattactacccactcaatactaaaaccagaattgcgctataaagaaagctatttaacactaacggctgaaaacaaacgttctgagctattaatgcaatcaacggcattagatgaaaaagagagcctttctcccattaggaaaatgccgacagaaaatatttattactatacctatcgcaccatgtttaatgtgccagggcaactgaccagtgttattgcctttgatttacccataaataattttctacctgctgagctatcacctcaatatttaagattattacccacaggacagcagagtgtttatgataaaaacaatattgaggtatcaacggatgggacttcactcatcttctcacagcccattgcaggaataccctactctttatcttatgagtatccactaaaatcgattttcaatgagattgtgtataaaaatatctggttacttatcagcctactcatttttatctcgatttcagtgtttggccatatctatattcgtaataaatatgtattcccttatatttcgatgacgcgtaatcttcgcatcaaagaagagatgactaacgatatcatttctaatcttcctattggtctattggtgtataatttttcatcaaaccacaaaattattagtaatagccacgcagagaaactattacctcatatcgatttatctaagatccgccagatggcgattgaacataatggtttaatccaaacggccattgataacgaaatttatgagatccgcaccagtagcaacagcaatatcgataatactgctctattcatttttctgaataaagacaacgaagcattaatcaataagaaattgcagctagcacaacaagaatatgaaaaaaacacgattgcacgccgcaagatcttatccaatatgtcattggaactcatacgaccaattaaagatattaatgagatggtatatcaatttaaagatctacttcctaacgatactcaccaacaattactgagtctgctattagaaaaaacgaattatatttctgagtggatagaaaacattacgctaattaataagttagaaaatcaagaatggaaaatacatcaagatgaatttgaactttcaacgctagttgaatctattctaataaccgcatcaccatttatgataagaaagggattaacactttatttccataataatattaaacctagtttacttttatttaatgatggcccagcattaagtaagattattttatcattgattaattatgccattagtacgactaattatggaaaaataaccgtcaatctaaatttagaaaaaaataatgataaagaagaaatagtaattgatattattgatagtggcagtgggttaacagctcaagatctggctaatattaaatatccatttttaggtcaagctatgggtgataaatattattccaactcgggtattattttttatttatgtcatttgttgtgtaacaaaatgcaaggcactttgaccattacaagccaagaaagtattggctctcatttccgtatcgtacttccataccagcatatagatacagaagagcgctcttttgacatattattagagggtataactgcaaaactcgccataaaaaaccctgaaatagaaaaaataatctgccaacagcttgataaatatggcgctacatactttgataaaaataaagagaatctttactcagaatacgatatcatacttagagacactccggataataatcctgaatcagcaacagtattattagttagctctattaccggatttgaaaaaatagcaagaaatttaataaagtgtaactataacttcggtgatccattaattgaggctattacttatttgattgaagaaaatgaacaactttctctcgaaacaactcaaacgagtattcgtaatgagaataataaccttgatcatcacgaagtaattcttaataattataggaagaagttgaatgatagtgattataaggaactatttatcaatactgttcccattgatgttgaaaaactacacttagaagcaactaataaagactttcattctctagctcagacagctcatcgtctgaaaggggtttttgctatgttagatttagaatatctcagagagaactgcgaatatttagaagatgacataaaaaatcataatgaattagagataaaagaacgtatcaatcaactggataaatggatccgacagttgctgtag

SEQ ID NO: 293640 - DNA, 1020 bp, Proteus mirabilis
atgaacaaatatctcactgaaaataaatcgatagttttaacaggggatcggatcactggacctttacatcttggtcattatattggctctcttcagcaacgtgtcgaatttcagaataaagcgacacaatatatcttaatggctgatatgcaagggttaaccgataatggctcaacacctgaaaaggtcagtaaatttctttttgatgtggtggctgattatttagctgttggtattgatccgaaactttccacattatgcttacaatccgcactaccggctttatcagaactgactatgctgtatttaaatattgtcacagtatctcgcttagagcgtaatccaacagtaaaacatgagattttgcaaaaaaatctttctcgttcattgccggcgggatttttaacctatcctgtcagtcaagcagcggatattactgcatttagtgcagatattgtgcccgctggcgaagatcaattacctatgattgagcaaaccaatgaaatcgtcaccaaaataaatagcttaatagggcaaccagtattgacaagctgtaaggtcgtagtagggcaagtcggtcgtttacccggtacagatggtagtgggaaaatgtctaaatccttaggtaatacgattaatttatcatccacagccgatgaaattaaaaaagcggtttattcgatgtataccgatccgcaacatattgatgttgcatcaccaggtcatattgaaggtaatgtggtgttcacctatttagatgctttttgccaagacaaagccacggtgacagcaatgaaggctcattaccaaagaggaggacttggtgatatgaaatgcaaagctatgcttaatgatatcttacaagagcttctgcaaccaatacgtgaaaaaagagcgcaacttattaatgataaagcttatttattacaagtgatcaaagaagggagcgataaagcgaaagaagtgactcaacaaaagcttgatgaagtaaaacgtggtctaggattattgatcttgtga

SEQ ID NO: 293641 - DNA, 738 bp, Proteus mirabilis
gtggttaaaaataactataagttagcattcacaaaaagactacaagaagcctgcctagactctgggattgcgggtagagggttaggtaaaagaattacagaggcattggctaaacaaggaataaaagtcagtgcgcctgctgtctggaaatggttaaatggtgaatccgttcctgactcaacgaatattttagccttaagtcagtggctagatgttcgagctgaatggttagaatatggcagaggcgccaagaaaaatgatggcatttcagttaatgaaataatgcctgttaatgattgggataatagtactcctatagagcgagatgaagtggagatcccattttattcaacaattgaattggccgcaggttttggcagttgtaccactgataatcaaaaggtggaattattgagattctctcgttctacatttaatcaatatggtgtacagccaagtgatgctgttgcttttaaagtgcatggcgacagtatgtcaccggttattcctgacagctccattgtaaccatcagtacagggcatactaagattattgatggtggtatttacgctattcagcaaggtgacttgttaagagttaaaatcttgcaccgcttacccaataataaaatcattattcgtagctataatacgattgattatcctgatgaagaatcaaccttagaagaagtaaaaatcttagggcgtgtttttaattggtcggtgatgggctggtga

SEQ ID NO: 293642 - DNA, 816 bp, Proteus mirabilis
atgagattagctgacttacctaagtatttttctccaaaaagtgttgtattaagtgatgttagaacgcctaaagctgttgattcattatccattacggatgtaatggcttcaataagcttagcgacacgtaaagggcgaatgggaatagagctatttttagcgaaacaccacattaaccgtcccgaagaagcgatagaaagcctgtatcaatgtgcattaactcaagttaaccaatataagatgattgataagttagctgaacatgataaagctaaagttttacatattatcgctgaatatgcttttcaggattatgccagaagtgcagccagcaagagagcatgtcctgattgtgatgatggctttatcgaagttgaagtttttaccaccaaatgccatggtcgaaaaacaacccagcaggttactcaaaatgccaaacctcatctaaaaacaacctcatcaaataaaccttcttttcgagaggtaagggaagtaacacgcgttatttgccctacatgcaaaggtaaagcggaaattcgtttagcatgccgttgccatggacgtggaaaaattattgataaaaaacagactgaattacaaggagttgccgtatttaaaccttgtcgccaatgtgctggacgcggttatcctcgccttaagttcagcgaagtcttacaacaattgcaacatgtggtgagtatttcaaaaacggctgcttatagtcattataaaccgctattcgattttttagtggcggaatgctttaaagaagagtctttatcagataaatttctacaagaagttactgtaaaataa

SEQ ID NO: 293643 - DNA, 300 bp, Proteus mirabilis
atgaaagaaaatccagatctatgggaacaaatatgcattgttctttattcaatgaaagagcaaggtatatcagccttactcgctgggggaatggctattcttcgaagtttatataacgcaggaggatggaaaaaaacttttttagatggactgatgtgtgcaatgtttgcttggtttatcaaagatattctccttttatttagtattaatcatcaattttcttacttagccagtgtctttattggttatgtaggcattgaacctgtaagcaaacttcttataaggaaaaataggagttaa

SEQ ID NO: 293644 - DNA, 405 bp, Proteus mirabilis
atggctaaaatagcgcggggtgaacgtaataataacccaggtaatatacgccatggtgcaaaatggcaaggattagcaagcacgcaaacagataaagatttttgtcaatttatttcaccagaatatggcatcagagcaatttataaattaattcaaacctatcaaaataaatatggtttaaatacaattaaatctattatttatcgctatgcaccacctaatgagaataatacattaggttatattgagcgcgtatcaaaagaaatagggattgaaagtaataaacctattgatacccaaataaaaaatgtttgtatatctttatctatagccattattaatattgaactgggttatcaaccctatgccaaaaaagtatttgaagatgcttggttgttattatga

SEQ ID NO: 293645 - DNA, 450 bp, Proteus mirabilis
atgaactatcttacaaaaatcataataatcattatgttatgtttaattgctggacttttttgggttattgatagaaataaaatattaaaacaaaaatatgtgaaaattaatgaaacactgacgcaacagattgtagaaaacaaaaactatcaattaagaataaagcaattatatcaaatggatactcaacgtttacaggagttagccagtgccaagagcgaaattgaccggttgcgtagttatgctgagcgtgatcctgagcgggtgtacatcagagccagttgtgcaaaaaacgacgccaattccaccccccgcgtggatgatgcaacccgcgccagacctactgacgccgctatccgaaattattggatactcagagaaagaattgctcagtcagagtccatcatcttaggtctacaagattatattcgccaagagtgtattaattaa

SEQ ID NO: 293646 - DNA, 513 bp, Proteus mirabilis
atgaatgataatgatattaataaagctattcgagagcaattaataaaacaattaataaaaacagatatcaatgctgaagttattacaggatatcaaccggaagaaatcactgataataatattattatgttttttcctattaaggaggtgagccaaggttggcagaaaagaagttatgatgttcaaggtaataatgccaatcacactgaacaacaacttgttgagttaacttatcaagttcagagctttactaaaaaacaatctgattttactgcaggtgatttaattagaacaacgcgaatgatcattcattcgctgccttttattgaatcaatgagaaaaaaaggaataggaatacaacgtgcgacagaaattaggcgtgcgccaataattaatgaaggaaatagctatgaacataatccttcatttgattttaatgtcacttttccctgctcattatctctaaacactgcagctacacatttacttatatctaatctatctcgtatttaa

SEQ ID NO: 293647 - DNA, 1488 bp, Proteus mirabilis
atgtctattaaacaaacacgctatgttgatattgcgagtgcggtgattggtgcctctactgcaccaatgcgtaaactgaccgcacgtattttttcaacaaaccctaaaattccagcagggaaagtactcgaatttacttctggtcaagttgatgcgtttctgggagctgattctccagaagcgcaatttgcccgccaatattttagttatgtgagtccggctcccgtcagcaagcctaaagagctacaaattgcctcttatgagccaatgggacgagcgccaacactctttggtggaccggttgccacactggataaattaaagctgattgaagagggtgagttaacgctggtgattggcgatgtgactaaaaaaatcagcaagctctctcttcaagacgtgacgtcctatagtgatatcgcatctttaattcaagcaaaactcaatgctgaaagtgagccacaatttgccagttgttatgtgacttttaatgctatggatagtgctttcttaatcagtggcggtgtgcaagaaaaagcgcagattagcgtcaacaactcacctcttgctgatgccttagggttaagtcagggacaaacttctgagggtaatgcatcacagactgcccttgaagcctttatggctgcagaagctatttctgactcatttggtagtgcaacatttttaaccgaactatctattgagcaaagtgttgaactggctgaatacgtagcaggtgaaaatgtcaaataccaactttatttatcggtgccagatcaacaagctgaaatgtacagcaaggcattaatgaatacagcatcgacagggttgaatttaaaaaccgaggaaaacttttttgtgcaagcgttgcctatggcgattatggcagcaacagattttgagcgtactaatgccaccacaaattacatgtatcgacaatttggtattacattcccatcgcaagttaccacagatatggcggccgatcgcttagataaattgcgcgtgaactattatggtgaaacggcggtatctggctctgagatcagtttctatcaacgtggctttttatgtggtaatggtgctaatccagtagatatgagcgtacatgccaatgagcaatggctaaaagcgtatattgcacagcagtggcttagtttactactgtcaacacgcggtattcctgcgaataaagatggtgaagcaagagcgatgatgatcattgctggggcagtaacaaaggcattaaataacggcactattcaaacgggtaaggcattaacagaagtacaaaaaatcgcaattacagatgcggcaggtgatgatttagcgtggcacgatgtacaaaacaaaggttattggtacaacgctgaaatcgttgaacaaacagggccagggaatttaccggaatacaccatgaaatatgtattgatttacggtaaaggcgattgggttcgtaaagttgaaggctcacataatttagtttaa

SEQ ID NO: 293648 - DNA, 453 bp, Proteus mirabilis
atgaacgatatttcagcaacaggcttaagccttattattcaagcaagtaaaacatttccagcgggtatcccgatcaccaccttttctgatgaaggtgatcctttagatttaccgacagttaatattacacaaacagcggtagatattaatggtaatttggtcagttggtcttcaccaacacctcaaacggtcaccattaatgtgttagcgggaagtgaagaagacgaaaatctagctattttgtttgatgctaatactgcaagacggggacgacgtcctgccagtgatgtgattactttagtcgcttcttatggtgatggctctattaccacggcacgtaatggacgtattactgacggttgccgaggtaattcagtcgcaggggcaggacgccttaaatctaagcagtacacttttattttccaagattttgaccgtgttagagcgcgttaa

SEQ ID NO: 293649 - DNA, 459 bp, Proteus mirabilis
atgttgattaagccaaaagagatcacggtgattgatagtgatcgtcaacagcatacctttattattagccggttacccgccacaattggacgagagatcttggctaaatacccattatcaaatgcccctaaaatcggtgattatgaagtcagtaaagaggccatgttaaagatgatggcgtatgttgctgtagaaaaagaaggtcaagaaatttatttaaaaaccagtacattaattgataatcacgtccctgatggggaagcgttaattcgtcttgaattagaaatgttaaagtacaacaccagttttttcggcaacggcgggagccaaaatttccttcaatacctattaggcaagctcagcggttctctcccgtcgattataaaaacgctgatggcttctttgccgtcatcatctcagccggcttcgcctctttcacagaactcaaaacaaccatag

SEQ ID NO: 293650 - DNA, 2304 bp, Proteus mirabilis
atgtcgctattacccgtatttagtcaggtactgacgttagacgcggaggtatctgataacgcattaaataatatcaggaaatcgaccaacgaaattcttgaggaaatgaagaaaatagagcagggcgcatcagcaggtattaatcgcttttttgcctttgttcaagaaatagccaccagttttaacgaattatcactggagcctgaaataaacctttcggtggacaaccaagaaattattcaagcctctgaaactgttgaaaattcgatacaaaaaatcgttaaaacggcacttagtagtactcaagaatttgatacttttttgcaaaatatcttaacggggctgacgagtttatcgcttgatgagcccataaatattgaaataaatagtggtgaaacacaagagaagatccattcaattacgtcaagcattgacgctctaaaagatgcgatgtcagtattaaattacacgagaaatttgctcagcaatgatgtggatagtgatgcaagtcatcttgcgaatttaaatgctgaatatcaggcgatggaagatcagcttgcttcattaaataatgaattaactttattaactgaggcagaaaagaaaaataaagaaaataaattagttattgatgaagtcattaaaaatctaggtgctgattacgatcaatttatcaacaccatgcaaacccaaggtattaaagcggcaatagaagaagctcaagctcaacgtcgattaagcagtagtgttgatgaaaccgggaaaagttatcagcaaaccgtcgataaaatgaaagattttatcctaaacgccataggtgctacggatattatggggacgttacaaaaggtattttctgcgtcacttgaacgttctcaagaaatcgaatcattagataaactcagtaaaaaaatgggtgttgcggcgattgatattgacgctttttcaggtgcgatggctgcaattggtggcacgaaagaagctgctcaagcggatttagccgctatggcaactgcgtttgatgatacgcaagatcccatagagcagcttttacaggtcgctgataacgttaaaaatatgagttttgatgatgcccaaaaagagctggaaaaattaggtgttgttgatgataaaaccatcgaattaatgatgaaaggtcgtcaagagctagagcgtacgatgggggtacaaaaacaattctcaggtattaacgacgacagtattgaaagtgcgatccaactcaacgccacaatacataaatttagtcaattagcggcacaattcaaaaataactttttagatatgattattcctacgctagcaaaaggcatggaatggtttgataaattagtcgatttttgtgtgaaaaataaagatattgtgattagctttttctccgccatcagcgccgctgttgctatttattatttacccgtcatgatctctgctgccgcatcgacacttgccatggcattacctattattgctattgcaacggtgattggtttattaggtgtcgcctttaaactcgtctatgacgatattatgaattttattaacggtaacgattccatgatcggccgtatattagaaaaatacccagtattaaaaagtgtgatcatgacgatatggcaggcatggcaatcattctttgaatatttaaaagaggctgtcactgttgttgctgattttgttattgctgcatgggatctaatatctaactcatttaaccaatttatacagactctagaaatagggattaataatcttattgcttgggggcaatccattattgatatctttatttttgtttctgattcagtggtgagcctatttgaatggatgtggggctgtgttgaaaagatattggattttgtcgatgaaaaaatcaacctaatacaagatatatggcaatcagccaaaagctttttcggtatggacgacgaagaaaaagaaattcgtgtggtgcaaaaggtagagcggcgattaacaaatgagggggagcttgactatatcttgccacaatctcaaacagcgacacgatattatagtcctatgcaggaggttaaatcgttaaataacggattagcaatatcgtcaaataacagtttaaacccgatgaccagtcaaatgatcagtaatcaatcaagcattaaaaacgaaagtaatgtgcaaattggtgaaatcaaaattgaaactcaagccacaaatggtgcggaggtggttaaagaaatcaagaaatcttatacagagcaagaagctaaaaatatatcgcagaatcactctagtggctggagggtgtaa

SEQ ID NO: 293651 - DNA, 489 bp, Proteus mirabilis
atgataacggaagttagaatttttgatttagcctcttttaccacattgtttgatagtgttaacccaactcaagtcaccatagacgatagccaccaagcgattacatttacggtagaaaatggggaaagccgcagtgaccatgtggtgatcaaccccatcagtatcagtatcagcttattgttaacgggtgatattgctaatgcttatgccactataaaacagttatatgacgaaaatacgttagtgggtattcaaacacgtgttagtacctatcaaccaatgctattagaaagtcttagtcatgatgaagatccgtcaaaagtagacgctattgagttaaaactcaagtttattgaatggaaaagcattgagcctgaatacaataaaaaatcagctaaatcgactaaaaaacctaagcaatcctcaacgattaatcgaggaaatgtgaaaagtaaaaaatccatgccaataggaaaaaaacagggctag

SEQ ID NO: 293652 - DNA, 321 bp, Proteus mirabilis
atgcaagaaataccattacaagccattcctaatcaacgattttctgtagcaatagccggtgtgaattggcaattaacgcttaaagtggctaatcaaaccatgttttgtgatatcgagcgagaaggtgaaatacttattacaggaatgcgccttgttgctaatacaccgataattccttatcgctatttaaatcagggaattaatttaatgtttttaacagagcatgatgcattaccttggtatgaggaatttaccaagacgcaatcattagtgtattggagtgaggaagatggatcttcgacgaataaggctcggaattga

SEQ ID NO: 293653 - DNA, 813 bp, Proteus mirabilis
atggatcttcgacgaataaggctcggaattgaagtcggagaacggcttcaatggtatgaaggattacgtatttcagccagtggaacaaagtatgccaatccattacaaaatgaatgtaatgtcactatctcagggctaaatgcacaaacaagagattatctgctgacagaaaccagtccctataataacaataagcaaacgcgacgactctatttggaggtcggccgagttaataccggattactctctttgtttattggcgatattgtcagtgctgaaatagattcacctcctgatgtgacgttaactttatcggcaaaaaccagtcatcaaagcgcaggaaaaattatttcttccagtggcggcacaatgcgcaggctgagtgaaatagccttggctattgctgatgattgtggggtgaaattagattttcaagctaccgataagaatattgctaattggtattattgcggctcagcattgcatcaaatagagcgtttacaggaagctggggacgttaaagcctttattgatgatgatacgttatttgtaaaagatgacgacaaagcactaaaaagccgtttgcgtattttaaatatgaattcaggcatgattggcattcccaaagcgacagaaagtgggttaaccgtaagttacttgattgatagcacctcggagcttggtggaatgcttcgccttgagagtaaattaaacccttcattaaatggtgattacatcattgagcaattggcgtttagtgttgcctcacatgaggctgatttcaactataccgcaatttgtaaacgagcttaa

SEQ ID NO: 293654 - DNA, 693 bp, Proteus mirabilis
atgagtaaacccaataacgatattgcgagtgttggttcactggcaggggctttctcgtccgcatttcgtcatttgatgatgaatacggatgatatgttgcccgcaacagtcattgattatgatgaaaaaagcaatcgagccgtgatcaaaccactggtgatgatgttaaccacagataatcaaactatttcacgagcacccgttgcaaatattcccgtatttcgttttggtggcggaggtttttttattagagcaccgattaaagcgggagattttggttggttaaaagctaatgatcgtgatattagccttatttttcaacgcggtggtctagaggatagacctaataccacccgattacatacctttagtgatgcgatgttttttcctgacaccttaaaaggttgggtgatcgacggaaaaaatattgatgctttggttattcagtcaatggatggttctgtctgcttttctcttcataacgataaagttgtactagaaacccccaagtatgaaatcaatgccccagaaacgatatttaccggcaatgtcacagtaaatggtaattatgcggtaaatggaaatagtgattctcaagggggcgtgatgcgtcacaacgggaaagatatcggttcaacccatcgccatagtagcatacaagcaggcaaagataacacagggagtccaatatga

SEQ ID NO: 293655 - DNA, 345 bp, Proteus mirabilis
atgaggacatttgctataaaccagcataatgatctggtgattgatgctaaaggtgatctgcaaatttgtgataacgatgaagcagtaaaaaacctttgtcagcattttattaaagcagttcgtggtgagatgttgcataaaaaagataaaggtattccttattggtcagcaacatttagccgtcaagttgatattcctttatttgaaatggcttttcgacaacgtctggctgaaatcgaggaagttgtggctatcagccattttaatgcctttttagataatggcgtactgaaatatcaggcggatatacgcacgatatatggaggatttacattacatggctga

SEQ ID NO: 293656 - DNA, 549 bp, Proteus mirabilis
atgcgttatgctgatattcgtattgaaacagagcgattattattacgctcttttgccatgaaggatgctcaagagtggttccagattatgagctctcctgaggttactcgttattggagccatcttccttggcaaaatatacaacaagcgaaagaagatattattcaggatattacgcatatggagcgtaaggaatatctgcgtttagccattattgataaagcaacagataaacttattggcatgtgtgtattcttcaatcatcatctccattcttgccgtggtgaaattggttattgtcttgataacgcctttcaaggaaaagggttgatgtatgaggcaatgattgcttttattgattatttaagaacacatctatcaatacgccgtttagaagcggatatacatcccgataaccaagcctctagggcattattaaccaagcttggttttgagcaagaaggctatttaaagcaacgctggattgttggtgatgaagtgtctgattccgctatttttggtttgttgctaccaacttatatcaagtaa

SEQ ID NO: 293657 - DNA, 1464 bp, Proteus mirabilis
atgacattatcatttgctcgattacgcaaaccagtttattggtggataattggttatgcggttttatggattatcgtcagctatttatttgatcccaccgtaccttatgatgccgtagaagcggttaactggggtactaatggcggttggggctcacctaaaaacccttggtttgttggttttattatgtggccagccatttatggtggtattgattttagcttttattggtattttatccactttgtgatgatagccatcggcttattaggtgtttggaatttagcctataagttaaccaaaaattatcacctagcttggtttgccatgttaggtttaaatttatcaggaattattaatttcgatatcattccttataacgataattatattttagtgggttgctggccttgggcgctctatttctttttatgcgctatcaatgacaaccccaaatattggtgtggattcgctgcagtgatgggggtggctactatggggaaatactcctcattagccctgattggtgcggtattcttattaagcgtattagtacctaaagttcgtcaaagctatcgctccccttatttttactttgcgatagctatttggttggcgtttgtcatacctaattttatttggttgtggcaaaacgactttgccgcctttaaatgggtcgactcacaaatagaagcacgttttaatttacgtacgttacgtgccgctttaacggttttctatccagtgctactaatgtggggaattgtacgtctttatggtgggcgagttagttggcgtacttctcaagatagtcaattattgaattttattttgctattcccattagcgattatttttatttggtttagtttccatgaagggggacgtatcactgagtggttacaaccttttatgtcagtggctaccgctctttttgtcggctcaattagtgtcatacctaagcgttcattacgtggtgtgttatatggtttagcggtttttggtatgttagtggtatctggttatacggtagtacaagctgctaatgtgcgtaatgcgggtcaaaagtttattggtgttaaaacctttgtacaagatgtcgagaatgcttggcatcagcattatcatcagcctttatcttatgtagggggtgagtatatgcatgagtgggtcactttttatggcaaagatagaccgctatcagcccaaccctggattgtcgagaaagatgttcagccccctaatatttataaccgtcatattacgttggcgcaattagaggacaaaggtgtcttattgattggcccggtggggtattactgtgataaagcccattttgatgcgggattacaatattggccgagtttaaaaatagcagatactcaagagatcatgtttcgctctgagcctgatgcactggcagagccggtatgtatcgcttttgtctcgcctaaacagcaataa

SEQ ID NO: 293658 - DNA, 501 bp, Proteus mirabilis
atgaatatgattaaaagaaaacccgcagctaaaacgcgtaaaaaaacacgtgaagagctaaatgcagaaggacgtgaacgtaagcgccagaaaaagcatcgtggcaatcctgctggtaaccgtcagcaggaagcgatgaaaaaagagcaagcgcaaaccaatgaacagaaagatccacgtattggtagtaaaaaacccatcccactcatcgtggataatcaggcgcctaaagtagataagaaaaaatccgcgccagcaaaaatggagcctatgcgcttatcgttagaagaagagttagcactcttagagaatgatactcgtttagatgaattactctctcgtctggaagaagggggtaaactcaatccagaagagcaagcttatactgaaaaaacccttgatcgcatcgatgcgttaatggcggaattaggcattgagtttgaagaagatgacgatgaagaaaaaacagaagatattatgcagttattaaaaggtaagtaa

SEQ ID NO: 293659 - DNA, 1449 bp, Proteus mirabilis
atggataataaacaacactatttagatatcgccgcagggcaaggaaaaaaagagccctctcgtatagtggcattccctgcacagccactaaactatgcattgatagaacaacgcctagaggaacagaccgaatacacagatggtgagataagctatcttagtgatgatcttgatgaaggttttttctatcattgccaacatggcgatgatgagctccatttttttatctgtctgctaccacgatcagaagattatcaaatacgtcctatgtatgcgacagatgagatgactcctgagctattagcccatgccaatgccaccactcaagacatcttattagaaacgatgttctctgacaccctacatcctttagcgagttatcgccatcagctcaatctactgaacataattgcgccagaaatgatcctcgcactggatgaatctgccgcaggtaaaggattaactcccgaatggatacgctttcaattggagacacccgatctctatcctgaagtagaaagtttgtatgttattcatgcagtttacgatacagaaaatgatccaccaaccatgttctggtttcatacccatggcttgcaacgttgtggcttaactgaagttgatttagtgatcccaagcatgttggaatcttactacggtattcctgatcttttccgttgcttcgtcaataacagtattaacaaccgccaaattgaatttggcgagccgatgctttgtggacaaacttcgtcaggattagaatatttagtcgcgctgccctttgaagaaggtatacgtcacgttaatcagtccacacctttagatagtcttagaccattagaagagatgcgttataacactcaaggggcaccacatggcgtatttctgggcgatatggctgatagagacgaatatcatcagcacccatcatcgatgttatttagaactaatgaagaaaaccctattttagaaactttctttaaaggttatgaagaacaacaagccatgatgctactacgcagtaacgaagaaacctacgaaatggcagaaaaggccaaaaggcgttggcaatattttctctccatgtttgataactaccatcagccccccgtagagaaaaaaaccggtttcttggcaaaattattaggtagtaaagagagcaatgaagaaactgagagcccatggcaatttatgattaagtttggtattccttatggtgataaggaagaaaaagagcttgagcacatgtggtttatccctcagtctcgagaaggtgaccgaatttatgctaagttacttaacgtaccattctatgtacaagaaatggaagaaggtggcatttatcccattgatattgcgttcatcactgattgggttatctcttatgaaggttatagttatacccctaatacgatttatcaactttttagccaccagcagactcactaa

SEQ ID NO: 293660 - DNA, 237 bp, Proteus mirabilis
atgtctctcattccaaatcatagctacaagatcctcagctattccccgcaaattagccctgcctatcggcagaagctattatcattagggatgctgccaggcgctattttcaatgtgatccgtatcgcacctttaggtgatcctatccaaattgaaactcatcgggtctctttaattttgcgtaaaaaagatctcgctttgataaatcttagcgaaatcgctcataacgaaaaataa

SEQ ID NO: 293661 - DNA, 2331 bp, Proteus mirabilis
atgactcctcttactattggtcttatcggtaatcctaatgcgggtaaaacaacgctttttaatcagttaacaggctctcgtcaacgtgtcggtaactgggcgggtgttactgttgaacgtaaggtaggtcgctttacaaccaaaaatcataaaattgaattagttgacttaccgggcacttattctttaacaacaatttcagaacagacctctctggatgagcaaattgcttgtcacttcatcttaagtaatgaagcggatatattgattaacgttgtagatgcttccaatcttgaacgtaatctttatctcacattacaactgcttgaactcggtattccctgtatcgtggcactaaatatgcttgatattgctgaacaccaaaatatgcaaattgatattcaagcactttctgaacaactcggttgtccggtgatccctatggtatcaaccaaggcatcagggattgataaactgaaagacactattgatagctttccagccaccaaaagaaaacccgaagagttactaacttcttatccaacatggttattaaacgaagttgaatctttagctgaaaaaattaatcacgatgaattcaatttacagcaacgccgttggatggcattacaatgtttagaaggggatatctatactcatcaacgtgctgaaattacctcacaagagataaaagccattcgtcagcgcattcaaactgagcatagtaatgagccagaattagtgattgccgatgcacgttatcaaaacattgagcgtatttgccatgcagtcattaatatggagtccatcaagcccaatcagctcacacaaaatatcgataaagtgatattaaatcgctggttaggtgttcctatcttcttgtttgtcatgtatttaatgtttgtgcttgccatcaatattggtggagcattgcagcctgcttttgaaggtggctctgaagctatctttatacatgggatccaatggctaggtgcaacattcaatttccctgaatggttaactattttccttgctcaaggtgttggtggtggtattaatactgtactccctctggtaccacaaatcggcatgatgtatctctttttatctatccttgaagactctggctatatggcacgtgctgctttcgtgatggatagattaatgcaagcgctaggattgcccggtaaatcctttgtaccgctgattgttggatttggttgtaacgtcccatccattatgggggcacgtactctagacgccccaagagagcgattaattactatcttaatggctccctttatgtcttgtggtgcacgtttagccatatttgctgtttttgctgccgcattctttggtaaaaatggcgccagcgtggttttttcactttatttattagggatccttgttgctattttgacgggtttactactcaaacataccattatgcgaggtgaagcttctccttttgtcatggagttgccggtttatcacgttccccatatcaaaaccttattaatacaaacttggcaacgtttaaaaggctttgttatccgcgcgggtaaagtgattatcatcgccagtatgtttattggtgcattaaatagcttcactttttccggtaaagcggctgatagtattaatgattctgccctcgcttccgtcagtaaagtaatcactccgttattgcaacctattggtgtgcataacgataactggcaagctaccgttggtttagtcactggggcaatggcaaaagaagtggttgtgggaacattaaatacactgtacaccgcagaaagtattgttaatgaacctttcgttcctgaagagtttgatctatggggcgaaattggtgacgcctttgctgaaacttgggatagcttaaaagaaacctttacattcgccgcactttccaatcctattgaggcaagtaaaggtgatggtgaaatggatacggggactatgggtaccatgggcagcaaatttggtagtgcaatagcggcctatagctacttaattttcgttctactatatgtgccttgtgtctccgtaatgggggctattgctcgtgaaaccagtcgtggttggatgacattctctattctttggggattaaatattgcttactcacttgccgcgttattctaccaaacagcgacatttagcgaacatccacaaagtagtaccatcaccattgctgctgtattgatatttaacttaattatctttgtactattacgtaaatctcgtcatcgtctcagttttaatttaagtaacaaacgctcattagcgaaacagtgctgtggtaaacaaggtagctgtcactaa

SEQ ID NO: 293662 - DNA, 234 bp, Proteus mirabilis
atggcaagtttgatgcaagttcgtgattgtgtcgcgcttaacggtcgggctgatgctcgtcttgtcagccatcagcttaatatgcctgaacctatggtaaaagcgatgttagagcggcttacgttaatgggtaaattacaagaggtcgatgtagaagagtgcttggtgggtagctgtaaaagctgccctgaagccaccgcatgtcagactaaagtttatcagttacgctcctaa

SEQ ID NO: 293663 - DNA, 447 bp, Proteus mirabilis
atgccgatcactgaattctcatccattatctctacgggtacacaaggtgggttgcagatgcaatgtgcttctcgccaatttcaattattacttgatgagcctatttcattgggtggaaacgacaccgcgatgacccccgttgaagcgctacttggcacactgggtgcttgtaaatgcattgttgctaagagcttcgcccgcctacaccatattaatctccataatattcgtattgaggtaaaaggcgagctagatatcgatggctttatgggaaagaataaacaggctaaaatcggctttagtaagataacgacgcatttctatatccaagcagataatagtaaaacagaaatagaagcttttatcgcctttattgaacgaacctgccctatattagataccataaccaacccaccagaatgcgaaacgctatatcatattgaatag

SEQ ID NO: 293664 - DNA, 786 bp, Proteus mirabilis
atgaataaattgtattggcagactttaggtgaaggaaaaacgcatcttgtgctgttgcacggatggggcttgaatgctcaggtttggcaatcaatcatcacgcgattaagctcgcattttaccctgcatctggttgatttaccgggatacggcagaagccaaggttttcctgtgctaacgcttaaagagatggctgatattgttttttcacaggcgcctgaaaaaaaagccatttggctaggatggtcattagggggattagtggcaagccgtattgcacttgataatcctaataatgtacgggcgttaattaccgttgcctcttccccttgttttgctgctcatgaagcatggccaggaattaagccagacgtgttaaaaggtttcgagcaacaattgagtgataactttcatcggacggttgagcgctttttagccttgcaaacactcggtactcaaagtgctcgtgaagatactaaggccttgaaagcggtcgtgttggcacaacctttgccttccgttgaaacattaaacggcgggctggaaattttacgtacagaagatttgcgagaacagcttactaccttatgttgtccttttattcggctttatggttatttagatggtttagtgccaagaaaagtcgcagctttattagatgctcgttatcctgactctccttcggttatttttcgccatgccgcacatgctccctttatttctcatccggatgaatttagtgagaccttgttaaagcagtgtgaggccttatcaattctggcatga

SEQ ID NO: 293665 - DNA, 501 bp, Proteus mirabilis
atgttgacagtcactgactatcgcccaccgcttaataaattattacacctttataaatatcatcctcgccctcagatagcattatgtcttgcgaaactttttttattacggtggcttgctcatcgtcgcgagaatttagttcgcaagccagagcaaattattagcgtaccgctacatcgacatcgtcgttggcgtagaggcttcgaccaagttgaggctatcgctaaacctttggcaagatggttaaattgtccttatcaccctaataccttgataagaactcgtgctacactggcacaaacacatcttaatgccaaacaaaggcaacaaaatttagataatgcctttatcgtaaatcgcacagtgtcagtggcaggcaaggatctggcactgattgatgatgttatcaccacaagcgcgacgctcaatgctattgtacctttgctatttcgtgctggagcacgctctgttgaggtatgggctatttgccgaaccttgtag

SEQ ID NO: 293666 - DNA, 579 bp, Proteus mirabilis
atgattactattactgatgccgcacaggcacacttcgccaaactattggctaatcaagaacccaatactcaaatccgtgtttttgtcattaacccaggaacacctaacgctgagtgtggcgtttcttactgtccacccgatgcagtagagccgaacgacacagaaattaaatttgaaaaactttctgcttatgttgatgacatcagtgcacctttcttagaagatgcagaaattgactttgtcacagaccaattaggctcacaattaacattaaaagcacctaatgcaaaaatgcgtaaagtggctgacgatgcgcctttaattgaacgtgttgaatatgtactgcaatcacaaatcaacccacagttagcgagtcacggtggccgcgtaagcttgatggaaatcactgaagatggctatgctatcttacaattcggtggtggttgtaatggctgctccatgattgatgtcactttaaaagatggtatcgaaaaagagctacttaacctgttcccagaagagttaaaaggcgtgaaagatttaaccgaacaccaacgtggtgatcactcctactactga

SEQ ID NO: 293667 - DNA, 327 bp, Proteus mirabilis
atggatagttttcaatttcttagtgttgaacaagcctatcaattttgggtatctcaatcggctattttagttgatgtaagagatccgcaaagttatcgtcttggtcatgccactggcgcttttcatttaacaaatgatacgcttaaccaatttctacaagatgcggattttgatgttcctgtgatggtgatgtgttatcacggtcatagtagccaaggcgcagcacaatatctggtcaatatgggctttgaaaccgtatatagtattaatggcggttttgaagcatggctaagagagtttcctcaagcgataacttctctgcaataa

SEQ ID NO: 293668 - DNA, 840 bp, Proteus mirabilis
atgatccacattatcacactatctaacccgcaacttgctgatatgttcgtcaattatatggcgacaaaaggtgttcggatccacgcaaaaacagaaaatcaacaagtcagcctttggttggaaaacgaacaacaactcaatcaggttgaaagtgagctaaaaacctttcttcgtgaaccttttcaccctcgttaccaagcggcaagttggcaaacaggtacgcctcaacgtacgggtctacaatatcgcccagctttttcaatcaaaagcatggtgcaacaatcaggccctttaacggttttgaccattattttatgtgtgctcgtctttatctggcagcaaatagtgggcgattacaatgtcatgttacatcttgcatggccatacgatgctagtctcgattttgaactatggcgttatatcaccccagcatttgttcacttttcgctcatgcatatcgcctttaatttagcgatgtggtggtatttagccagccaaacagaaaaacaactgggtacaggcaaattatttgtcattatgctcatttctgcgctatttagtaattgggcacaatcactgtttgcagaatccaactttggtggactttctggtgttgtttacgcgctaattagctatgttggcttaacaggtttgcgggctccagaaaaagggatcggtgttcctaccggcttaattgttttttccatattgtggataatcgcgggttatatgggcgttttaggtgattctatcggaaatgctgcacattttgccggcttccttatcggcttattgatggctttgtgggataatcgacatcaattatctcgtcaatcataa

SEQ ID NO: 293669 - DNA, 759 bp, Proteus mirabilis
gtgaagcaaacacaacggcatgatgccatcatcgaactggtacgcttacaaggctatgtcagcaccgaagaattggtggaacattttgaggtcagcccacagactatccgacgtgatttaaatgaattagcggaaaagaacaaaatccaacgtcatcatggaggcgctgcattaccctctagctctgtaaatgccgcttaccacgaccgtaagatcatgtggtcagatgaaaaatcacgtattgcccaacgtgttgctagcttaattcctgatggtgcaacactatttattgatattggtactacccctgaagccgtagcccatgcattgattaaccataaaaatctacgtatcgtcactaataatctgaatgtcgccactttattgatggataaagaagactttcgcttgatcttagcgggtggcgaagtgcgtacccgtgatggtggtattgtcggtgaagccaccctggattttatctctcaattccgccttgattacggcatcttagggataagtggtattgatatggacggatctttgttggaatttgactaccatgaagtccgcactaaacgtgccataatcgaaaattctcgttgtgttatgctagtgaccgaccactctaaatttggccgtaacgcgatggtcaatcttggtaatatgaatctgattgattaccttttcaccgaccaagagccaccatcaggcattcaaaaaattattgaacaacataacgttcagcttgagctttgctag

SEQ ID NO: 293670 - DNA, 1494 bp, Proteus mirabilis
atggaaactaaagacttgattgtcatcggcggcggaataaacggcgctggaattgcggcggatgcagcaggccgaggcctttcagtattaatgctggaagctcaagacttagccagtgcaacatcttccgctagctcaaaattaattcatggtggcttacgctatttagagcattacgaattccgtttagtcagtgaagcattggctgaacgtgaagttttattgcgtttggcgcctcatatcgcatttccgatgcgtttccgtttaccgcatcaaccccatctacgcccagcatggatgatccgcattggtttattcctctatgatcacctaggcaaacgtgtcagtttaccgggcagtaaaagtattaaattcggggctaactctgtcttaaaacctgaattaactcgtggttttgaatattccgactgttgggtagatgatgctcgtttagtagtattaaatgcgcaagagatcgttcgtcgtggcggtgaagttcgtactcgtaccaaagtgacgcgcgcttggcgtgaaaacgatttatggatggtggaagcacaagatttacgcaccggagaaacttctcgctaccaagcaaaagcattagtgaatgcagccggtccttgggttaaaacattattcgatgaagggttaaaattaaaatcaccttatggtattcgcttaatcaaaggtagccatattgtgatcccacgtgctcacgatgaaccccaagcctatatcttacaaaatgaagataatcgcattgtattcgtgatcccttggatggatgagttctctattattggtaccactgatgttgaatacaaaggtgatccaaaagatgtggctattgataacaatgaagttgagtacttattaaaagtctataacgaccactttaagaaacaactgaccaaagacgatatcgtctggaattattcaggggtgcgtccattgtgtgatgacgaatccgattcgccacaagctatcactcgtgactataccttagatgtacatgatgataatggtaaaacaccactactctctgtgtttggtggtaaattaacgacttatcgtaaactcggtgaacacgcggttgataagctaaatgcttatttccctaatatgggtcaagcgtggacaaaagagggtcaattaccgggggggaacttagaaggttacgatcgtgatggctattcacgtcttattcgccaacgtcatccttggttaccagaagcattagcactacgttttgctcgcacttatggtagcaatactgaagtgttgctagaaggaattactgatttagccggaatgggcgaaaatttcggtcataatctttacgaagctgaattacgttatttagttaaacatgagtgggtgattgagcttgatgatgctatttggcgtcgtaccaaacttggtatgtggcttaatgatgaacaaaaacaacgtattacgcaatggttagaggcaaatacgcacacagcataa

SEQ ID NO: 293671 - DNA, 357 bp, Proteus mirabilis
atgatcacttgtaaacgtgtctatgatgataaagacggtaagcatgaaggttatcgtgtattagtggatagattatggcctagaggggtgaaaaagagcgattttcattatgatgaatggaataaagcgctcgcgccttctactgaattaagaaaatggtttcatgaaaatggcgatttcacacaatttacggctcgctatataaaagaattagaagcaataccggaaagttggcaaccactattgaaggtagccaaagaaaaaccattagtattactgtattccgctaaagatgagaaacagaataatgccgtagttttaatggaatttctgcaaaaacagtgcaaaaccagctaa

SEQ ID NO: 293672 - DNA, 900 bp, Proteus mirabilis
atgagcttttatcacgcaagccagcatgaagcgcttaatcaaaatcttgctgaattagatggccagatccaagtttcttttgagttttttcctcctcgcacacaagagatggaaaatacactctggcaatcactggctcgtctaaataccttaaaacctagctttgtttcggtcacttatggtgcaaattcaggtgaacgagatagaacacatgccattattaaagatataaaagagcgtacaggccttgaggcggcaccacatttaacctgcattgatgcctgtcgtgaagaattacagcatattgcccaagactattggcaaagtggtattcgtcatattgtggcgctacggggagatttacctgataacagccagaagccagatatgtatgccgttgatctggttcatttactgaaagatgtaggagattttgatatttcggttgctgcttatccagaagtgcatcccgaagctaaaagcgcacaggctgatcttattaatttaaaaaagaaagtggatgccggcgctaatcgagccattacacaatttttctttgatgtagaaagttacttacgctttcgtgatcgctgtgtttcaacgggtattgatgtagaaattgttccgggtattttacctgtcaccaattttaaacagttaaaacgttttgccggattaaccaatgtgaagatccccggttggatgcataaaatgtttgatggcttagataacgatccagaaactcgcgcactggttggggcttctatcgctattgatatggtgaaaattttaagccgtgagggcgtgaaagatttccatttttacactcttaaccgctctgaattgacctacgccatttgccatacattaggtgttcgcccacaacttgcgaaggtttag

SEQ ID NO: 293673 - DNA, 591 bp, Proteus mirabilis
atgaacgatgatgttgaccgatgtcctgagtgtcaagtaagggcatactatacggatgattttgtccgtgtttaccaagcctattctactactatcgctcagagcgcagtcgcaaatggtacttttgtttctcccccttttagtatgacccgcatgacttgggtaaaaccctcctttctttggatgatgtatcgctcagggtgggggcgcaaagatcccaatcaagcgtctattttggctgttgatattacccatgaaggctttcaacagatgctaacacaaggtgtggtcagtcatttcgatccagaccactatgtgagtgccaaagaatggcaagaagcaacagaaaccagtgatattcgtattcagtgggatcctgaacgagatatttatcttaatcgcttaagttatcgcactattcaaatagggttacgtaatcaagcagtagaaaaatattgcaatgagtggattgttaatattaccgatattactgataaagtgcgtaaaatagatacttgtattactaatggcgatctagatactgcatatagcttacttcctatcgagcaaccttatcattttgcaaaataa

SEQ ID NO: 293674 - DNA, 1005 bp, Proteus mirabilis
atggcaaaaacagttgaacaaattgcaaatgatctgaatttatctatcaccacagtacgattagtactcaatggtaaaggtgatcaatatcggatcagtgcaaaaacccagaaaaaaattgctgattatgtcgaagtttttggttataccgttaaccatgcggcaagaagcttaaaactcaataaaacagatacttatggtctggttattcctcggctgtccaaccccttctttgctgctttagcggaaaagttagagatgcattgtcaccaaattggttgccagctgatgataagttgtacctatggtgatattaaaaatgaaaataagctcgtaaagtctatggatgagcgtaatgttgatgggatttttattgtttcagcgagtcgaaaaaatcagcaacatcacgttaaacatcgtcaaaagcctttagtgttcttagatagagatttttctgttagtaatgcaatttgcgtggcgtctgataactgtgatagtggtgcacaattaacgaaagcgatgatacagcaagatgcgccaatccacttttttgccggtgatgctcttcttcctactattgcagctcgtttgcgcggttatgttcaggcgatcaaagcccattatggtgatgaaagccatgtaaccgtttcctatgcagaacataacaccaccaaagatggtgaacagatgatgaagcaatatcttgaacaacatcggcagatccccagtcattttattgcctcatcactgcccattttagaaggcgtattaagtgctattcgccaaacagaaggtgttattcccgcacatatcaatataggtacttttgatgatcacgttatgttaagttttttacccaataatgtctggtcaatgaagcaagatgaaaccttattggtagaaaaagcctttgaaatcatgactgctaagatagcaggtaacgtagtgaaagcacctccattaattaaaacacaacttatcaaacgcttaattgcaggagcatga

SEQ ID NO: 293675 - DNA, 1515 bp, Proteus mirabilis
atggaaattttagatgctttaatggtcgtttttagtttagaaacgataacaatgatcctgttaggggttttcgcggggattattatcggcgcattaccgggtttaacagtgaatatgggcattgcactgttactcccactgacttactcctttcaaggaatgacggggatcttattattattgggaatgtattgtggggctgtttatggtggctccattaccgcgatattaattagtacaccgggcacacctgcatctgcagccaccgtcttagatggctatccgatggctaaaaaaggtgaagcagggcgagcattaggcttatcaaccatggggtcgatgtttggtggtgtatttagtactatcgctttaattgttattgctcctcaattggcaaaagtggcgacgggattctctgctgctgaatattttgctcttgcggtatttggcataagtattattaccagtgtatcatcgcaatcgattgtgaaaggattaatggggggcgcgattggtcttgcaattgccactatcgggcttgatcctatgacagcagggccacgttttacgtttgataccgtgtatcttatggggggcgtctcgtttattccaatcctcgtgggactctttgcattttctcaaggcttgattagctttgaagaagagtatcgtgagcgcaagcagaagaaaagcgagaaaattaatgcccgtattcatcgtgtattacctacgtggctcgattttaaacgtgttttacctacctattttcgttcatcagcgataggaacggctattggtgctattcctgggactgggggagatatttcatcttttatctcgtataacgaagcaaaacgttggtcaaaacaccctgaagaatttggaaaaggatcacccgaaggggtttcagcaccggaagcgggggctaactcggtgacgggtggcaccatggtacctctaatgactttaggtattcccggtgatggcgcaacggcgattattatgggggcttttatggtgcaaggattagcgctagggccacagttatttacggataatcccgttgaagtgaacagtatttttatcggcttaatgatggcgaatatttttctcggtatcttaggcttcttgtgtatgaaactgtttgtacgtgtgatggatgtaccacgaagagtattagtacccattatctttgtgttgtgtagtgtgggggcttattcagttaaccatagcatcattgatgtttttgtgatgatgggggcaggattactggcttatattatgattaagctcgatttttcgatgtctccggtggtgataggtattatccttgggccaatggcagaatctaacttacgccgtgctttaatgatgtctcaaggggatttatcgattctctatacacgacctattactgcgacattcctcgctattgcactattaacactgctgttacctattgtcggacctgggttaaaatcaatgtggaaaaaatggcgtagtcaatctgcttaa

SEQ ID NO: 293676 - DNA, 462 bp, Proteus mirabilis
atgactaaaatcaatacaatcatcggtgcgatttcagtagcttttgggctacttattatctatctctcccgtgatatgagtatgtttgatgaatatggtgtacctggggagcgtttttggccttacggtttagccatcttatttattttactggggatttttcaatggataggtgtcgtggttgataaaattaaacatgtacaccagtccgtagatttaagttcgaccgcagttaagcgtgcttatggcttaggcatttttatgctgctatatgcaacaggtttatatctatttggctttattgttccatcattgcttcttatcccaatcattatgtggttgatgaatgagaggaaacctattgccatggtggtgatcccgattgtgattgtagccgcggtttatgttttctttgacattatttttaattcacctctgccaacctctgtcttttttgagtaa

SEQ ID NO: 293677 - DNA, 975 bp, Proteus mirabilis
atgaaaaagagtctactcgcagcgttggcgcttacgatgacattgggcatggggaatgctgtagcccaacagttaacgtatcctactaaaaatattgatgtggttatcccaaaaaacccggggggaggtactgatacttctgcacggactatcattgaatttgctaaagatgtgatgccagcagggcgtatctttgtaccggttaataaacccgcaggtaatggtttaactgggttaattgaagtggcaaatgcgcgtcctgatggcactaaattagtcatgacgacggttgaattagcgatgttcccacatcaaggtaagtcacccgtgacctataaagactttaccccgattgcgacaacgattgctgatccggttgtgctcgtggtgaatgctaattcaccttataaaacattggaagaatttattgccggagcaaaagcgaaccctggtaaattaaaaattggtaactcaggtatgggagctatttatcacctcgcgggggtgaatatcgaacgtactacgggaactaagtttaatcatattccttataacgaaggtacaggcccctctattgctgcattagtgggcgatcatatcgatggcgtattaaccacacccggtgcggttaaatcacaagttgatgcgggtattttgcgcattctcggtgtgatggatgaacgtcgcttcccacttattccggatgttccaacctttaaagaagccttaaatctcgataccaacgtgaaaatgcgcgcatgggctgtattagccacaacagcaggtgtgcctgataacgttaaaaatgagttagtgggggcattttcagaagtggttcaaaaaccagaatatcaagaagcattgaaaaaacaaggtattatgccagtatttatcgtcggtgacgatgcgtatcaaatgatgaaagaagatcatgagatgtatgctgaattaatctcagccaccctgaaaaaataa

SEQ ID NO: 293678 - DNA, 1053 bp, Proteus mirabilis
atgcctttcgtgatgaaggaaacccagtttgtgctggataatgcacattcactttttaatcactgccatgcttcaacgattgtgcgtgtgcctaactctgagcgtttattaaccgctttttttgctggcgataaagaaggtagcggtaataccgctatctggttggcgataaaagagggaaatgattggcaacccgctcaacctgtggttaaaaatccaggtgttgcgcactggaatccagttttacatgttgacccatcaacaggtaatatctggctgttttataaaacgggtcctgatgtacatagttggacgacccaatacgttatctcgaaggatggcggaaatagctggagtttaccaagtgaattggtttcgggtgatgtaacacctagaggtcctgtgaaaaacaaagtattagtgatgtcaaacggcgagtggttagcaccggggtcggtggaggatgatcgatactgggatgcgtttgtcgatatttctagcgacaatggtcaacactggcagcgagtggatattccgattgcccatcatcaaggagggcaagcggagcatgaaatctggcaagggctaaaggacgatgccttgtgggagactgatctacaacgtgtttttcaatgggatggcgtgatacaaccaacactatggggatctcagcctggacatgtgcatgccatgatgcgcagtacgcgcggtaaaatttatcgtagcgattcaacggattatgggcgcagttggtgtccggcttatgcaacaaccttaccaaataataatagcggcattgatgtcgtctccttcgcagatggtctgttggcattggtatataacccgaattcaggcaactggagtcgtcgttatcctatctctgtcagtctttcatccgataatggcagtacttggtctgaaccattcgatttactcgatggggaaggcgaattttcatatccggctattattgctgaaaacaataccctacatgtgacttttacttggaacagaaaaaacattgtttatcagcagttaatagctactcaataa

SEQ ID NO: 293679 - DNA, 930 bp, Proteus mirabilis
atgagtcagcaaaaatacgttggtgtttggcctgtgatgctcactccttttgatactaaaggagagattgattgggcgtcattagagcgccttgtcgattggtatatcgatgcaggcgtacatgggttatttgccgcctgtcaatcaagcgaaatgttttatttgagtgatgaagaaacacaagcactcacccgttttatcgttgaaaaagcagatggaagagtacctgttgttgcttctggccatacggcaacggccttaagccagcaaaaagaacaactgcaggcaatggcgagtaccggcgttgatggtgttattatgatcagtaatcgcttagcgcaagtgggcgagtctgatgataaggcgctggaaacgctacaatccttaacccatgctgtacctaaagagattgatttgggtatttatgaatgcccttatccttacaaacgcttgttatctgaagagatagtagagtggtgcgcacaaagtaatcgctttacctttattaaagatacttgctgttctcttcctctcatagaacgtcgcttagcattatcaaaaggaagtcgtttgcatctagccaatgctaatagtcaaaccttattagcgtcattccaagcaggatgccaagcatatagtggtgttatggctaacttccaccccgaactttatgtctggctgtatgaaaattggcaggataaaccagagcaagctgcgctattagctgattatttatcaacagctgcgatgactgaaacgctggattatcctgcctgcgctaaatatcatcagcgcctgatcggcaatttcgcgacactggtttgccgctctcgtaatagtagtcagtttgaaaactcatttttcccttctgctgttaatagcatgacggcattgggtgaaaatatgaagaagtggctttcgttaaattaa

SEQ ID NO: 293680 - DNA, 1647 bp, Proteus mirabilis
atgttgaacttaaatctaccaaaattaccggacgttatcagtgcagaagctaatgagatcctgatggtcactaacgcagacttacgtgagcctgcaaacgtaacatgctggcctgtgcagaaaaaatttgaagataagctagccgctgcattaaaagcacaaggttacaccatgaaacgtgcacataaaattgatgaagcacgaggccatggttttatcagtagtcagcgtgaaggttgcgatatgtttgcggctatcgatcctgatgcacccgttattgtgctattaaccgcatggcaatactcacaccatattgcctcttcattagcgcatcatcgcgggccaattctgttgctggctaattttgatggtacatggccggggctagttggcatgttgtgtttagcggggacgttaaccagtttaggtaaaaattattcacgcttatggtcagaaaattttgacgatacattttttattgatggcttagcaacatggttgaaatatggttatgtaaatcatcagcttagctatcttaaagaagttgcgccaacacacagggtaatggcgacagaagctggcgaagtgggtcgaaaagtcggcgaatatataattaaaaataaagaaataataggtttgttcgatacattctgtatgggaatgattaatggggtcttcccacaacaggcaatgatcgatattggtatgcccattgaatcactctctcaatctgcattattggtcgaaatggcaaaagtacctgatgcattaagagaagagtgtgtgcaatggtacgaaaataatggcatgacgtttaagtttggtacagatgataaaactgaactgactcgtgaacaggtgaaagagcagtgtgccatgatgattgcaatggcgcgtttcgttaaacgctttggcttaaccgctgtaggcgtgcaatatcagcaaggattaaaagattgttgtcctgcctctgattttgccgaaggtgcaattgggtcaacggcacgcttcccgttaccggatgaaaatggcgacattatcagccctaacacaccgatcccttgtatcaacgaagtcgatatgggtacagctattccacaaacgatgttatggcgtttattaacctcgttaggcttgcctgcagaaacaacattacacgatattcgttgggggagtgagtatcagggaaccttctactgggatatggaaatttccggctctgtgccttttgaacaccttaaaggtgggatcaaaggcgcaacaggttaccgtcagccagctatgtttttccctaaagggggatcaactatagcgggtcaaggtaaagcagggcgtttgttatgggcacgtgcacactatcaaggtacagatgtgattatgcatattggtacaggtatggcggtggaattaccggaggcagagtttgaacgtcgccgtcgagccactaactacgaatggccattactcaactgtactttagatggtgtaactcgtgatgatcttatggcgggacatcaaagtaaccatattacagtggcttatgttgatgacgataaattggcgtttgtgctacaagcctttgttgctcaagcactgactcaaggtattcaagtgaaagtggcaggtgatgccattaacttactgtaa

SEQ ID NO: 293681 - DNA, 1587 bp, Proteus mirabilis
atggaacaacaatattttattggcgttgatgttggctcagccagtgtccgtgcagcagtatttgatagctttggaaagcgtctgggcttttcagtgcgtccaattgcacaatttcgcccgaaaacggattttgtcgagcaatcttccgctgatatttggcaacaagtatgcaccactgtaaaagagtcggtgaaattatcagccatcgatcctctccatgtgaagtctattggttttgatgccacctgctctttagtggccgttggtaaagaagggcaagcactttcggtttcacccagtaataaacctgagcaggatattattatgtggatggatcaccgggcagtacaagaaacagtgaccattaatctgactaacgatcccgttttgcggtatgtcgggggcgaagtgagcattgaaatggaattgcctaaaattctatggttaaaaaatcactatccggagcgttataaacatgtctggcgattctttgacttagctgattttttagtgtggaaagcaaccactgctgatgttgccagtatctgtacattaacgtgtaaatggaactatttggcacaccaagggcattttagtgaaagcttgttagctgatgtaggtttggatgaattattagaaaaagtaccacaaaccattttggctttaggtgaatcggccggatgtttaacgacctctgtggctgaggcttttggattacatactggcgtcatagttgctagtggcattattgatgctcatgcgggtgggttggcgttaaccgcatcacaacctgagggaagtttggccatcatcagtggtacatctaactgccatatgattgtcagccaatacccgattatggtgcccggggtgtgggggccttactttggcgcaatgttaccagagttatggctaaacgaaggggggcaaagtgctgccggtgcgctcgttgaatggtctatccgccgccatgagtcatgggctgacttagaacaagaagcgaaagaaaaaggtgttagttactataccttattaaaccaagctgtcgctgaattggaagaaaatgaaccttatccaacagcacaatttcatgttttagctgaccatcatggcaatcgctctccacgtgctaatcctgccgccaaaggaatggtcagtggattaacccttgaaagtggtcgggttgccttggctcgttattatcttgcgacactgcagtctattgcctatggcactcgccatattattgacacccttgaagatgcagggcaccaaattaatcgccttgttatgtgtgggggagcgaccaaaaatccactgtggttacgtgaatatgccaatgcaacaggtcgtgagatccatttagcgcaagaagaagatgcggtgaatctaggagctgctttattaggtgccgtggcatgtaaagcctttgataatttttctcaagcagcaaataccatggtacgagaaggtggtgttattacacccgatagtgacacctttgctttccatcaagcgaaataccaagtttatttacagatgtatcaagatcagcagcgctataacgacatgatggcagattgctga

SEQ ID NO: 293682 - DNA, 429 bp, Proteus mirabilis
atgttgaaaaatattgctatcagtctttctttacttcttatcacttcttcggctttttcagccacactggcagaaagagaattacaacagaaatttgaagaaaatattcaatctcgtgttgttgacttaaataaaagctgtgatgctaatataaaagttgcgtttgattggtcggcatttactgttgaggatctaaaaacaacaggtattgatggttattgcagtgaagggttaaaaggtgtcattaatacctgtgaaagctcgaaaatagcacaagaaaccgtaaaagagaaaatacagaatattacctgctctaaagcgtcacctcgtagtattgaacttaaagatgggacactgaattttggtattgattttaatgctgcaaatgatgccaacgctattcaaacgcatttaatgaataatctctaa

SEQ ID NO: 293683 - DNA, 753 bp, Proteus mirabilis
atgctattacgagtagataacgtcagcaaatattattatcaaaaaggggcgcgcttttttaaagaaaaagtgactattctcgatgcgctctcttttaatatacaaaagggtgaagctttcgggttagttggagaaagtggcagtggaaaaagtacccttgcacggttaatcagtggcttagaattacctgatcaaggggctatttatttaaatgataagccagtgacgaaacgatgttatcgacaaggtgtaataagtattgtgtttcaggatcatatcgcttcagtcaatccgacttttacagtgggtgaaatgattgctgaacctattaaactgattaatccgactctccgtcataacgagttagaaacaattattttttcttttttagagaaggtgcaattacctaaaagttgttatcagcgttatatttttgaattgtctggtgggcaagctcaacgagtttgcttatgtcgtgcgttagcatcttacccacaactaattattttagatgaggcaataagctctctcgatatacctacacaagttgaaatattggatttattaaaattattaaaagaggaactccaattatcctatctttttattagtcatgatattcaaacagtgacttatttttgcgataaagtcatgtttattttacaaggtcaacaaattgaattatgcgagataaataaattaagtactgttactcatccttatgctaaaaaattaattcaatctgttatttaa

SEQ ID NO: 293684 - DNA, 810 bp, Proteus mirabilis
atgaacaatttactgacgcttaatcaagtctcaatctatgatcctcacagcgaaaaaaagcgggtagataatctctcctttagccttaaacaggggcgaacgttagctattgtcggtgagagtggtagtggtaaaagcttaatcagtaaagccattattggcttacttccaagtacacttgcactatcgggagaaattttttttgatgaaaagccccttcatttatattcagagcaacaacggcgtgccctattagggacatcgctaggtatgattgtgcaaaacggcatgagtgcttttgatccgttgataaaaataggcaagcaagttagccaaactttaatttaccatttttcttatactaaattgcaagcattcaatgccgctaaacaagcattggatgaggtgtttgagcatcaatctttaatgattatgcaggcatttcctcaccaattaagtggggggcaattacaacgtgtgatgattgccatggctttggcgttatcaccaaggttattaattgctgatgaacctactaccgcattagacgctcccttgcgcagagaaatattacagctattgcaacgtatcacgatatctaaaaataccaccttaatttttatctctcatgatctaggattagtcagtcagattgctgatgatattttagtgatgaaagagggaaaattaattgagtttggtgacaaaaacagcgtattagatacacccaagcaagcctatacccgttatttaattgaggctagagctaagctttcccaacgttttgcacaggtgctttatgctcggtga

SEQ ID NO: 293685 - DNA, 870 bp, Proteus mirabilis
atgtggcggttattctggcaacgacttgcgcaagataaaagtgcacaactctgtttattggtgatagtgatgattaccatcgccggaataggcgcaccttggtttgcacctcatgatcccactttaacatcgatacgcttaaaatttcagccaatcagctttcactatccactgggtacagataatttagggcgttgtgtgttttcacgtttactctttggtattcgaaccaccgttttttatgccatatatgcgatgggtataacactgctgatcggttggctaatggggatgttggcgggctattttcacggtaaaacggatacagtgattatgcgtttatgtgatgtggtattgtcatttcctgcggaaattatgatcttagccttagtgggcataatggggcctggaataggtaacatcttgattgcggtgatcttggttaaatgggcttggtacgccagaatgatacgaggcattgttcgacaatattcacatcgtcactatattgcttatgctcaagtgattggcgcaccaccaacacatattttacgacgccatttattacccgtgacattagctgaaactatcgttttagcctcaagtgatattggtagtgttattttaatgatctctgctctttcatttctggggttaggggtacagccacccaccccagaatggggcaatatgctgagtgaagcaaaaaatgtcatggtattacatcccgaacaaatgctacctgcggggatagcgattacggttgttgttactgcatttaacttttggggcgattttttacgcgatgtgttcgaccccgataatcgtcaatcagtcggggataaatatgaacaatttactgacgcttaa

SEQ ID NO: 293686 - DNA, 927 bp, Proteus mirabilis
atgttacgttatctatgttggcgcctattggcgatattgccgctagtattgattatttcgtttattgcctttgttttgctgaatttagcaccgtctgatccggcagaagtggctttgcgtgttaacgaaattgtaccgacgcccgaagcgattgaaggtatgcgccgtgagcttggtttagataagccttttttcacacgctactttttatggcttgtagcgggatttcaactggattttggcacctcttttttgacccgaaaaccggtgatacaagagatgttaactgctctcccccccacgctttggttagcggctaccgcattattatttacgcttattatcgcgttgcctttagccttatggtgtgtggcaaaaccacatagcttgatagacaaaagtattcggctgattgtttttgtgttaaccgcaattcctaattattggttagggttgttgttaatttgggcggtggcggttcatttagattggttacctgtcagtggtatgttgacaccacaatcggtcattttaccggcatttgcactctctttaggttatatcggcacttatttacgtttgttacggggcgcaatgcttaatcaatggcatcagccttatgtattttatgcccgaacaagaggattacctgataagctgattttgcgtcgccatatattacgtaattcactcgcttctgcgctgacggcgctaggaatgagtattccgaaacttatcgcgggcacggtcgtgatcgagaatatttttgcatggcctggggtggggcgactgtgtattagtgccatatttggacgcgattatccgatgatacaagcttatattttaatgatgtcattgttatttctcttttttaactttctgatagatatcattcagatgaaagtcgatcctcgtctaaggcggtaa

SEQ ID NO: 293687 - DNA, 1578 bp, Proteus mirabilis
gtgaaacctctatttacagttattcctacactattattaacattggcgtgcgtatttcctgcttttgccaatcaaagtaataatatattggattatgccagtacaaaagatatccgtgatattaacccccatctttattccggtgaaatggccgcacaaaacatggtatttgaacccttggttttaaataccgataagggggttgcaccttatttagcacaacgctgggaaatttctcctgatggtaaaagttatacctttttcttgcgccaagacgttacatttagtgatggcgaaccttttaatgcgcaagcggtaaaacttaatattgaggctgtattagataattatcagcgtcatgcatggctagaattggtacgtcaaatcgacagtgtcgaggttatcgatcagtatactgttaagctaaatttaaaaaatccctattatccaaccttaactgaacttggcttaactcgcccatttcgttttatttcacctaaatcatttattaacggtaaaactaaaacaggggtgagtcattatattggtacggggccttgggtgctcacggaacataagaaagatcaatatgctgaatttaaggttaaccctcattattgggggcaaaaaccagcattaactggggtgatgtggcgagtgatccccgatagacagacaatgctattatccttacaaaaaggagatattcagctaatttttggtgcagatggcgacatgttagatatggactcttttgacgcattaatggcatctgataaatttaaaacacaaatgagtgcacctattgcttctcgtgctattgtgctcaacagtagtcgccctattacttcaagccaaaaagtacgccaagcattagagtatgccgttgataaagaagggattgctcaaggtattttagcgggaagtgaaaaagtcgctgatacattaatggcaagaagtgtaccttattgcgattttgattcaccaacttatatttatcaaccggaaaaagctgcctcgttattagaagaggaaggctggctattacctgcgggtaaaacagtgcgtgaaaaacagggaaaaccgttgcagttattgctctcttataatgtgaataatgcggttgaaaaagagatagccgaactattgcaagatgattttaagaaaattggcgttgcactgacggtattaggggaagagaaacaggcctttttagatagacagaaaagtggtgatttcgatttacagtattctctttcgtggggaacaccttacgatcccgcctcttttgtctcatcctttagaattccagctcatgctgattaccagggacagaaagggttagccaataaagcacaattagatgcgatgattggcgagttgttgattacgccagatgaacatcgccgtcagacattatatcaacgcttatttacctcattagcggagcaagccgtctatataccattaacctattcgcgtactaaagcgatttaccgtagtgaattggaaaacgttggttttaatccatctcaatatgaaataccttttgaaaagatgcgttttaaagccgaataa

SEQ ID NO: 293688 - DNA, 780 bp, Proteus mirabilis
atgacaaataaaatcgataataaccaattacttcatgatgtgacccgttactggaatatccgcgctgaaagttatagtgctgccaaccagcaagagttattaagtgaaaaacaacaaaaatggcgtcagttattgttaagccatgtcaaagaaggggagacattaaaggttcttgatatcggtacggggccgggattctttgctattttattagcgttgtcgggccaccaagttactgcaattgacgccacgcctgggatgttgcttgaggctaaaaataacgccagccaacataatgtttctattaactttgtttgtggtgatgtgcaagatcttccctttggcgatgaacaatttgatttggtcgtcagccgtaatgtgacatggaatttaaaatcaccctgtgaggcttatcaagagtggtttcgcgtattaaaacctgggggaagcttaattaattttgatgccaattggtatttacatctgtttgatgatgaatattggcaaggttttcttgctgatagagagcgagcggcgcaaaagcaagttgctgatcactatgttaatactgatacaaaagagatggaaagaattgctcgccaattaccattaagccaagttaagcgtccacagtgggatattaatacactactagatatcggttttattcgttatagcgtggatattcgtattggtgatcacgtttgggatgaagaagaaaaaattaattacggctcaacccctatgtttatgatccatgctcagaaaaataatcgatga

SEQ ID NO: 293689 - DNA, 696 bp, Proteus mirabilis
atggatctcatttcacgattaacaaccaataccactcgtgctgattttgccttagctcatcaacagcaattaatacagttactgatacaacactttcctgctaaatatcacaccttgtttgcaaccccgcaaaaaaccgcagaagatactattgaatggtatggtgaattatccggtcagccagtggcattaaatgcattgtcagagcaacaacgccaagagataagagatgctctcgatgatgatttaaaaaatcttaaagagcaaacggcattacttgcttcacagcaacgcattaccgatgaagagcgccatctgcttgataccgcctcaaccctacccgatgcagagagcatctatatcattaatggaaaacccattattacttggtggcctcgtaccacacctttagcgccgactgttgcacaagtcactgctggctctagtgcagcggctgccggagcggcgcttgcaaaaatatcaccaaaaactcgccaccgttggttacgttggttactggtattattattggttttaattgccttagtctcatggttaagaggatgttttgatatcaatacaacgccttctatcaataatacttcagcgaccgctgtcgcaactcactctacctcaacgatgacagctacaactaatacgactaataagcaagataacctaacaacaaataaataa

SEQ ID NO: 293690 - DNA, 567 bp, Proteus mirabilis
atgaaaaaacaactattatcagcattatttatcagtggaatattttctatttctaccgttcaagcacatgaaaatacctcattagataaaacaacaatttctgcaggttatgcacaaataaaaattgccggccaatcaggcattatgcgcggtggtaatctctctatacgtcaagaattcaatcaacagctaggtattatggcaattgctacctatgcgcaaaatgaatatgatttaaataagcctttaaaacaattaataaaagatgttgatgcccgctattattcagtgatggcggggccaaccttgcgcctcaatgactatattagtgtatatggtgtggcaggtatggctcaaatcgaatttaaaggtttagatactagacaagtacctgaaagtataatcaagaaaaatgcttttagctggggagccggtgttaccattaaccctatcgatatgctttctgtttccgttggctatgaaaacagccgttataaaatgaataaattaagtgataataaattaattattgatggctttattgcaaatattggttatagcttctaa

SEQ ID NO: 293691 - DNA, 762 bp, Proteus mirabilis
atggcacatttgttaattgtcaatgccgatgattttgggctgagtagagggcaaaattatggcattgttgaatgtcatcgtcatggcatagtgacatcaacgacagcgttggtgaatgctgaaggtattgagcatgctgcacaattatgcaaggagctacctcatcttggtgtcgggcttcattttacattgactatgggacagccgctgtctcctatcccttctttaacgcgtaatggggtattaggtaaatggctatggcaaatggcagagcaagagcagttacctttagatgagatacgagtggagcttaatgcacaatatcagcgctttgttgagttgtttggttgtccccccgaccatatagacagccatcatcacgtgcatatgtttaaacaaattttccccatcgtggcagagtttgcacaacaaaaagcattaccgatacgtgttgatagactgttggcacaaaaagaaagtcttaatactcaaggggttattagtagtgatggttttgatagtcaattctatggtgatgaaatcagccaagccttgtttttaaagacactggatgacgctaaagcacgtggtgaacaatcacttgaagtgatgacacatcctgcttttattgataatcctttacgtgtgagtggttactgtttccaacgtttaacggaattagaggtgttgacgcaatcatcgttaaaacaagcgattgctgagcgtggatatcaattaggtacttatcaagatttaatttaa

SEQ ID NO: 293692 - DNA, 1353 bp, Proteus mirabilis
atgagtcataagttaaaagtggtcaccattggtggaggaagtagttatacacctgaattattagaaggatttattaaacgttatcatgaattgccgatcacggaattatggttggttgatgttgaagaaggcaaagaaaaactggatattatttttgcgctttgccagcgtatgataaaaaaagcgggtatccctttaaccatttataaaacacttgatcgtcgtgaggcattaaaagaggctgatttcgtcacaacacagttgcgagttggtcaattaaaagcaagagaattggatgaagccattccgttaagccatggttatttaggccaagagaccaatggtgccggtgggctatttaaaggattacgtactattccggttatttttgacattattaaagatgttgaagaaatttgccctaatgcgtggatcataaactttactaaccctgcaggtatggtgacggaagcggtttatcgccataccaattttaagaagtttattggtgtttgtaatattcctatcggtatgaaaatgtttattactgatgtgcttaagctaacggagcaagatacgctttctattgatctgtttggcttaaatcatatggtgtttattaaagatgtgattgttaacggtcaatcccgtttccctgaattattagaaggagttgcttcggggacgttaaccgcaggatcggtgaaaaatatttttgatttaccttttagtgaggggctaattcgttctcttaatctgttgccatgctcttatttactctactactttaaacaaaaagagatgttagccattgaaatgggggaatactataaaggtggtgctagggctaaggttgttcagcaagtcgaaaaacaactgtttgaattgtataaagatccacatttaaatattaaacctaaagagttggaattacgtggaggggcttattattctgatgccgcttgtgaagtgattaatgcgatttataacgataaacaggcggagcattacgtcaatattcctcatcacggtcatattgataatatccctgcagactgggcaattgaagtgacggctattttaggtaaagacggagccaaaccacatccacgtttaacccattttgatgaaaaagtgctggggcttattcatactatcaaagggtttgagatcgcagccagtcaagcggctattagtggtgagtttaatgatgcattacttgcgatgaatttaacgccgctggtactttccgataaagatgctgaagtactgactcgtgagatgttattagcacacaaagcgcacttacctaattttgctcatgcgattgcccaattagcagcatcaaactaa

SEQ ID NO: 293693 - DNA, 849 bp, Proteus mirabilis
atgatgcactcattaaaagcgcaagctgaaatacgcatggtatatgaaaaccaattatttaatggtaagaattttcatgtgtttatttataacaaaacagaaagcgtcagtgggttgcatcagcatgattattatgaatttactattgttttaacagggcgctattatcaagaaattaacggtaaaaaggtgttattagagcgtggtgattttgtctttattcctattggctcgcatcatcaaagtttttatgactttggtgtaactcgtattttaaatgtaggaataagcaaagctttttttgataaacattatcttcctttattgcccgcttattttattgcttctcaagtttatgcattaaaaaatgagtttctttcttatattgaatccgtgattagctcattaaatttcagacatacagaatttaatgaatttattgaaattgtcacctttaatgtggtgaatagattacgacattatagagatgatggtattgaagatgatattcccttatggctaaaagacgccattgatggaatgcatgataaaagccaatttggggagaatgcattggcaaatatggtgcaattatctggaaaatcgcaagagtatttaactcgagcaactcgccgttattatgataaaacgccgatgcaaattattcatgatattcgaattaattttgctaaaaaacaattagaaatcacgaattactccgttaccgatattgcttttgatgcaggttatagtagcccgagcttatttattaagacttttaagaagataacatcgctgacaccaaatagttatagaaagaatttatacagtattaaagagactaactaa

SEQ ID NO: 293694 - DNA, 348 bp, Proteus mirabilis
atgttagatattgagaattgcgttgatagctcagcgacagatgatgaatttgaagaaattatcatggggttaattattaattcagggcaagcacgaagtatcgcttatgcagcgttaaaaaaagcgaagcaaggtgattttgcacaagccaagaaaatgatggaacaatctcgagcagcattaaatgaagctcataaaatacagacccgcttaattggtgatgatcaaggattgggtaaaacgaaagtgagcttggtactggtgcatgctcaagatcatttaatgacatctatgttagccagagagcttgtcacagagcttatcgagttacatgaaaaaataaagtaa

SEQ ID NO: 293695 - DNA, 1359 bp, Proteus mirabilis
atgagtaaagtcattggttcacttgaaaaggtactccttccttttgcggttaaaattggaaagcaacctcatgttaatgcgataaaaaatggttttatccgtttaatgccattaacacttgccggggcaatgtttgtacttatcaataatgtttttctcagttttggtgagggctcctttttttactctcttggtattcgtttagatgcctcaacaattgaaacacttaatggtttcaaagccataggtggtaatgtctataacggtacgttgggaataatgtcattgatggcgccgttctttattggtatggcgttggcggaagagagaaaagtcgaccctattgcggcgggattactttctatcgccgcctttatgacggtaacaccttatgacgctggtggcgcttatgctgtgggggcgaactggttaggaggtgccaatattatctcagggattattattggccttgtggttgccgaaatgtttacctttatagtgcgtcgtaattgggttatccgtttgcccgatagtgtacctgcctccgtttcgcgctctttttctgccttaattcctggttttattattttatcaattatgggaattatctcttggggattagcgcattacggtacacatttccatcaaatcattttagattctatttcaacgccattggcttcgttaggatcggttgtcgggtgggcttacgttatttttacctctttgctgtggttctttggtattcatggttcattggcgttggcggcacttgatagcggtattatgacaccttgggcattagaaaacgtctctatttataccgagtatggttcagttgaagcggcacttgcagcaggcaaaacgttccatctttgggcaaaaccgatgctagattcgtttatcttcttaggaggaacaggggcgacgttaggtctgatattagctatctttattgcatcgcgtcgagcagatcaccgtcaagtggcgaagttagcattacctgcgggtctattccaaattaatgaacctattatttttggtttacctgtgattatgaatccagtgatgtttattccttttattcttattcagccaatccttgctgctattaccgtaaccgcttattaccttgggattattccgccggtcacaaatattgcaccttggacgatgccaacagggttaggggcattttttaataccaatggcagtattgccgcactgttattagcactctttaacttagccgttgcaacactgatttatctgccttttgtgattatttctaataaagcacaaaccgaaattgataaagaagaaagtgaagaagatattgctaatgcattgaaattttaa

SEQ ID NO: 293696 - DNA, 327 bp, Proteus mirabilis
atgcaaaagaaatatatttatctattttgttctgctggcatgtcaacatctctgttagtgacaaaaatgcgtgcacaagcagaaaaatatgatgtacccgttattattgaagcttttccagaaacattagcagagcaaaaaggccaagaagcggatgtcgttttattggggccacaaattggttggatgctcgctgatattcaaaaattattacccaataaacctgtcgaagtcattgattcattgttatatgggaaagtggatggattaggtgtattaaaagcagcagtagccgccattaagaaagcatcagcaacaactaattaa

SEQ ID NO: 293697 - DNA, 960 bp, Proteus mirabilis
atgtttaaaaaatcattaagcccactgttcttattgctgtcttctctggttatcgcaggttgtgataacgcacaagatacctcaacaacgcaatccacagagaaacaaactctcactatcgaacatgctcaaggcaccactgagatccctgctcacccacaaaaagtggttgtgatgaacatggaaacacttgatattgttgatgctcttggcgtacctgttgttggcctaccacaaacaaacgtccacctacctaaatttctagagaaatacaccaacgaaaatgagtacatcaacgaaggtggcctgtttgaaccaaactacgaaaaactcagtactactgcccctgatctgattttaacgggtagtcgtgctcgcgatgcatatgccaaattaagtgaaatcgcaccatccatttctatggatatcgacagcacacgctttattgacagtctcactgagcgtacaacgactttaggtcaaatttttggtaaagaagaacaagctaaaaaattattagctgacttcaatagcaaaattgatacggtaaaagcaaaaaccccagatgcgggcaaagcaatggtcgtattagtcagtggcggtaaaatttccgcttatggcccaggctctcgctttggttttatctacgatgtattgggctttgaacctgcatatactttcgatagcccaggctctcacggtaatattgttaactcagaactactgctaaaacttaatccagattggatgtttgtcattgaccgtgatgcggcaattggtcgtgaagattcacaacctgcaaaacaagtgcttgataatgccctagttagaaaggttaatgcatggaataaagaccaaattatctatcttgatgccagctcgatttatatctcaggtgggatacaaacttactctcgcttaatggatacaattaatcaggcgttggatcaaaaaaaataa

SEQ ID NO: 293698 - DNA, 963 bp, Proteus mirabilis
atgaaaacgttccatttatcattggggataggacttatcgctatcctctcaatgatcagtctatttatcggcgcaggagatatcactcctgcttcgctttttactgatcccgatatgcgcgatatcttctttattagtcgcgtaccaagaaccctgtcattattacttgctgggggcgcaattagtgttgctggtttaatcatgcaactgctcacgcaaaaccgctttgttgagccttctcttgcaggtacaacacaatcagccagtctcggtttattagtcgtgatgttgcttttccccgcggcaggcattttcaccaaaatgatggtagccactgtttttgcacttttaggcactgtgttatttatgttgttgctacagagaattgccttaaagaccgcattaatcgtgccacttgtcggtattatgctaagtgcagtgataggtgctctaaccatctttcttgccgtctattttgatttactacaatcactagatgcgtggactagcggagacttctccagtgtcttacaaggtcgttatgagctgctatggcttgtcggtgcccttgcattaatggcgtgttgggtcgcggatagctttaccgtggcaggtatgggacgtgaattttccatcaacgttggacttaactatcgtaaagtgatgattatcggtttatctattatcgctttaattagtggtgtggtggtgtctgttgttggtgctctacctttccttggtttgatcgtgccaaatttagttagcctagtgatgggagataatattcgcaaaaccatcccgtgggtatgcttaagcggtggagccattgttttactctgtgatgtgattggtcgcctgatccgttatccatttgagatccccgcaagtgtcattttaggggcggtaggtgctgtgatcttccttttcttactactgaagcagcaacgttatgcaaaaagttaa

SEQ ID NO: 293699 - DNA, 1008 bp, Proteus mirabilis
atgcaaaaagttaattcatccatgattagcaaatatactggcgctgttcaacctaagaaagtgcgcctctcacctatggcgcgtatttggctcttacttggcgtctcattattagccattgtgctgtttatgacgatcaacctaaacggtaatatctcttatattctgacacaccgcgcttatattattctgacgatgatcatcgtcgcctttgcggcaggcgtttctactatactgtttcagactatcgccaataaccgcattcttactccttcattaatgggcttagaagctctgtttgtattgctacaaacgctctttatcttttttgaaggggatatgcccgcctcttggatggccaatctgacgaagttctttttagagtcggccttattagtgttattttcggtggttctatatcgttggctatttagttcagtgcgctttaatatcaatttagtccttatgattggtattattttaggcaccctatttcgtagcagtgcaacgctattacaacgcctaatggacccaaatgagttttctgtcttacaaagccgtatgtttgcgacatttactcgagccactcctgatcttatcttatgtgcattagccattattgtcgtcgtcggcgtattactttggcgtatgcgttatagttttgatgtgatggccttaggccaggcgaatgcgattaatcttggtattaattatcgtaagcaaacgacttatattctattacttatttctgttctggttgcggtatcaacagcattagtagggccgttgacatttttaggcttaattgttgctaatctggcttatcatattagtggtagcagtcagcaccgctttttaatgcctgtggcattcttattaggcactatcgcactgattggcggacaattgattttagagtatggcttaaaaatgacaggtactctctctgttgtgattgagtttattggtggtatgttctttatttatttggtattaagaagactttaa

SEQ ID NO: 293700 - DNA, 756 bp, Proteus mirabilis
atgattgaaatcagtaagatatcaaaacgttatcaagacacaacggtgctcgataatattacaacaaccattcaacgtggcggtattacttcaatcatcggacccaatggtgcgggtaaatctaccttactttctgtaataggccgtctactgatgccagaaagcggtatggtcagtgtaaatggcatggatgttgcggctacagagagtgatgtattagccaaaaacctttccatactacgccaagaaaatcagtttgtgagtcgcttaactgttgaagagttagtcggttttggtcgctacccttatagtaaaggacgcttaacgctagaagataagaaagtgattgatgaatcactcgattttcttaatttgactgaatttcgtcaccgttatcttgatgaattatccggagggcaacgccagcgtacttatgtcgcaatggtattatgtcaagatactgaatacgtgatgcttgatgaaccgcttaacaatcttgatatgaaacacgcggtcattatgatgaaattactgcgtaaagccgccgatgagctaggaaaaaccattatcatcgtcattcatgatatcaatttcgcctctgtgtattccgactatattttagccatgcgcaacgggcaactttactatcatggctcacctaaagagatcatgaaatccgatattatcgaagatattttcgatactcccgtcgacgttaaagagttggatgataagcttatcgcgatgtattactaa

SEQ ID NO: 293701 - DNA, 552 bp, Proteus mirabilis
atgggacgccaaagaacgattgatagagaaaagttacttgaggctatttttgacatcgtgatggagcaaggggctgccgctctgactatcgatacggtggccaaaaaaatggggatttctaaaggtggtgtccaatattgctttaatagtaaagaagcgatgattgatgccatgtttgaacattgggaaggaggatatgaagcgcgatttaatcaggtggttgccaatgataactcagccaataatcgcgttagagcacatattcatgcaactcatgatcacgataagctctcttttgccaaaggagccagcttaatggctgcgttactgcaaacgccagaatatttgcaaagtactaaagcgtggtatcagcaaagattagcgggtgtcgataccacaacagtagagggaaaacgggcgagactggcttttttagccaccgagggggctttcttgctacgttattttggtttaatggatattgatgataatgagtgggaagagatttttagcgatatcgattctgaactggttacagtgactacgaagtaa

SEQ ID NO: 293702 - DNA, 1500 bp, Proteus mirabilis
atgataaaagattataagcgttggatagtcttacttttagtatcaagtatgctgtttctaattgttgttgatgttaccgtactttataccgcactaccgcgtttaactcatgatctcaatgcgagcgcctcagaaaaactatggatcatgaatgcctatccgctgattgtcgcagggctgttgccagcagcaggtatgcttactgatagaataggtcataagacgttatttattagcggattacccctttttgccatcgcctcattatgtgcggcttattcccctagtgccaccagcttaattatttctcgtggtttcttggccatcggtgctgctatgagcatgcctgcaacgttgtctattgtgagacaagtatttactcatccacaagagcgtgccgtcgccatcggtatttggtctgctgttgcttctggtggcgcggcattagggcctttaattggtgggttgctattaaaccatttctggtggggctcagtctttttgatcaatgtccctattgtactacttgtgcttcctttctcgatttggctaattcctcacttttcgggacaacggcagcataaaattgattatttaagctcaatacttattttgattggcttagtcagcgctatttataccttaaaagagataggtaaggcttatacacaatggaatgaagtgatcatcgccacccttattgccattatttttctcacactatttgcgcggcgccaacgtcgtcaaacgcatccaatgattgattttagcctatttaaaaagcgctatttcagtgtcggtgtggcaatgtcgactctttctatggtgatcatcgtgggtattgaatttctgctaagccaacgcttacagttagtcgccggctttacaccactgaatgcagctttagtgattttacctatccctatcggctcagtattagcctctcctttggctgggttttggctagcgcgtttaggtgcagtgcgcttaattattatcggattcgccctaacattaatgggtaacttatggttaattgccatttcaaactcaccgataatgctaatgggtagcctctttttgattggctttggtttaggcattatttttaccaccgcatcgacctctattatgctaagtgtcgacgataaacaagcaggtatggccgcttctattgaagatatcgcctatgagttgggtagcgtgattggcgtgacctttatggggagtttaatgagcaccctctataccttaaaactaactttaccggatacgcttaacgtcaatagtgtcgtttatgatagtttagatgaagcacttattgtcgctgaaaagcttcccgaagcagcggcgaccctcttaatcgcacaggctaatagtgcgtttgaatatgctttttctatcgttctgatcgccacagccattgtgactacaataagcttaattgcactcccttattgcttgcgtaatgcggtaagagaaaacaagcccagccactaa

SEQ ID NO: 293703 - DNA, 771 bp, Proteus mirabilis
gtgagaaatgtgccgttagaaagtgttgatctccttgagagagatgtgattgcgctgggtacagattatctgcctaatacgctattagaaacgcatcgacatcgacgagcgcaatttttatatcccgctaccggattgattgaagtgagcacaaatgatggggaatgggttatccctccctcttgtggtgtgtggatccctcctcagacggggcatgaaacacgcatgttagatgtgagtaccagaagtttatatattgagccagcggcagctcctcgtcagagtcaacagtgtgaagtgttaagagtgtcaccgcttttacgtcaattacttcttgaagccgttgatgtgcctgcgcaatatgataaaaaagggcgcgatggtattttaatgcaacttatcttatatgagttagcgaaagcagaacctttgcctttctttgttcctattccacaggacagtaaattagctaaattatgtcgcgattttattcgtcagcccaaaattgacgctctacctcagcagtgggccgagaaattacataaaagtgaacgctcgtttagccgttttttccgccaacagacgggaatggcattttcacaatggcgtcagcaagtctgtcttttaaactcactcacgcaaattttatcagggcatagcattaccgctgtggcttttgatttgggctataacagcgctagctctttttctactatgtttaaaaagcagatgggacaatcaccttctgattttgtgagaaacgcgccataa

SEQ ID NO: 293704 - DNA, 2418 bp, Proteus mirabilis
atgagcaatcagtccgatcatcatagtattaagccaatttccggtgatataagtcgtcgccattttattcaagcgagttcggcattagtcacactgccctttttttcctccaacacgatggcggcaacacaagatcatgcaatagctgaaaaaacgattgacgccaaagagaatgagcgtgttgtctctacctgtagtagttttgactgtggcggaaaatgtgatattcgcgcgcacgttaaagatggcaaagtgacacgtattagcactcgacctgacgccgatttagatgaagagatgcctatcatgcgagcctgtgtacggggtcgtggttatcgtaaatttgtctatcatcctgatcgattaaaatatcccatgaagcgagtaggtaagcgtggtgaaggtcgatttgagcgcatcacttgggaagaagctacgacgcttattgcacaaaatatgcaacgcattaccaagcaatatggccctgcctcacgttttgtcagtttaagcactggggtgactggtggcattttttctggtgctaatatgctacgccgtctgtttaacctaaccggcggctttctggagaattatcactccgtgagtaatggtaacacccttgccgttaccccttatacttacggtacagccgctagcggaagtacattagatacattagcaaatacccctttagttattctatggggacataatcctaatgaaactatttttgggcattccaatcattacttccaaaaaatgaaaaaaaacggcactaaatttattgtcgttgatccacgttattccgatactgcctcttctttagctgaccagtggatcccgctgttaccgaccactgataacgcgatgatggatgccatgatgtatgtcattgtcagtgaaaacctgcatgatcaggcctttatcgacaaatacacccttggtttcgatgagcatcagatgccagaaggcgttggtgaaaatgagtctttagttgcctatttaatggggaagaaagacgggatcaagaaaacccctgaatgggcggagcctatcactaaagtacccgcagatactattcgtcaattagcccgtgaatatgcttctacaaaaccggcagcattaatccaaggttgggggccacaacgtcatatttgtggtgaacggacggcacgcggtgcgacactgttagcgactattaccggcaacgttggtgtacgcggtggctgggcggctggctatggcatggcattaaactctgagttacgtaaaaccattgccggcccaagtttattgaccaatcccgttaaagcaaaaatcaatatcaccaattgggtgcaagcgtgtgaagataaaaatttggtcacaccacaaaatggcttactcaatgccgagaaacttgatactgaaatcaagatgattttctcaatggcgggtaattatatggtgaatcaaaataccgatattcttcatgccgctaaagtgcttgaagatgaatcaaaagttgaatttatcgtctgtagcgacctctatttaacacctagcgccaaatatgcggatatcttactgcctgaaaccagctttttagagcgctggaatattggaggcacatggagttatggcgattatattattctgtccgaaaaagtgatagagccagagtttgaacgtcgtaccgactacgattggttacgtgaagtggctgataaactgggggtcggtgaacaatttagcgaaggtaaagccactgatcgcgactggattgaatatttagtcaatgatgccagtattaaacgtcctgaagatggtattcctacctttgatgaattattggttaaacgtcgtcatctgctaaaacatcgccctcatacccaaaatgttgcgtttgagaaaaatattcaagatatagaaaataatccatttccaaccccatcaggaaagattgagatcttctctaaacgcttatatgagatgaagaatagcgagatccccgcactttctcattatgtgcctgccattgaagggcccgaagatacgttaacagataaatttccactacaactcatcacgtggaaaggacgtaaccgcgcaaactcaacacaatttgctaatccttggctgcaagaagtacaacgtcaagaattatggatcaacccattagatgccgaagatagaaatatcaaacaaggcgataaagtcaaagtctataacgaccgtgggatcaccttagtacccgtcaaactcacacaacgcattatgcctggtgtcgttgccttacaagcaggtgcttggtggcaaccagataaacaaggtatcgatcaagggggatgtgccaacgtcttaacctcatcccgtagcaccgcaatggcacacggtaatgctcaccaaactttattggtcgaggtagaaaaagcatga

SEQ ID NO: 293705 - DNA, 642 bp, Proteus mirabilis
atgagtaaatttatcgtttatcccgcagtaagcagtaaacagctagggttttatatcgacagtgctcgctgttcgggctgcaaggcgtgtcaggttgcttgtaaagataaaaataacctcgatgttggccgcaaatttcgccgtgtatatgaaatcactggtggtggttatagccgtaatactaacggtgcattaattaataatgtctttgcttacactttatctatctcttgcaatcattgcgatgatcccatttgtgttaaaaactgcccaactaccgcaatgcataaacgcgaaggtgatggcattgtgatggtagatactgacaaatgtgttggttgtggcgcctgtgcgtggtcttgtccttatggcgcaccgcaaatggatcctgaaaccaagcagatgtcaaaatgcgatttttgtatcgacttacaacaaaaaggtgaacagcctatctgcgttgcgacctgcccacttggggccattcaatttggtccaattgatgaactacgtgaacgctatggtgaagttaattatgtcactggtttgccttctcctgaaataacccatccaaacctagtgattaaccctcaccaaggggcaaataatgacgctataaataataaaggagaaataaaatga

SEQ ID NO: 293706 - DNA, 900 bp, Proteus mirabilis
atgaatgaatggtcattattgattttcacctttatgatgaatgccactattggcttaacactcataacaggcctttttgcacgccgtcttgcacattatctcagtgctgaaagctattatcgctttatgttactaaccttattggtgatttgtggattagccggtttaggctctattgcctccattactcacttaggcgtgccgttaaatgctccgaatgccattagaaatgtcttttcagcttggttaagtcgcgaagttgctgtcactgccatttttgtaggatgtttagggatcacctttttatggctatggcgtaccagtaaattttcgatgctgctatttggtgcaagccttctgattggtctgtttgacatttattgcatggcatccatttatcgccatacttccattttaacatggatggataacaacacttatgtgatgttttttggcgcgatgctcacattaggggcaacaatattctttttgctgctaaagatattgcagcgtataggcaataaattagggatagaaataccatcagcccctttccctatccgttggaaatggcaattgtgggggatcatggcatttagtttaattggccgattactctatcaacctttttatgaacactatttaactcgtacgctctatagccaaacatcggtaacctttccgttatcacctattgaagtctattactccattggcccattacgtatgaccagttggatcttagcaactttggctgtattggtgtgtggctatagtttagtaaaatatttgatgggccaaactcagcaaaaatcaacggagtccatttttgtctatggcggtatcatggcaattattgcagaatttgctttgcgttatgtgttttattcaattcactaa

SEQ ID NO: 293707 - DNA, 2202 bp, Proteus mirabilis
atggcgacgatcaaggacattgcaaaactagcgggtgtttcgcatggtacggtatctaacgtattgaataaacgtggaaatgtaagtgttgaaaaaattgaagcagtctatcaagctgctaaacagatgggctatcaattaaatacacaagcccaactactaagaaccaatagaagccataaaattgcgatcttattaccccaactggtttctgaaaaatatgcgatcttctttaatgcttttagacagtcgatcgttaatttcccagagatcagctacgatctttttttaacagatcttcttgagaccactgagcgtgatctgctacaaaaaattgctgcaggtggctataagcaagtagttaccgtaagttgtcttaaagatgctaaatactattttgacacgttaaaacttccaccttcacaaattatctttatttatcacaaacccctcaatgcacaacgtttttttacgttagattttgcacaagcggcggagtcaatttgccagcaagtgtcacaaacagctggcaaggtagtggggatttttggcgataatcaagatgaattaaatagtcaggtttttgctaatcaattgcaaatacggctttctcaaactgcacccgataaaaaatgtgtcatacttagcgcttctgatgaagagagttataaaattgcttttgatttcttttctatggagcaagtccccgatatctttgtcacacaagatattgagaaagctcgctatttaacacaagcaagctattttggcagttcttcagattgtcctactatctttgctctaagtgataatattccaccggtaataaaagggttatattgttttccaatgaactatgctcagcttggtttggaagtcgctgaggcactattaatcgcagagccgcatgagtacaaaaataataatgtatctgtcgcaaatcgaagttcatatctgtatacggcaacaccagcagtaatgagtgatgataaatcacaaattagtcttaatttactaacgttgccaagcccttcaacaacggcattaaaaaaactacttcctcatttttatcgtcaaactggtatcaaggtgaatttagctattcatccttatgatgaagtttatcaaattttaagccaacttcatttacacccttattatgatctgttgcgtattgatatggcgtgttttccatggtttgctgagcgaatattgcgaccattagataaaattggtgatggattaactgatttattgagtcacttttccttacctacgcaacaaaaatttggtttggttaatgatgtcgcttatgcaatgccgttcgatgctagcgctcaattactgttttatcgtaaagatctgtttgaagatactattttaaaaagaatgtattacgaaaaaacaggtaatgaattaactgtgccgacaacctttgaagagtacgataatgtgactcagttttttactgagttgcatcaagccgggcaagctcattgtccgatgggagcttcaaccacattaggaagtgcgggattaatcgcaactgaatacttattacgttattacgctaaaggtgggcgtttaatcggtagtgataatattccgcgcttagcgatgcccttggccgctgaggtattagcagattatttgcatcagttgtcgatcaccgaaaatatcaaccataaatggtggagtggctctgtcagacaatttgagcaaggtcatctggcaatgcttatctcttatatgaatttatttaatgatgtcgcacatagcgatattttacctaaaattggttttgctcccgttccgggtggtgtaccacaattagggggtggggtacttggggtgtcgcgttacagtagaaaatcatcttacgctgaactgttttatcgttggctttattctcctgttgtgatggatcacttaattttattgggtggaaatagtaaccatgaaaattttagtcataaccaagaaattagccaccgttatccatggatgacactagcttatcaggaaattaatcaaggaatacgagaatcatcagtgccgaatggtaaattatttaacttaaggcaagctgagattattattggtcagggtattactaatgtgattaatcatattatgacaatagaagaaacgattgattatattaatcaacgtctattgattgatactcagggtgaacgatga

SEQ ID NO: 293708 - DNA, 822 bp, Proteus mirabilis
atgaagcttcattttttagggacggctgcctcagaaggcataccgaatcccttctgccgttgtgaacactgtctgaaagcaagaaaattagccggtaaagatattagaacgcactcttctgctattgtggatgacattatgttgatcgatgtctcccccacttttagttaccaactgatgcgtgatggtatggacgcaacacattttgaaagtttgctatttacccatactcatcctgatcattttaatgttggtgaactatttagcagaatggaaggctatggttttgaaattaaccatcctttacatattttcggtaacgatcgcgctatcaatggctgtattgaagtattaccaggttatacgaaagagcgatttgcatttcattgcttaatccctttcgttacggtcgaaagaaatggttataaaattacgccgctgcttgctaatcatgcgaaatgggaactttgttatgtatatcatattgaaaaagacggcaaagctattttctatggccatgattcgggttggttcccagaattaacttggcaatggttagaaaacaaaccgcttgatattgttgtttttgagtgtacttatggcttaaatggaaaagatcgtacagataatcatatgagcttagaaacggtttttgccgccaaagaaaaactgcaacaacaaggctgtttacatcaagctacacagattgtcatttcgcatatctcacatagcggtaaattactgcatcatgaattagaaacggtttgtgctcctcatcatatccgtgttgcctacgacggattaacgttagaaaccaattaa

SEQ ID NO: 293709 - DNA, 1248 bp, Proteus mirabilis
atggatatgaaaataacttctcgcctacttattatgatgtttgtgcaatatttcatgcaaggagcatggaatatgaccatgggactcgtattaagtagttatggtatggcaagtattatcggtaatgcttatgccttattaggtgtcgcgacaattatctcccccttatttattggtatggtcgcagatcgtttctttgcttcacaaaaagtcatggggatacttcatttaattaatgccgtcgttattctctgtgttccccaatttattgaagcacaaaacagtggcatgacattatttttaatttttattattggcttattgttttatccaaccactgcgctatctaatagcattagtttctcccatattaatggggttaaatatttcccaattattcgcgtatttggtacgtttggttttatggcaattggttttatattgggtgaaatgggcttctctggtagcacaatgacttggtatatcgcttctgcagttggtgtattactcggtttctattgttttacattacctaatacgccacctaaagcgaaaggccagcctttctcactacgcgatattttatgtttagatgcattgtctttatttaaagatcgctactttgctattttgatgtttagcatctttattttaatgatccccaaaacagcttattctgcttatattcctgtctttattaaagcattaggctttgataatgcggcttctattatgcaaatagggatcgcttgcgaagttctgtttatgtttgttttgtcattcttcttaatgaaatttggcttcaaaattacactactgctaggagccgtgagctggatcatacgctctatgtttttctcttatgctgcagtaaatacagagctttactttatcgtcatcggattaatgctacagggattatgttgggatttcttctttactgcaggagatatctatgtcgatcgcaaagcaaaacctgaaattcgtgcacaagcacaaggtctgcgctttattgtctctaatggtttcggcttactatttgcttccactatttgtggtcaaatctttaacacaaccgtaactgaaacaggtgatgcagcattaccacaatggtcaacattctgggtctatcccgccattgtagcggcggtggtaaccctattctttattttcttctttaaagatgatgtttctaaaaaaagaaatagtgaaaataaagaaacatcacaaggaattacagcaccttaa

SEQ ID NO: 293710 - DNA, 714 bp, Proteus mirabilis
atggatgcattaatacagtttgttgacactattggcccattatcactatcaagtattgctaaattactggccgcctttatcttaggcggtcttattggcttagagcgtgaatcaaagggaaaaccagttggttttaaaacttgtgtcattattgctgttgccagttgtttattaaccattgtctctatccaatcagccgaatattacgccaatatttctgacaatattcgcagtgatcccatgcggttagctgcacaaattatcagtggggtcggctttctgggcgccggtgttattttacatcgacgagatgacgccatttcaggattaacgactgcggccattgtttgggcatctgcgggagtgggtatcgcctgtggctccggcttttattggcatgctatcgttgtgactttcctcttttttatggctattaaactaagcccacaagtagtgctgtttcaaatgaataatcaacgcttaggtaaaattaaagtgcgaatgctatttactcatgaaagtggtgttcctcttttaattgactatttaaaaagcaacaaaaacgttattgaaaacctgactattcgtgatattaaaaaggagcgcgttgaagttaacttaaaactacttgtgcgacaaaaaataaccttaccagagttttattgctcattaaaacaattacagcatgtacattctgtttcgctagatcactag

SEQ ID NO: 293711 - DNA, 945 bp, Proteus mirabilis
atgaaacggaaagatgaagaatttaattacactaatctaattgttggaaattcatatagtaaaaatgaagctttagtaacagctaatgtagaaccactaaaaaataataaagagataacaggaattacaagttttaaaaattgtattgttctatttgtaactttagataaaagaagcaaagaagatagccataaatacaatgatgtatttgttgataacggtaagaaatttcattgggaatcacaaaataagaatacaacggaaacttctcatataaaaagaatacttactggtgagaccgttattttatttgttcgaatacatgaaaaaattaaaagtagaagtcaaccttttatttatgttggtcgactatcttatatagaatataacagtaacagaccggttcaagttttatataatgtgcttgattatcaggagaaacctaataaagaactaagtgccatttatgcttgggaaaaaatagagactttagatcttgataacaacttacctttgatattgaaaaaagaaaaaacaagctatcaaggtcgagttactgacattaaaaagagaaaggcaatagagctgtatgcaatgaataaagcaaaagaagattataaaaaacaaggttttaaagtaattgatacttcttctaatagtccttatgatttagaatgccataaaaataatacatttaggcgtgtcgaggttaaaggtacgacgacagaaggtgatgcggtttatgttactcgtaatgaggttttatccgctcattcagccgagtgtgaaactgatttatatattgtaaataacatagatatttttctacaaaaagatggtaattattatgctaatggtggtttagttaatattattaaaaactggaaaccagaagaaaaatgtttagaagcgacagtctatcgttaccaccttagtaaaagatag

SEQ ID NO: 293712 - DNA, 696 bp, Proteus mirabilis
atggcctattcatttttaacccaagcaacagttaaaaaattatcgcgcaatgaaaagtggttacaacagattaataatgaagatattatcgatttgagtttaaatgcggggcagctcattattgataaaccaaaggtggatgagaattttatcccttttagccaacaattagatgtttattgtcagcaaattgctcagcaatttccttttatagcggtgactccacaattacaacttcattgcactttgttgaccatttttaatcaacctatagcgttatttgagcctcagaaattaatgttactggcttggtgtcaaaaaataacgaatatctttaataagataggaaagattgagatcctatttaatgatattattttaacgactaatggaagcgtgatattaataggtgtatcaaaaacattaacgcagtttagacaacaggtttaccagcaaatccccattgatcatcatctgcataaaaatattattcacattacgcttgggcgcttacaggaaagcgtgtcatcagaaaaaataacaccactttttcaatttttagcacataatcgattatcacttccaatcaatattaaaaccagcattaactatcctaaatttgtggtgagcaaaggctcactatcatctgaaatattgttgaataagacgatagagtttaatcaacagtgcttctag

SEQ ID NO: 293713 - DNA, 894 bp, Proteus mirabilis
atgaacaaactctctggactgattgccgcgcctcatactccttttgctgcggacggtagtgttaattaccctgttattgatgatattgctaagcacctaattgcgactggggtaacaggggcttatgtcttaggtactactggtgaaggtatacattgctcggttgaagagcgtaaaaaagtcgctgaacgttgggttacagcgagtcagggacaacttgatcttattattcatactggtgcattaagtattgctgatacgttagaacttgctcgtcatgctgaaacattagatattaaagccacatcagtgattggcccttgcttctttaaacctagtcatgttgatgatttagtagaatattgtcgtttagcagcggcaagtgcaccctcaaaaggtttctactattatcattccaccatgtcaggattaagcattgatatggaaaagtttttacaagcagcaggtaaagtgatccccaatttatctggcatgaaatttaactcccctgatatgtatgaatttcagcgttgcttacgggtagagggaggtaaatatgatattccatttggcgttgatgaatttattccggcaggattagcttgcggtgcattaagcgctgtaggtagcacctataactacgctgcaccgttatatcttgagttaattgagaaatttaatcagggtgatcaccaaggtgtggcagattgcatggataaagttatcgctattattcgagttttagtcgaatacggtggcgttgctgcaggcaaagtagcaatgcaattgcatggtattgatgttggcgctcctcgtcgtcctttacgcccactgacagctgaacaaaaagcagatgcattggcgaaatttaaggcggcaaatttcttatcataa

SEQ ID NO: 293714 - DNA, 888 bp, Proteus mirabilis
atgacagaacaggcaacaactcgattaaagccgggtaaaatacttgatacgctaggcgccatgaaaaatagcttaactcgcgtatcgcaacgtattgcagactatatcctgttccatcctacggaagtgactcagttgtctattgcccaactctctcaagcaaccaaagcaggtgaagcgacggttgtccgcttttgtcggacattgggttataaaggttttcaagactttaaaatggatttggcgattgaaatggcaacatcagataatgatgaatcgccaatccttgatgcagaagtcagtcaccaagatgatatccatactattggcctaaaattgcaagcaacaataaataatgtgttatcagaaacattaaatttactcgatatgcagcaagtgcaaggggcggtcaatgcactattatcagcaaactatgtttttatctgcggcgttggctcttcggggatcactgcggaagatctgaaaaataaacttatgcgtattggttatcgtgttgatgccgtaactaataaccactttatgtatatgcaagcctcattattaaaatctggtgatgttgctatcggtattagtcactcgggtaattcattagaaacggttcatgcattgaaattggctaaagaagcgggcgcaagcacgattgcattgacgcataatttaggctcacaaattatggaatatgcagatcaccatttaattaatggtaatcgacaagggaaattacaaggcgattctattggcacaaaaacagcacaactttttgttttagatttgctttataccttgttagttcaggctaaacctgaaacagtaaaagagcagaaattacgtactctcaatgcgttaaaacagacgcattcagcataa

SEQ ID NO: 293715 - DNA, 474 bp, Proteus mirabilis
atgttatttggacatttatctgatttggcgactatgccagaaatgaatccagcgttacgtcatgcaatggaaaaagcattagcacttgatcccgcgtcacttgcaccgggcagctataaaattgatggtgagacgttgtttatgaatgttatgacttttgaaaccgtgcctcgtgagcaaaaacaagccgaattgcatcagcgttatatcgatattcagatcttactatccggtgaagagacaattgattttggaatacaaggttcggcacaagatgtgacaccttataatgaaacggatgattatcagttgactgataacatcatacatcgtcaaacattatcccttacaccaaatatgttcgccatttttatgccttatgagccacataagccaggtattgcgccgaaaaatgaggccagtacattaaagaaagtggttattaaactagatgttgccgcgttaactcactaa

SEQ ID NO: 293716 - DNA, 1491 bp, Proteus mirabilis
atgcaattacatgattttggttttattaactatgcagtgctgtttggctatttggcagctatgttactcgtgggtgtttatttttctaaacgtcaaaaaactgcggatgactatttccgtggtggagggcgagttcctgggtgggccgctggagtgtctgtatttgcgaccacattaagctcgattacatttatgtccattcctgctaaagcttatacttctgattggacctttattattggacagtatttagctattgcaattttacctttagttttttatttctatattcctttttttagaaaattaaaaatcacctccgcttatgaatatctagaagctcgttttgatgttcgtagtcgtttgtttgctagcctttcatttatgttattccatattgggcgtgttgctattattacttatttaaccgtactagctttacgtccttttatggggattgatccggtcgtgttaatcgtattaataagcttattatgcattctttatacttggatggggggcattgaaggcgttatttggacggatgttattcaaggtttattactttctggtggtgctgtactgatttttattatgatctgttttaaagttgatggtggtattagcgaaatttttactactacagcacaagcagataaattctttcctaccacacaatggcgctggagttggacagatagcactattcctgtattaatgattgggtttttatttgccaatattcagcaatttactgctagtcaggatgttgtgcaacgctatatcgttaccgattctattaaagaaactaaacgtacattgataactaacgctaaattagtggctattattcctattttcttttttgccatcggctctgcattgtttgtttactaccaacaaaacccaagcttattacccgcaggatttaatacggggggaattttaccactatttatcgtgacggaaatgcctatcggtattgcagggttaattattgcagctatttttgctgctgcacaatcaagtatttctagtagtttaaatagtatttcaagttgctttaattctgatatttatactcgtcttagtaaatcatcccctagtcctgaacaaaaaatgaaagtcgcaaagttagttattattgtggcagggatattcagtagtttagcggcaatttggttagttttatccgatgaagctgaaatttgggatgcatttaatagccttataggtcttatgggcggaccaatgacaggcctatttatgctgggaatttttgtaaaacgtgctaatgccggtagcgccgttgttgggatcatcgtgagtattattgcagtattggctgcacgttatggcagtgatcttaacttcttcttctatggggtcattggttcaatgtcagtggtgattgcaggaaccattacggcaccacttttcgcaccagcaaaacagctttccttagatgacagtgaaacatcagagaactaa

SEQ ID NO: 293717 - DNA, 870 bp, Proteus mirabilis
atgaatacattagcgattgatattggaggaaccaaaatctcggcagcattaattagccgaaataaccaattgacacaacatcgacaaatagcaacaccagcaagtccatctccaacacaactttatgaagcattagttagcattattacaccattaaaaaaccatgccgatagtgttgccgttgcatcaacagggatcatttgtaatggcattttaaccgcattaaaccccgataatttaggtggattaaacgattttcctttaatggaaacactatcaacccttaccggatcaccttgttggttacttaatgatgcccaagctgccacatgggctgagtattatcatcgtcgtgacactatatctgatatggcgtttattacggtctcaaccggcgttggcggaggcattgttcagcaagggcagctactaataggaaaacgtggtcttgcaggccatttaggtcataccttagctgatcctcgaggccctcgttgtggatgtggccgctatggttgtgttgaagccatcgcatcggggcgtgcgattgcctcacaggccgaaggggaacttgctggtaaagatgctaaggcaattttcagcgcttttcatcagggaaacttacaggctaccaccattattaaacgctctgccaacaccatagctaatttgatcacaaatattaaagctacaacagatgctgattgtgttgtgcttggtggcagtgtggggcttgctaacggctatctcgaattggttcaagttgctatggcacaacaaccattagcattacaagtgccgattgtatcagctcactatcatcatgatgctggattatggggcgcagccctatggtctagagagcaataa

SEQ ID NO: 293718 - DNA, 699 bp, Proteus mirabilis
atggcactaattgaaaagatgactaaagatattcaacaaaaaggtgggttaattgtttcttgccaacctgttgataatagtccaatggataaacctgacattgtagccgcaatggctcaagcagcagtaaatgcaggtgccgtcgcagtacgtattgaaggaattgataatttaaaagcaacacgtcctcttattgatgtgccaattattggaattgtaaaacgtgatttgcctgatagccctgtcaggatcacgccttggttaaatgatattgaagcattggctgcagctggtgcagatattatcgcttttgatggtactgatcgcctacgcccagttcccgtgaaagcattgctagagcatgttcatcgtttaggaaaactagcgatggcagattgtgccacttttaatgaagggatgtattgtcatcaactcggtactgaatttattggctcaacgatgtcaggttataccggtggggaaataccaaaattacccgatcttcaactggtgaccgcattagcagagcaaggatgtcgagtgattgcggaagggcgttataacacaccaatgatggcggcaaggggtatgcaagcgggagcttgggctgtcaccgttggctctgcattaactcgtcttgaacatgtctgtgagtggtttactcaggcattaaagtggcagcaggagttagataaatga

SEQ ID NO: 293719 - DNA, 2169 bp, Proteus mirabilis
atgaacaaaatcaactccgtctgtccttattgtggcgctggctgcaaaatcaatctctgtgtcgaaaatggtcgaataatcaaagctgaaggtgccaatggcgtcactaaccaaggcgagctttgtttaaaaggtctctatggatgggattttttaaatgacaataaattactgacagccagaattcatcaaccgatgatccgccgacaaaaaggggctgattttgaaattgtcagttgggatgaagcgattgagtttacggctaaaaagttactcgcaattaaagagaaatacggtgctaaatctattatgtgcaccggctcctctcggggtacaggtaacgaaaccaattttgtgatgcaaaaatttgctcgtgctgtactgggtaataataatgttgattgctgtgcccgtgtttgtcatggcccttctgttgctggtttacaagaaacactaggcaatggggcaatgagtaattccattgctgatattgaagattcagattgtttgttggtgtttggttataactgtgccgactctcaccctattgtggcgcgtcgtgtggtgaaagcgaaacaaaaaggggccaaaattattgtttgtgatcctcgtaaaatagaaacagcgaagattgctaatcaatatcttcccttaaagaatggcaccaatatggcgttagttaatgcatttgcctatacgctgattgatgaagatctttatgacaaagaatatgtgagtcgttacaccgaaggttttgaagaatataaaaaacagctggtggattatagccctgaagcagtagaacgtattgttggggtttctgcaagcgagatccgccaagctatgcgcacttatgcagccgcaaaaacagccaccattatgtggggaatgggagtaacacaatttggtcaagcggtagatgttgtgaaagggctagcgagtttagcgttattgacgggtaatttaggcaaaccacatgcaggtgttgcccctgttcgcgggcaaaataatgtacaaggtgcttgtgatatgggggttttacccaatatgttccccggctatcaaagtgtgacagatgaaggtattcgtcaaaaatttgctcaagcttggcatattccggttgaaaaactcgatccgcaagtgggttatcgcattactgaagtccctcatttagccattgaaggtaaagtgaaagcttattacatcatgggagaagatccacttcaaactgaggcagatttaggtctggttagaaaaggttttcaagctctcgattttattgtggttcaagatatctttatgacgaaaacggcagagcaagcagatgtcattttaccttctaccagttggggtgagcacggtggtatttttacttgtgctgatagaggttttcaacgttttgaacaggcagtacaagcacgtggtaacgttaaacgtgattgggaaatcattagtttattagccacggctatgggctatccaatgtcttatacagataatgaagaaatttggcatgaggtaagagcattatgtccgctatttttcggtgcgacctatgaaaaattagcgggattagcccatatacaatggccttgtcctgagctcgatcatccgggaacaccctatttatattcagataatcgattcacaacgccatcaggtaaaggccagctttttgctaccgcatggcgcgctcctgcagaattgcctgatgaagagtatccaatgattttatcaacggtacgtgaggtagggcactactcttgtcgctcaatgacgggtaactgtaaagcattagcatcattagcagatgaaccggggtatgtgcaaattcaccctgatattgctaaagcggcaggtattgctgatcaagaaattgtttgggttgcatctcgtcgaggtaaggtgttgtcacggtgtaatctaaacgaaaccgttaataaacaagctatttatatgacttatcaatggtggattggtgcatgtaacgaactgacacaagataatctcgatcctgtttcaaaaaccccagaaactaaatattgtgctgcacgagtggtgaagattgacgatcaaaaatgggcagaaagccaagtcgctcaagataatcacgccatgagaagtcgtttaattaatttagtcgagcaagcaaaaacagcgacacactaa

SEQ ID NO: 293720 - DNA, 1317 bp, Proteus mirabilis
atgagccaacaatggacatctcgtgtaggccatattttagcagccgctggctctgccattggtattggtgcaatttggaagttctcttatgtcgccgccaataatgggggtggtgcattcctcgtcgtctttctgttatttagctttattatcggattagctgttttattagctgaaaatattttaggtagtagcacccatgccgaagccgttaatgccttcaaaaagatgatgggacgtaattgggtaattatcggtgtcattggtgtatttagttcatggtgtatctatagcttttatagtgttgtcggggggtggaccattggttacaccattatggcagctactggtgaattaaatattactgatagtagtgaattaacggggatcttcacccgttttatcagtgaccctttatggcctattcttgctcacttggtgtttgccggattaacatgttttgtcgtattagcgggtgttcaacgcggattagaaaaagccgtcaagatcatgatgccattgctgtttattatcatgattattttgattattgtcggtattagcttacccggctcttcagaaggtttaaaattattcttatatcctgattttagtaaattaaccccacaaggagtgttagatgcgttgggattagccttcttctcgctgtctatcggtttgggtattcatattacctatagcgcctatttagcggataataagactattgctaactctagtatgtgggttgtgatcctctcttgtttagtgtgtgttttagcaggcttaatgattttccctgcgttaactgctgctggattagagccaaatgctggcccaggcttaacctttatgaccatgccagtctattttgctaacttgcctggtggcaatatcttggcggtcactttctttgtcttattattaatggcggcattaacctctgcaatttcattactcgaacatatcgtcgcttatgtacaaatgcgttttcagtggactcgccgtagagctggcttagtggtcacagcctctattatgttaatgggtatcccggtttcattatcatttggtcctatgagtgatgtgactttagggggcaaaacactctttgatttattggattacttaacctccaatatcttaatgccactgtttggtattgcgatgtgtttaatttttggctggtcacgtagagccaatgcggttattccagataatattactggagcaaaacgccaatgcttattattagtttggcgttatattggccctatctgtatcggtataatattggtacatggtttgattggttaa

SEQ ID NO: 293721 - DNA, 1371 bp, Proteus mirabilis
atgagagcgttatacgattctaaaagtaaaacaatcgatgatcgcggtattaaagcgctgttatccaatgaagctaaatattcaacttggttgatgtttgaggcgatgctcgctcaagctcaagctgaacacggttttattccacagtcagcggctgatgaaattaaagaaaaagcggttattgagaatatcgattttgaagaaatgaaccgcatttaccaaaaaatcggtcatggtttcgtgccctttttaaaagtgttagttaaggcatgttcccaagagagtggtaaatatgtgcactacggcattaccacgcagaatattcagcaaagttcacagctttatatgatgaagacagtgcaccataaatttatgttgctacttggggagatcatcgaaaatttagctaacttggcagaaaaaaccaaacatatggttatgcccggtagaacacatggccgccatgctattcctattacttacggctataaagtatcggtctggatcagtgattttatcgactgttatcagcgcatgagagagtgtgaaaaacgcgtctttactatcatgatgggcggtgctgtgggtgcatttaactcaatgccagaagtgggtatgaaggtgcaaaaacgtgtggctgaattagttggcatggaagcgatggaggtgccttctcgtaaccttagtacacataaattagagtatatggctaatttggcattgatggctaatatctgccataaaattggtgaagaagtttatagtacgacacttgaggaaattgcggaagtttcagaagggtttaccaaaggtacagttggcagtagcactatgccgcataaaattaaccctaaactggctaaagggatcatcgctaactcacaaaaactgtattctttacccagtgtgggtatgtattctgcggtaagaccttatgaaggggatagtagctcctatatgttatttgatgggttactggaagaggcattagagctgacaaccgaaattctattaagaacagaagagctttccagaacaatagtaccgcatgaagagagaatgctacataacgtcatgagaaataaaggattagataatacggagtacgttatgatgaaaatggcagaaaaactaggcaaagataaagcacactctttattgtatgaagaggcgatcaaaacagcggcagatggcgaagatttctatactaacttgattaaaaatcccgttatctctgcggcatttagcccagaagaaattaaagcaatgcttgatccaagagcctatatcggtttatcggtggaaattgcggagaaagaagctaaacgcgggcatgtggctagccaagaaattaaacaaaactatcaataa

SEQ ID NO: 293722 - DNA, 1557 bp, Proteus mirabilis
atggccaagaaaaaattcagcgaatccatacagcgctttggtaggaccctactcctgccaatcggtgttttagcgcctatcggtatgatactgggtatcagtggcgctttagttcagtcttatatgattgcacgctttcctttcctggggaatgaaacagtcaatgcattattagtgagcatccgctctattgcaggggtcgtgtttgataatattccactgctatttgctatgggtgtggcttatggtatgagccataaagacaaggggatcgccgtgtttgcctccgttgtcggctatttaaccttgattagcaccattaatatttggctcgttttgacggggaaactcgctgatcctgccgtaatgactcaagtggggcagatcaaggtgttaggtattcaaaccatgaatatcagtgccgcaggggggattatcaccggattaattgccgcttgggcgacagataaattctataaccttgaacttcctaccgcttttgccttcttctccggtaaaaaatccgttgccattattatggtgggattaatgattggcgtaggggcattactaccctttatctgggaagtcttggtgatgggattaacaaaactttccgcggtcttcctgagtcctgtcggaccattctttacagcagggggagagcgactgtttattccatttggtttacaccatgtatggaacgtgttgtttagatttaccgaagcaggtggctcttacgttattgatggacaaacctatgtgggtgttgttcctgccatgacagaagtgttgtttaaccaagggccaagtagtgaatattggtcaatgatgccaagcttaacgcgttttatggcacaacaacaaatgctggtcactctgttcttattcccagcaattgccttagcaatttatagaacgtcgaaaaaagagaatcgcgcagaagttaaatctatgttggtgaccatggtattaaccgccatgttaggtaacgtcactgagccactcgaatttacctttgtgtttattgcgccacttttatatctgatttacgccattattgttggtattggtgcggttttactctcttttgctggcgtggcgattggctatatccgaggtacggtatttgacttcaccatctttggtctgctctatgaacataccaactggatctacttagtgattattggtttaggtctggcggttgtcacttacttcattttctactgggccattattaagtttgatatcaaaacaccgggtcgtgaagaatcaagcaatatgaaaaatacgcttattaaagagaagcgttatggcgaaattgcggagatcttaattcgtgctttaggcggaaaacaaaatattcgtaacgttgataactgtattactagactccgtgtcgatatcggtgaagtaaatcaaattgataaagagttaatgttggaatcaggttgtacagcattctttattcctgcagcgaaccatgtccatattgtttatgggccaaaagttgagtttgttcgcaatgctgttgatgaagcaatgaagaaataa

SEQ ID NO: 293723 - DNA, 1176 bp, Proteus mirabilis
atgaaacagaataaacaaacaacattgatacatagtgggcgtcaagcaattaaaacatctggcccaattaaccctcctgttatgagagccagtactattgtttttgattcaataaaaagttggcgtgaaatacgcgatcgtcgtattactgaacgagtattaagctatggtgctcgtggtacagaaacagcgtttgcacttgaagcattagtaactgaattagaaggtggttatcgagcacagctctttcctacagggctagccgcaattgcatttactattatgggctacgcccgaagtggtgggcatgttttatttgctgattctgtctatgaacccgtacgtaaaatagcctctgcttttttagagcctaataatatcacttatagcttttttaaaactgacggttcagatttcgagcaaaaaattcaagaaaacactcaacttattttcgttgaatcaccgggttcattactttatgaaatgctggatctaccagaaatttgccatatcgctcatgaaaaaaatattcctgttggggtggataatacttggggctcggcatggctttataaccctttggaattaggtgctgatgtttctgtaattgctgcaactaaatatttatgcggtcactcagatgtcatgatgggcattatgatcgcaaatgaaaccgcatggaaacaaattggggcattaccagaagctcttggtcaagcaagtagccctgatgatgccgccttagtcctgagaggaatgaggactcttgctcaacgtcttacaaatcatggtaaatcagcactggctatcgctcagtggttagaaacacgccctgaagtggccaaagtttggtttccagagttacccacacatcctcgccatgacttatggaaacgtgattgtaaaggtagtaatggattattaaccattgaatttaaacaaaaatataccattaaacaatctgaacaatttattgatgcattaaccttatttggtattggtgcatcttggggaggatttgaaagtcttgcattacccgccaatgttatgggtgccagaacagcaacagattggcgtgaaggccacggtccttttgtacgtttacatattggtcttgagtctactgatgacttaattgcagatctcacccaagcatttagtgcattaaatcaataa

SEQ ID NO: 293724 - DNA, 1368 bp, Proteus mirabilis
atgactggtttaattattgccgcgctagttactgcgttggtagtttatttgctggctcgaggttataaacctcaacctgtgttattactcggaggcatgctgttattgctccttacagcttctctcgatctcaaccctttattaccggaaaataaatctacacaatttaagtattttgatattttccaaatttttaccgatattatgagctcgcgtttagcgggtttaggtttaaccttaatggcaattgctggtttctcacgttatatggaacacgtgggcgccagccgagctttatttgctatttttgaaaaaccattaaaaacgattaaatccccctacttattactagttatttcatttttagtcacacaaattttagttatttttattcctagccatgcaggtttaggaatgttactcatggtaacgatgtaccctattttaattcgctcaggtattagtcctctatctgctttagctgttatcggttgttgtcaatttattgatcatggacccggctctggaaatgttattatggcggctaaaacagcggatattgaacctgcagtctattttgttcaacaccaactgcctatcactattcctattatcattgcggttgctattacccatttctttattcaacgttggtgggataaacgtgagggttttgttttcgacccaacagccattgataatgtaaaagaagaaggaagtcaggtgccattatcatatgccttattacccgtgatccctttaattctcattattggttttagtccgttatttcataattacattaaattagaagtgactaccgcaatgattattagtacggttattgcactagtctttgaatatgtgcgattgcgcgatgctaaagcggtaatgaacagttttatgttgttctttgaaggcatgggaaaacagtttgttttagttgtatcgttgattgtatctggggaattttttgctaatggattactaaaaagtggcgcggtagataccttaattagttctgctcaagatgctggctttggtattgctgctatgattattgtgatgagtgccatcttagcattagcagcctttttaatgggatcgggtaatgctgcattcttttcatttgccgcattaacacccaaaattgctgcattcttaaaagtcgatgtcatcactttaattttacctatgcaaattatgaccagctttggtcgcacagtttcacctattacggcagctattgttgctattgcaggaattgccaatgtctcacctttccaaatagtgaaaagaaccgcaattccaatggctgtcgccgctaccgttaacttagcgatgacattctggtttttatacacataa

SEQ ID NO: 293725 - DNA, 846 bp, Proteus mirabilis
atggaatttgattattttgttactccacaatggctttttgaacatcacgacgctcaagatctcgtgatagttgatgtcagtgcgcccatgcctacgcaagatattgactatcatcaacgctatcttgaacgtcatatccctggtgcccatttttttgatctggatgaaatcgccgataaaacaacatcattaccacatatgttgccatctgacacactgttttctgaaaccttaactcagttaggtatttcaaataatacaacagtgatcctctatgatatcggcaatctcttttcagcacctcgtggctggtggacttttactaccttaggttgtcacaaggtgcgtattctggccggtggtttacaagcttggcaagaagcggggttcccccttgaacaaggagaaacgtccaaagtcccagccactcacccttttatcgttacacgccacactcaacgccgtgtcgataaacaacaaatactggataatctgactacgcaacaaaatcaaatcattgatgctcgttcggcggatagattttatggtagagcaccagagcctcgtcccggtttacgtaggggccatattcccaatagtaaaaatgttccttgggataacttagttattaatggacaattaaaagataaagcgcaattacagcacatttttgaacaagcaggtgtcgatttatctcaaccaattattgtcagttgtggctcaggtatgacagcagctattctatttttggctttaactctattgggctgccagaatatcgcactgtatgatggctcttgggcgcagtggggagcagaaaacgcattaccttgtgaatgcgaataa

SEQ ID NO: 293726 - DNA, 249 bp, Proteus mirabilis
atgggatttctttcttggattgtgttcggtcttattgcgggtatcttagccaaattcttaatgcctggctcgtatgatatcggccttatctggacctgtattctaggtattgtgggtgctgtagttggtggtgtaattagtaatttctttggtaaaggcaaagtagatggtttcaattttggtagttttgtcgttgccgtaataggggcaatcgttgtgctttatttagcaaaaatatttgccagttaa

SEQ ID NO: 293727 - DNA, 933 bp, Proteus mirabilis
gtgcgagtcctattagcgccaatggagggggtgttagacccccttgtgagagatctactgacggcgattaatcattacgatctctgtatcacggaatttattcgcgttgttgattcattattaccgccaaaagcattttatcgtttatgccctgaattacacacccaaagccgcacgcaaagtggcaccttggtgcgggtacaattattagggcaaaatccacaatggttggcagaaaacgcttttcgagccgtctctttaggttcatggggggttgatcttaattgtggttgtccttctaaaaccgtcaatggtaatggcggtggtgcctcgttattaaaacaaccagaaacgatttatcaagcaactaaagcgatgcgtggtgctgtacctgcggatttacctgtttctgtaaaggtacgattagggtgggattgttcatcttattgccatgaaattgccgatgctgtagaacaaggtggcgcgacagaaattactatccacggtagaacaaaagaagatggttatcgtgctgataagataaactggcaagcgattggtgaaattcgccaaaaattgactattcccgttatcgctaacggtgagatttggtgtcgagaagatgctatctcttgtttaaagataaccggctgtgatgcgattatgataggtcgcggggcgatgcatacgcccaatttaagtaatgtgataaaaggtattgaagaaaaaatgccttggtcacaagtgatccaattacttaaacgctatatttgtctagaaaagcaaggggataccacttattaccatgcttcccgtataaaacagtggttgggatatttaagaaaagagtatcaagatgctgatgcactttttagtcaaattagaacgctaaaaacctcacctgaaatagccaaaataatagaagcgttataa

SEQ ID NO: 293728 - DNA, 1401 bp, Proteus mirabilis
ttgaccgattttacatcgcttggtttaagtgaggcgcttctccgcgctattgatgaacaagggtataaaaccccaacccctattcaacaacaggcgattgagccgattttggcgggtaaggacgtattagcaagtgcacaaacgggtacgggaaaaacggccgcatttacattaccgatactggaaaaactcgctacatcagcagagaaaacgaaagggcgtaagccagttaaagcgcttattttaacccctacacgtgaattagctgcacaaattgccgataacgtaaaagcttatagtcgttatttacctattcgttcattggtggtttttggtggcgtcagtatcaatcctcaaatgatgaaactacgaggtggcgtcgatgttttgattgcaacaccaggccgcttacttgatcttgaacatcaaaatgctgtcgacttatctcgcgttgaagtattggtgttagatgaagctgatcgtatgttagatatgggatttattcatgatattcgtcgagtcatcaataagttaccgaaaaaacgacaaaatttactcttttcagcgactttttcaaaagagataacagggcttgctaactcactactcaacaatcctataagtattgctgttgcccccaaaaactcagcggctgaatctgttgatcaatatgtccatttagtggataaaaagcgtaagacagagctgttatcacacttaattggcctagaaaattggcctcaagttcttatttttactcgaactaaacatggtgcgaataaattagctgaacatcttaatttagatggcatcaaatcagcggcgatccacggtaataaaagccaaggagctagaacacgtgctctagctgattttaaagacggtaaattaaaagcgttagttgccactgatattgcagcgcggggacttgatattgaccaacttccttatgtggtcaactttgaattaccgcaggtagcagaagattacgttcatcgtattggtcgaacagggcgtgcggcggcaacaggtaaagcgatatctttagtttgtgttgatgaacatggcttattagccgatattgaacgcttattaaaacgtgaaatccctcgtttagcattagaaggttacgatcctgatccctcaataaaagcggcgcctttgcataaaaagccaaagaataaagcacgtaataataataaagaaggcggacatggtcgtgctgatatgcgtggtaaagataatcgccatacaccacgtaataaaaatagtcgtaatcaaaaagagagtgaaacgggtgagataaaacagaataaatctaaaccagctagacgttcacgcaaacacgatgatgatcgtgataatcaaaatccttggtcaaaagctagaaaagaattttga

SEQ ID NO: 293729 - DNA, 699 bp, Proteus mirabilis
atgccagacacacaccaaaagaaaactcgaggggaacttgcaaaacgacagttattagaagctgcctgtgaaatctttggtaaaaatgggcctgatagcgccacaactcgccagattgcgcaagctgcgaagcaaaatatcgcggctattgcttactattttggctctaaagaagggttatatctcgctgttgcacagtatattgccgatttaattcgaattgattttgaacccaccgttgcacaacttgatgattttcttgaaaaacctaatccaacagagcacttacccctattacaaaaactgatcattgacagttttttgcaatatgcccgactcgtacttgataaaagcaatgtacatatcagtcgcattatggcaagagaacaacttgttcccacagaagcctattcccttatccaccagcaagcgttatctccgctattaactcgtgtaaatcgtttattagcactttatattggcttagatccaactttaccaaaaaccatgctacatactcacgctattttgggagaggtgctatcatttcgattagtacgagaaaccattttacgccaaactggatgggatagaattggtaaacaggaatatgaaattatttctaataccttaaaagtacatattactttactacttgatggactaagagagatctatactcataacaaccatgcataa

SEQ ID NO: 293730 - DNA, 987 bp, Proteus mirabilis
atgaaaacgaaaaaaatcagtgtctttattatcttaatgattattatcggtattatcgcaggtatctattattatgaagagaacaaagatcctgagttagtactctatggaaatgttgatattcggacggttaacttaagttttcgtgttgcaggcaagttagcggaactacaagttgatgaaggtgcgccggtcaccaaaggtcaattattaggccaactcgatgatgcaccttacattaatgcattaaataaagcttatggtgaacgtgatagtgccatcgcttcattagccttaatggaggctggttaccgcagtgaagaaattgcacaagcccagtcagatgtgtcattaaaacgtgccgcatggcaatatgctgaaaacttttataagcgacaacaagatcttgctaatcgcaaagtcatttcagccaatgacttagacagtgcccgcaataatcgtaaccaagcggctgcggcattaaaagcagcacaagacaaactcaatcaatatcaaaatggttatcgccaagaagatattgatatggcaagaggtcaagtacttcaagccaaagcggcagttgcccaagcagagcttaatcttcaagacaccaaattaacctcacctgcagaaggaactatactgactcgtgctgtggagcctggcactattttatcagcaggaagccctgtttttactgtttctttaactaaccctgtgtgggttagagcttatattagtgaaaatcatttaggtgaagcgatacctaatcgcgaagtgtatctttataccgacagtcgcaaagataagccttatcacggcactataggttttgtttcgccaaccgctgaatttacccctaaaagcgttgaaacaccggaactacgcactgatctagtttatcgtataagagtggttgtcaccgatgctgatgatgcattacgccaaggaatgccagtgaccttgaaatttgcaccgactcattaa

SEQ ID NO: 293731 - DNA, 1770 bp, Proteus mirabilis
atggataacacaaattacaccatcaatttaagcggtgttgaaaaacgctttattgggcttgaaaaaccggcggttgcttcactcaccgccaccattaccggtggttcagtcacaggtcttgtcggccctgatggtgcgggaaaaacaaccctaatccgcatgctagcaggattactaaaacctgatgctggtgagatcaaaattttaggaatggatccgcaaaaacagagtgttgatgttagggctatcctcggttatatgccacaaaaatttggcttatatgaagatctcactgtgctagagaatctcaacctttatgcagatttaaaaaatgttatcggtgaagagagaaaaagagtttatcaacagctactctcttttactgacttaacacgttttacctctcgtctagcgggtaatctttctggtgggatgaaacaaaaattagggttagcttgtactctattaggtagtcccaaagtcctgttattagatgagccgggggttggtgttgatcccattgcccgtcgagagctttggcaaatggttcataccttagccggtgatggcatgcttatcttatggagtacctcttatcttgatgaagcagaacaatgtaaaaacattctgctactgaataaaggtgaattactttatagcggtgtacctcagaccttaacggctaaaatggcgggacgctcttttttactcaatgttgaaggtcatcagcgtcgaaaagtattgcaacaagccattatacaacctcaagtgaccgatggcgtgatccaagggcaatctgtacgattgatcttaaaaaaacacagtgaccaaacggcattgttaaactcattaggaaaaccagatgcaaaacttattccggcgacaccgcgctttgaagatgcctttattgatttattaggtggtggcccttctcataaatctgaactggcggagatcatgccacaaatccccccagcacccgatgaaaccgttattgaagctcaacaattaacgaaaatgttcggtcaatttgccgccactgatcatgttgatttccaagttaaacgtggggagattttcgggttattaggccctaacggtgcgggaaaatcgacaacctttaagatgatgtgcgggctattagtaccaacgagtggtaaagcattagtgttaggtatggatctgaaagtcagctcaggtaaagctcgccaacatttaggttatatggcacaaaaattctcgctatatagcaacttaaaagtggggcaaaacctgaaatttttttctggggtttatggattatatggtaagcaacagcgcaataaaatcaatgatatgataaccgcatttggcttacagccaatgattaaccaaatcaccgataccttacctcttggctataaacagcgtcttgctcttgcatgctctttgatgcatgagccagatattctttttcttgatgaacctacctcaggggttgaccctttaacacgccgtgaattctggcttcatatcaatggaatggtggataaaggtgtaacagtgatggtaacgactcactttatggatgaagctgaatattgtgatcgtatcggtttggtttatcgcggaaaaattattgcagcaggcgagccggattcattaaaacagatggtagcaacagaagaaaatccgaccccctctatggaagatgcttttattggcttagtactggattacgataaaaaacttgaacaagaaaatcaccaagggagcgaaaaacatgagtaa

SEQ ID NO: 293732 - DNA, 1152 bp, Proteus mirabilis
atgagtaattcgtctcaatcatcacctgcacacttttcttggcgacgtttatatgctctttgtttaaaagagactaaacaaatcacccgtgatcccagtagcgcgcttattgctattgttatccccctcaccttactgtttatttttggttacggtatcaacttagattcaagcaaattaaatattggtatactaactaaccaacaaagccaaccggcacaagagttagtgtatacttttaccaactctccctatattaacgccaccatcagcgataatcgccaattgcttatcgataaaatgcaagccggagaaattcgtggcattgtggttattcctgtcgactttgcgcaattattagcccgacaagatagcaaagctcccattcaagtgatcaccgatggtagtgagccaaataccgcaaactttgtacaagcctataccaaaggggtttggcaaatctggttacagcaacaagctttaagtcaaggcattcagcagcaaccattaattgaaattgagccaaggtattggtttaaccctgccgccatcagccaacactatattattcccggtgccgtcactattatcatcaccgtggttggggctattctaacctctttggttatcgctcgagaatgggagcgtggcaccatggaagccttactctcaacccaaattacacgcacagaattactgctttccaagcttattccttatcaagtattaggcagttttgttatggtgctatgtatgttggtcactgtctatatattaggcgtgccttaccgtggctcattatggattttagcgggtattacttcactatttttagccactgcactaggtatggggctattgatctccaccctaactcgcaatcaatttaacgcggcaatgatctcacttaatgcggcttttttacctgcggtgatgttatcaggctttgtgtttgaaattgatagcatgccattttttattcaagtagtgacctattttattcccgcacgttattttgttagtagcttacagacactcttcttagcgggagatattccgatgatcttaatgctagatatgtggctattaattgtttcagccatcttttttattggcttaacggcgttagcaacacgtcgtcgcttagattaa

SEQ ID NO: 293733 - DNA, 1110 bp, Proteus mirabilis
atgtttcatcgtcttctcaccctgataatgaaagagctacagtcattattacaagagccgcaaacacggattatcttaatattaccggttatctttcagatgatcttattcccttttgcggccacccttgatgttaccaatgcctctgttgctatttttgatgaagacaatggtaaacaatctattgaattaacccaacgcatagccaaagccagtgctttttctgaaaccctattattaaaaagtgaacatgaaattaaagagacgattaataatcgtaaagccttgctattagtgcgttttccacaaaattttagtgctaatttagccagtcatactccggtaaaattacaattaattcttgatggacgtaattctaatagtgcacaaattgcggcaaattatgtacaacaaattgtgcaaaattatcaaacagaattagccggcgataccccatctttactgaataaaagcgaattagtagtacgtaattggtataaccccaatttaaactataaatggtttattgtgccttctttagtggccttaattatcaccatcggggtaatgatagtaacatcactgtctgttgctagagagcgagagcaagggacactagatcaactattagtttcaccgttatcaacttggcaaatctttgtaggaaaagcggttcctgcgatggttgttgcggcagtacagggaaccattgtattaattatcggtattttcggctatcaaatacctttttcaggctcactgctattattttactttaccatgcttatttacggtttatcgctggtaggttttgggcttttgatttccgcgttaagttcaacacaacaacaagcattcattggtgtgttcgtatttatgatgcccgcagtattattatcaggctatatttctccagtggaaaatatgccagtttggttacagcaagccacatggataaacccaatccgccatttcactgatattaccaaacaaatctacctcaaaaatgccgatattaccgtaatatggcatagtttatgggcactgattgttattgctattgggacaggctctattgcctattatcttttccgcaggaagatagtataa

SEQ ID NO: 293734 - DNA, 711 bp, Proteus mirabilis
atggatcgattttcacgttcaaatgattcaatcgtacagcgcactggtacaggtctacaaacctttatggcgcaagtgtatggctggatgactgtaggtctgttacttactgcatttgttgctctgtatgttgcatccagcgcgactttaattgagatgatcttcactaataagatctttttcttcggtttgattatcgctcaattagcattagtttttatattatccggtatggtacataaaatgagtggtgcgcttgctacaaccctctttatgctctattccgcattaacaggtgtcactatttcgagtgtgttaattgtttatacttactcctctgttgctagcactttctttatctgtgcggcaatgtttggtgcattaagtgtttatggttacaccactaaacgtagtttaactgggatgggtagcttcctgtttatggggcttatcggtattatcattgcttctattgttaatatctttatgcaaagcagcatgatgagcatggttatctcttacgcaggtgtactgattttcgctggtttaaccgcatatgacacacaaaaattaaaggatatgggtagcgaaattaatcaagaagataaagaaaatatgcgccgttactcaattatgggtgcattaacgctttatttagattttatcaacctgttcttaatgttactgcgtattttaggcgatcgtcgttaa

SEQ ID NO: 293735 - DNA, 144 bp, Proteus mirabilis
atggactcattagtgattaattttatcacactaatgttacatttccacgaaataaactgtatagaatgtcaccgtaaaataaatttaagtaaagtgatgttgtctttgatttcacttgatgaattattcccaacgcttagctga

SEQ ID NO: 293736 - DNA, 462 bp, Proteus mirabilis
atgagtacattgacccgtatatcagtccaaaacgaacattttaatgttggtgatgaatatcaatggttgtcagagtgtgaaagtgatggtgcggtcgtcacttttacaggaaaagtgcgtaatcataatttaggtgatgaagttaatacgctaactctagagcattatcctggtatgacagaaaaggcgttaaatgacattgttgagcaagcacgcgcgcgttggcctttacaaagagtcagcgttatccaccgtgttggccaattaaatattggtgaagagatcgtgtttgttggtgtgaccagcgcacatcgtcatagtgcttttgaatccgcagaatttattatggattttttaaaaacgcgcgcacctttttggaaaaaagaggggctatcagctaaccaagatagatgggttgatgctcgccaaagtgactatgattcagctaagcgttgggaataa

SEQ ID NO: 293737 - DNA, 246 bp, Proteus mirabilis
atgattaaggttctttttttcgcccaagtgcgtgaattagtgggtgttgattcactggaattacaaaatgattattcaacagtggatgatttacgccgtgctttaattaacaaaggcgatcgttgggcattagcgcttgaagatggcaaattgttatccgcggtaaatcaatcctttgttcaaggcaattatgccattaaagacggtgatgaagtggcttttttcccacctgtaacagggggctaa

SEQ ID NO: 293738 - DNA, 480 bp, Proteus mirabilis
atgtctcaactaactcatattaatgctgccggtgaagcgcatatggtggatgttagcgccaaagctgaaaccgtacgtgaagcgcgagcagaagcctttgttgaaatgtcagcagaaaccttagcaatgataaccgaaggtcgacaccataagggagatgtctttgctaccgcacgtattgcgggtattcaagcagccaaaagaacatgggaattaattcctttatgtcacccattgctgttaaccaaagttgaagtccatttagaagcccttacagactcaaatcgtgtgcgtattgaatcagtgtgtcgcttaacgggtaaaacgggtgttgaaatggaagcactcactgccgcatcagtggccgcattgactatctatgatatgtgcaaagcagtacaaaaagatatggtcataggatctgtgcgtttattagaaaaaaccggtggtaaatcgggacactttaaggtggatgcatga

SEQ ID NO: 293739 - DNA, 981 bp, Proteus mirabilis
atgcaacaacttgttgatgcgttttcccgcaaatttttctatttacgtctatcaatcacagacgtgtgtaatttccgttgcacttactgcttacctaatggctacaagccaaatggtcataagtcctttctatcactggatgaaatccgccgactgactcactcttttgctgaattaggcacagaaaaaatccgtttaacgggtggtgagcctacgatgcgtcgagattttactgatattatcgcgactattaatgaaaacccagccattaaaaagattgctgtgacaacaaacggctatcgtttagcccgtgatgttgcacaatggcgtgatgcggggctaagtgcgataaatgtcagtgttgatagcttagatccccgccaatttcatgccattaccgggcaagataaattccatcaagtgatggaaggaatagacgctgcttttacggcaggttatgacaaagtgaaagtcaatgttgtgctaatgcgcaacgtaaatgataaaaacttgcctgattttctccattggatcaaagacagaccgatacaactacgctttattgaactaatggaaactggtgatggtagtgatgtttttaatcgctttcatttatctggtgaagtgatccgccaacgtttacttaacgaaggttggctacaaattcctcgcgcccgtagtgatgggccagctcaagtctttactcatcctgattatcaaggtgaaattggtcttatcatgccttatgaaaaagacttttgtgtcacctgtaaccgtttacgcgtttctgcgattggtaatcttcatctttgcttatttggcgaaaatggtattcctttacgcgatttattggctgatgatgcacaacaacaagctctacaacagcgtattcagggtggacttcttcataaaagagaaacacattttcttcatcagggcgatagtggtattacccctaatctttctgtgattggtggataa

SEQ ID NO: 293740 - DNA, 936 bp, Proteus mirabilis
atgcgaaatcgcacgctaagtgatttagatcgtgttgtagcccttggtggaggtcatggccttggacgtgtgctttcagcactctcctatttaggaactcgccttacggggattgtcacgacaacagataatggtggctccacgggacgtattcgtaaagacgaaggcggtatcgcgtggggagatatgcgcaattgtattaatcaattaatcacagagccttccgttgcttctgcgatgtttgaataccgtttctcaggcacaggagagcttgctggacacaacttaggtaatcttatgctaaaggccttagataacttaagcgttcgtccattagaagcaattaatcttatccgcggtctacttagagtcaatgctcatcttattcctatgtcagaacaagcggttgatttaatggccattgatgatgaaggaaatgaaatatatggcgaggtcaatgtagataatttaccgaggatgcctcgtcaattaaaactctatccagacgtcaccaccacacgagaagccattgaagccattgagcaagctgatttaattttaattggcccgggcagtttttttaccagtttgatgcctttattgttgctacctgatttagctaaagcattacgtcgtagcagtgccactactatttatattggtaatttaggtaaagagcttagccctgcggctgcaagtatgacgatgtcagataaaatcgccatgatggaaacctatattggcttacaaactattgatgccgtgattattagtccagaaacacaatatgaatcaatgaaaggacgattgattgttcaagcgcaattagaggcgaaagatattccttaccgtcatgataggcacctattaagtaaagctattgaattaacacttcagcaattaggtcaacgtaataccgcttgtacagcgagttaa

SEQ ID NO: 293741 - DNA, 966 bp, Proteus mirabilis
atgagtggttatgtgtatgcagggtttccaagctctgtaggagtcattattggtgtttttttcctcgtggtactttttaagtggttacgcaactttgccgtgcaagacaataaattatcaacctctgcaatgccagcaacaactgatccagagtctgcgttatctactccaacaacggaaggttcagtaaatcagctattacctaatgaatggggattatatgttgcagccccttatgctgtcatgaatgaatgggcatataacgaatataatcaaggtaaagatgatggtgggctatcagcggcttggggagttaatgatcggtgggatttaatctaccaattattttggttgctgactcaaggtcataccaatgacttttaccagttacgtgaccagattttgaatggcaaagaagaagatattcaatcattaaaaaacgatattttattatctgatttaactgaaaatgataaaaatgaacgtttatggcaaatcgatatgatgaacaccaatcgaatgaatatccaaaatgtaaaatatcttatttgggatctttgtcgttttaacaagctttgcttagaaggctgccaacaaggttatattactcagcaagaagcacaaacatggtcattaatgagtgcatcaatgctacgtcgtatttatgatggttgggaagatatgtggcaaaactttattgctactcgttggttatgggcaagtggtgatcaaaattgggcatcatcacatcaaacattttccgatgtcgtacaaaatatactcaaagcagaaaataccttagcgacagaagaaaactgggtaatggagctacctccattagatttaatgtcttttacacgagccgtagctggattaggttttatgaaaaatgatgtgcctatgtcactggctgaaatagaagaaatgatcagcgaacgcattactttaaaaacacttaatagctaa

SEQ ID NO: 293742 - DNA, 2010 bp, Proteus mirabilis
atgagcaaagtttttaaactgcattcagaatttaaacccggtggtgatcaacctactgctatcgcttcattatgtgaagggttagaagatgggcttgctcaccaaaccttattaggggtaaccggatcaggtaaaaccttcactattgccaatgtgatagctaacctaaatcgtcctactatggtattagcgccaaacaaaacgctagctgcacagctttatagtgaaatgaaagagtttttccctgaaaatgcggtggaatactttgtctcttattatgactactatcaacctgaagcctatgtgccaagctccgatacctttattgaaaaagacgcctctgttaacgaacatatcgaacaaatgcgtctatcggctacaaaggcactcttagagcgtaaagacgttattgtggtctcttcagtttcagctatttatggtttgggtgatcctgatagctatttaaaaatgatgctacatttaagcaatggcatgattattgaccaacgtgcgattttacgccgacttgctgatttgcaatatacccgcaatgatcaggcttttcagcgcggtactttccgagtccgtggtgaagtgatcgatatctttcctgctgaatctgatgactacgctttacgtgttgaattatttgatgaagaggttgagcgtttatcgctatttgatcctctcacagggcaaattcattacaatgtgccacgtttcaccgtctatcctaaaacccactatgttacgccgcgcgagcgtattctggatgcgatggaaaaaatcaaacaggagctagctgaaagacgtaaggtgctattagccaatgataaattggttgaagagcagcgagttacccagcgcactcaatttgatttagaaatgatgaatgaattggggtattgctcaggtattgaaaactactctcgctatctttctggtcgtgggcctggtgagccaccaccaacgctatttgattatttgcctgctgatgggttattagtgattgacgaatcacacgttactattccgcaaattggcggcatgtataaaggcgaccgctcacgtaaagagacgttagtggaatatggcttccggttgccttctgcattggataaccgtccattgcgttttgaagagtttgaagcattagcaccacaaaccatttatgtctcagcaacaccgggaaaatatgagctagaaaaatcaggtaatgacattgtagaacaggtggttagacctacaggcttacttgatccggtggttgaagttcgccctgttgccacacaggttgatgatttattatcagaaatacgtatacgagcagctaaaaatgaacgtgtattagtgacaacattaacaaaacgtatggcggaggatttgaccgaatatcttgaagagcatggtgaacgggtacgttatttgcactcagatattgataccgtcgagcgggttgaaattatccgagatttacgtctaggtgaatttgatgtgctggtggggataaacttacttcgtgaagggttagatatgcccgaagtctctcttgtggcgattttagatgcagataaagagggattcttacgttcagaacgttcgcttattcagacgattggtcgtgctgctcgtaaccttgaaggtaaagctattttatatggcgataaaataacagattctatggcaaaagccattggtgagacagaacgtcgtcgggaaaaacagcaacaatttaaccttgaacatggcattgtgccaaaaggcttgaataagaaaattggtgatattcttaagattggtcaaccgactcaaggccgtaataagaaaggacataaagcggttgatactcatgaagattatccattactttctacggctgaattagaaaaagaaattcagcgcttagaaacggaaatgtatcaacatgctaaagatcttgaatttgaaaaagcggctcaaacacgggataaattacaaactttgcgtgcgcaatttattgctaattcttaa

SEQ ID NO: 293743 - DNA, 687 bp, Proteus mirabilis
atggctaaaacatggtttttaacaggaacagataccgaagtcggtaaaaccgtcgtaagtagtgcattattacaatgtgctacacaacaaggatatcaaacggcgggttataaacctgtcgcatctggtagcgaatggttacctgaaggtttacgtaatagtgatgcattaacgttgcaacagtttagtagcgtccctttggcttatcagcaagtgaatccctattgctttgaaacccccacatcacctcatattgtgagcgaagaaacaaaacaacctattgattttcaggttatgtcgaaggggttatcttatctgcaacaacgcgcagattgggtattagttgaaggtgctgggggatggtttacgccactatcagcaaaccaattctttgcagattgggtgattgaagaaaaattacccgttattttaacggtgggtattaaattaggttgtattaatcatgcattattaacgcaacaagctatttggcaatcagggttgactttagcgggttgggtagcaaatgaagtagagcctgccgggcggtatcaacagcagtatttagctactttaatggcgcatattaaagcaccacttttaggtaaaattccttatttaacacaagacgttaaacaacataattttacctcttatcttgatctctcttatctcaaatcacattga

SEQ ID NO: 293744 - DNA, 768 bp, Proteus mirabilis
atggtttcttcaatcaaaacagataaacagcagatagcccagtgttttagtaaagcggctagccattatgatcatcatgcctctattcaacgttatagtggtgataaattgatgtatttagctcgccaccaagctggggatagggtgctagatgcggggtgtggcactgggtatttcagtcaaaaatggcgacaacaaggacggtttgttatcgcacttgatttatctcatgccatgttacaagtggcgagacaacaacaacgggctaattgttatttacaaagtgatattgagcactgtgcgatcaccccccacagcatagatatcgtttttagcaatttagctatgcagtggtgtgatgatcttgccattgcggtaaatagcttaatgagtgtcgtcaatccacaaggggcgctctatttttctacgttagcaacatcaacgttacaagaggtacgagacgcttggcagtttcttgataaccaccaacatgttaacccgttcctctcttaccaacagattgaacaagcctgtagtggttttcaatatcaatttgtgactgaaaaggtgacagaacaatatgcatcattgcctgagctttttgcctcattaaaaggggtaggcgcgaattttgtacaaggagaacggccaaaaggattaatgacacgccaaaaactgcgtcaattagagcaagtttggcgcaaaacagactctggtaaatatttacttacttatgaactcgttataggaaagatttctcatggctaa

SEQ ID NO: 293745 - DNA, 1164 bp, Proteus mirabilis
atgagttggcaaaactatctagataagcgacttaatgagcgtagaaatacgccattatggcgaaaaagacaggtgatccagcatagtaatggacgctatttaaccacactgtctggtgataaatatgttaatttttctggtaacgattatttagggataagccaacatcctgatgttattcaagcatggcaacgtggtgcgaatgaatatggtgtagggagtgggggatcgggtcatattaccggttttacacaggcccatcagcagttagagcaacaactcgctgactggttagggtacgatcatgcgctattattttcttcaggttatagtgctaatcaaggtgttattgcgacattacttgaaaaagaagatgccatcattgccgataaactttgtcatgcttcattaatggaagcggctatcttatcaccggcgagtttatggcgctttttgcataattctgcgccatctctatctcagcggcttcataaaacctctgcgaataaaagcttagtcgtgacagaaggggtttttagcatggatggtgataaagcgccattagcggctatggcagaaataagtcaacagcatcaggcgtggttaatggttgatgatgcgcatggtattggcgtgttaggtaaagaaggtaaagggagttgccatgaagcagggattaaacctgagttattaatagcgacttttggtaaagcctttggcattagtggtgcagctgtactgtgtaataaggcgactgctgagtttttcgaacaatattcacgtcacttaatttacagtacctcaatgccccccgcacaagccgttgctttacatgcagcgttaaaggctattaaacaagatgatgaaggacgagaatatcttcaacaacttattagctttttccgtcaaggtgtctcatcacttccagtcacattattaccttcacaaacagccattcaaccgttaattattggtgatgaactacgttgtcaacaactttcagactatttacaacgtgaaggtttctgggtaaaagcgatctttccaccgactgtaccccctcacagcgcacgtttacgcattactttaacgactcgtcaccaaatttccgacattgcgatgttaatcgagcttcttcatggtttcttcaatcaaaacagataa

SEQ ID NO: 293746 - DNA, 1038 bp, Proteus mirabilis
gtgagtacgttaaaacgttggacattaaaagaagctagggcactgtttgatatgccatttttagatttggtttttcaagcgcaacaagtgcatcgtcaacattttgatccttcacaaattcaagtcagcaccttactgtcgataaaaacaggcgcttgtcctgaagattgtaaatattgtgcccaaagtgcgcgctataaaacagggttagaaaaagagcgcttaatggaagtacaacaagtgattgaatcagccaaaaaagcaaaagcagctggttcaacccgtttttgtatgggcgcggcttggcgtaatccacatgagcgtgatatgccttatcttgagcagatggtcaaagaagtgaaagcgctaggtatggaaacctgtatgacattgggtaagcttgatgattcacaagcctcacgcttagcacaagccggactggatttttataaccataatcttgatacatcacctgagttttacggcagcattattaccacccggacatatcaagaccgtttagataccttagataaagtacgtaatgctggcattaaagtgtgctctggaggcattttaggtttaggggaagaggtcaaagatagagccgctatgttagtgcaattagctaacttaccgcaaccgccggaaagtgtacctatcaatatgttagccaaaattaaaggtacgccactggctgataatgaagatgtcgatccctttgattttattcggactattgctgttgctcgtattatgatgcctcgctcttatgtgcgactttcagcagggcgtgaacaaatgagtgaacaaacgcaagcattctgttttatggctggcgcaaactccattttttatggttgcaaattattaacgaccacgaatcccactgaagataaagatcaccaattattccgtaagcttggtttaaatcctgaaagattatctgtctcaatgggcgatcagcaacaagaagacgtgttgctacaagctgttgctgaaaaagacaccgaacaattttataacgcggcactgtaa

SEQ ID NO: 293747 - DNA, 1278 bp, Proteus mirabilis
atgacacccgatgatattgcttttgatttacgccatatttggcacccttatacctcaatgagtaacccattaccggcttatccaatcgtaagtgcaaaaggggttgaactcactttagcgaatggcaaacaattaattgatggtatgtcttcatggtgggctgcgatccacggctataaccaccctgaactcaatacggcggtaacagaacaactagcagcaatgtcccatgtgatgtttggcggtatcacccatcccccagcggttgctctatgtcgaaaactattggctatcactcccgcaccactagagtgtattttcctcgctgattcaggctctgtagcggttgaagtggcgataaaaatggcattgcaatattggcaggcaaaaggtgaaaaacgccagcgcattgtggcattaaaacgcggttatcatggtgatacttttggcgcgatgtcggtgtgtgatcctgacaattcgatgcatagtctctacaaaggctacctgccgaatcatctgtttgtcgaagcgccaaaaaccggattttatcaaccgtgggacgctactgatatagacgctttacgcaccacattagcgcaacatcatcaacatattgccgctgtgatgctagagccaatcgtccaaggggctggtggtatgcgcatataccacccagagtatttaacacaagctcgagcgttatgtgatgaatttaatgtgttattaattgccgatgaaatcgccactggatttggcagaaccggtaaattatttgcttgtgaacacgcggggatctcccccgatattatgtgtgtaggtaaagcattaacaggtggttatatgacgctatctgccacgttaactacacgccatattgccgatactatcagccaaggtgatgcaggttgctttatgcatggccctacctatatggggaatcctcttgcctgtgcggtggcgaatgctagtttatcgctattagaacaaggtcactgggttaatcaagtcgcccaaattgaagctcaacttaaaaccgaattattacccttaaagcaagcaaaaagcgttaaagatgtgcgggtacttggtgctattggtgtcgtagaaatggttgagccagtcaatatggctaaactacagaaatactttgtcgatgaaggggtttggatacgaccttttggtcaactgatttatattatgcctccttatattatatcacctgaaaagctcactaaactcactcaagcaattgagaaagcagttaatcttaccaattaa

SEQ ID NO: 293748 - DNA, 990 bp, Proteus mirabilis
atgaaacaggtagtctacgtagcaagtccagagagtcatcaaatccatgcgtatacattaaataacgcgggagagatgcatctactacaggttgttgaagttgcaggacaagttcaacctatggtggctagtgcagatggaaaacatctttatgttggcattcgtcctcattttagtgtggtgacctttgaaatcgcacctgatggccagttagaacaaaaagcaataacggcaattccaagtgcaccagttcatctgtgcttggataaaacagaacgttttttgtttgttccttcttatcaccaaggtaacttagcggtattgccgattaatcaacaaggtattgctcaagcaccaatacaacttattgaaggattaaataaaccacactcttctaatattgattggcataacaagcagcttattgttccctgtttaggtgaagatcatattcgtctatttaatctttcagaagagggacatttaagtgaagcgcgtagcgaagagttaaccacagcaataaatgcagggccgcgtcatttagcgttcaatcctaatggcgaagtgttttattgccttaatgagttagatgcaacaatcaatgtttatcgccgtatgggggatctttatcgtttaatgcaaaccatcgatattgtgccagaaactttcaatagcacacgttgggccgctgatatccatattaccccagacggtcgtttcctctatgccagtgaacgttcggaaagcttgatgagtgtaatggcagtttcagaagcaggggatcatctacaacctgtaggtcattatacaacacagacacaaccacgcggttttaatcttgataatacaggaaattatctcatttcttgcggtcagaaatctgattttgtctctgtttctcgtattgataggcaaaccggcgcattaacggaattagcttgttatccagtcggaaaaggggcgatgtgggtcactgtagtcaccaaataa

SEQ ID NO: 293749 - DNA, 822 bp, Proteus mirabilis
atgtcgtaccgcgttattgcactggatcttgatggcacattgcttgatgaccaaaaacgtatcctaccgggatctttaactgctcttaatcttgccagaaaagcgggcgttaaagtactcattgtaacaggtcgtcaccatgttgctattcatccattctatcaagcgctagatcttgatacacccgctatctgttgtaatggtacttatctttacgactacctcggtaaaaaagtgcttgaatctgatcctttaacccccgaagaaacacgcgcggtactcgacttggttaaacaaaccgatgtgcatcatttagtctatgcagatgatgcaatgatgtatgatcaacttaccgctgccgtacaacgtacacttaattgggctgatactcttcctctggcacaacgccctaatttagtcaaagtagatgatttttaccaagcaatgcatcatgttgattctatctggaaaatagcgaccacaacccccaatcacgatgagttacgtgctttaatcgaacaagtagaacaacaagtcggcttagagtgtgaatggtcttgggtcgatcaagttgatatcgccaagaaaggtaatagcaaaggtcgccgtttacagcgttgggttgaagctaatggcatgaagatgagtgatgttatggcgtttggtgataacttcaatgacttaagtatgttagagcatgttggtttaggtgttgctatgggcaacgcatcagatgaggtcaaagcacgcgctaaactggtgactaaaaataataatcagcccggtattgcagagactattcataaatatatattgtcttaa

SEQ ID NO: 293750 - DNA, 1065 bp, Proteus mirabilis
atgctagagatgaattttaaacagacactgggctctttgtgtctggaagtgaatactcaattaccaacagaaagtatcacggcggtatttggcttatctggcgcaggtaaaacgtcgctcattaatgtgattggtggtttaaccaaacctgattcaggacatattgtgttaaataatcacacattggtggatattgagaagaaaatttatctgccacccgaaaagcgcaaagtaggctatgtatttcaagatgcacgactatttcctcattataccgtaaaaggaaatttactttacggtatgtcaccaacaatgaaagtacagtttgatagaattatttatctattaggtatcgaacatctactttcgcgttttcctattacgctatctggtggtgaaaaacaacgtgtggctattggacgtgcattattaactgcacccgatattatgctaatggatgaaccattggcctctcttgatttaccccgcaagcgtgaattattaccctatttagaaaaactttcacaagatgtacaaatacctattttgtatgtgagccatagtctagatgagattattcgacttgctgataatgtgattgttatggatgccggaaaaattaaggcaatgggtaagttagaagatgtttgggccagtagcgcattacgcccttggttacaaaaagagacgttaagcagtgttgcaaatgttatggtcgttgaacatcatagccattatgcgatgacggcgaccgcctttggtaatcaagtactgtggttgccacaaatagaggcaaaaataggtcgcgatgtgcgcgttcgtattgatgcttcagatgtatcgttaactaccactcgcccatcaaatagtagtatccgtaatatattacatatgaaagtggtcgaaatgatcaaacatgatgatcaggtagatgtgaaactggttaatgatggcaattatttatgggcgcggatcaccccttgggcgagagatgaactcaatattcaagaagggcagtggctttatgcacaaataaaaagtatttcactaagtcgccatctttaa

SEQ ID NO: 293751 - DNA, 693 bp, Proteus mirabilis
atgttaagtgaatacgaatggcaagcgattcttttaagccttaaggtatcgacaattgcagtaataattagtcttccttttggtatattgatggcttggctgttagttagggttcgttttcccggtaaatcattgcttgatagcattattcatttacctttagttttacctcccgttgttgttggttatctattattaattagcatggggagacgcggatttattggtgaatggctatataattggtttggatttagttttaccttcagttggcgaggggcggcacttgcctcagctgttgtggcatttccactgatggtaagagcaattagactagcactagaagctgtcgaccaacgtatggaacaagcggcaagaacattaggcgcatcaccattacgtgtcttttttactataacgttaccattatctatgcccggcattattgcggggatcgtattggcctttgctcgctcattaggtgaatttggcgccacaatcactttcgtctccaatattccaggggaaaccagaacgatccctttggctatgtatacgttaattgaaacaccgggggcagaaatggatgccgcccgtttatgtgtcattgcaattattttggcgctcgtctctttaatggcttcagagtggctaactcgttggggtcgtaaaagattggggggcgtatgctag

SEQ ID NO: 293752 - DNA, 771 bp, Proteus mirabilis
atgaaaaaattatcaggtaagttactggctggtgcgattatctcttttgcttttgtgagccaaagtatggcgtcggaaaaaataacggtatttgcggcggcttctctcactaatgcgcttaatgaaatttcggcacaatataaacaggaaaaacaagcggatgtcgttgcttcttatgcatcctcttcaacacttgctcgccaaattgagcaaggagcacctgcaaatctatttatttctgccgatcagcagtggatggattatgttattaataagaatttaatggtgactgattcacgacatacattattaggtaacgacttagtgttaattgcccctaaagatagcaaattaaacaatgttgttattaataaggatactaaatggaaatccttacttaatggtggaaaattagctgtgggtgatccagatcatgtacctgttggtatctatgctaaagagtcattagaatatttaggtgcatgggatgtggtgagtccggaaatggcgcgcactaataatgttcgcagcggtatggcattagttgaacgagatgaagcaccattaggtattgtctatggctctgatgctgttgccagtgacaaagtgaaagtggttggggtattcccaactgatagtcacaaacctgttgagtatccaatggcagttgtaaaaggacaggataataaagctgttcgtgatttttatgactatctaaaaacacctcaagccgcagaaatttttaagaaatacggctttagcccactttag

SEQ ID NO: 293753 - DNA, 144 bp, Proteus mirabilis
atgtttgaattattgaaaagtttagggttcgctctcttgatggtacctgttgtgatggtacttatcatgggcattatttatggtttaggcgagatttttaacttaatttcacctagtcagtcaaaggctgataaaaaagcataa

SEQ ID NO: 293754 - DNA, 792 bp, Proteus mirabilis
atgcaagcagaaatattactgacactgaaacttcaagataagctctttgctgatccacgccgtgttgcgctgttaaaacaaattaaagcaacaggctcaattagccaaggggcgaaaatggcgggcattagttataaaagtgcttgggacgccatcaatgaaatgaatcaactggctgacgaactcctggttgatagagcaactggcggtaaagggggtggaggcgctacactgactcattattgtgaacgcttactacaactttatgatctactaggacaaattcaacaaaaagcctttgatgtattaaaagacgattcattacctttagacagccttttagcggctatttcacgtttttcgttacagaccagtgccagaaaccaattttttggcaccattattgaacgcgatcacttacaagtacaacaacatgttaatgttcagcttgctgatcaaaaaacggttattcgcgcggcgttaactgaaaaaagcgccgatcgtctaaatcttaaagaaggcaaagaagtactcgttttaattaaagcgccatgggtcaatatagaaaaaggcgcctctgtagcacaacaatatgacaatgcgctatcaggcaccctaacccaaattgaaacgggcaatgaaaatagtgaattagtggtaacgttagaaggtggactagaagtgtgtgcgacttgttctaaccagcatgttacacaacaaaagctacatattaatgataccgtaacagcgttatttaatgccgatcaggtgattatcgccacattatgttaa

SEQ ID NO: 293755 - DNA, 312 bp, Proteus mirabilis
atgacaaatgaagcttttttaaaatttaaggattcagaaaataaaattatcattccgtacctcaaaaaagtatttccatcattgaaatcagcatgttgtttatatcatatgatagaacaattagaggatgtttatacttacttaattaatagcaaggatgttatttttattgaagtgtcgaggttaaataattctattaaccatacggatattttatcaattaaagattatgctattatgaaaaaggggaaacaatatcatcgttatatgaaagagattattgctttatcaaatagtgagataattaaatga

SEQ ID NO: 293756 - DNA, 3261 bp, Proteus mirabilis
gtgtctgaaaaaatagacttttattcaggtaaaaacatttacatttcaaatgtaataattaatgaatcaaatgaaaaaagtttatcagcattagagaatattaaaataaaacgcgatgagtctttatttttcaacctaatgccaaattttagagatgaacaatatatttcagcgtttttatttaatatggggctttggaaaagtaagaataatataagcttgatggctggtaaagatattgttagtcagggaataaaatattatagtaacaaagaaataacttttaatgcaggacaagatatttttcttgcctccaaattaataaaagaagccgctccttttttcagtgatatttattacccccaactacaatctaaattattttcagataataaccttattttaaatgccgcgcgtgatattgatttaagttcaacagtattaaattcaaaagataaaatcattgtattagcgggtagaaatataaaactgggtgcaaatgcttattccgccatcaaagatccccacgaagatgcgcaagacattcaatatgccaccacatccattatgggaaataaaggtatttctattgcatcatcaggctcactcacaacagaaggaagttcacttaaatcagagggggatattgctatttccagtggtggcaatatccaattgggatcagtaagaacacattttcgtaaagagtcggactcagagttagaagaacttcgtaaacaagtcagtactgaaattaatagcggtaatcatctaacactattatctgagggcagtattttatttcaggcctctcaattggctgctaataaaaagatggatattgctgctaaaggtggatttctttatgcacagacaatggaagaatccagttactatgaagaagaaaagaaaaaatgtaattggtggacactgtgtgcgactaaaaagaaatataccaaaacatttaataacacaacgaataaagttaccgagtttattgctaatgacgatattaatttaattgctaaagatgatatcactttagaagcaagcaaattagagacagcaaagaatgccaaattaaccagtaaaacaggaggcattaattttaaagcggtgaaagatactgcttttaaacaagttattactcgttcaaaagatatatatatcactcaacgtaatcagggatacaccaagggaacatggctattacctgaactctatattggcggaaagctgactatcgatgcgccaaaaggcatatctgcagatattaaagccaaaaaagagcaatctttagagcaggcattaactgccttaagtaacacaccagaatatgcttggcttaatgcgctccaacgtcaagaaaatattaattggaatttagtgaaagacacttattccagttgggatgataaaacccagcagttaaatccagttgttggtgcggttattgccatcgcggtaggggttgcaacttatggtacggcaacagctgcctcaataggaggaatggcaagtaatgccactattgctgcaggagcctctgcggggggtgcgtcaacggcatcagttgcggcacaagccggttttgcttctttagtttcgcaagctgcggtctctttagctgaaaatcaaggcaatatttctaaaacatttggcgccttaagtcgcagtgatacggtgaaatccattgtcaccagtatgaccgttgcaggcgccttgcaaggtcttgaccaatttatgggttgggatcaagcaatacaggggggaacattaccgacaacaggcaagttgcttgcgacggataatgccacatggactcaagttgctcaacgcgttgcctcacagtcagtagtgagttctacactgggcacagccattcaaggtggcagttttattgataattttaaaactgcgctattaagccatatcggcagtcaatttcacgctgaaggtgccaatctcattggtgataacggtgcgatattagggcatgcaggaaaggttttaagccattctgttgttgcaggagtgagtgctgaaattgcaggaggcagtgtaacaggtgcagtagccggcgccttggcagcagaaatagcggcaatatcgctacaaagtaaattatttgagcctagttatttaaatgaaactgacagacaagttgcattaattcaagaggcactacatggcaatgaaggaaaaacacagctcactaaattaattggtgcactgacaggcgctattgtgactcgtaagcctgagggcgtattttctgcggctaattctgcggagttagtttatcgacataattacagcgaacatatgctttcaaagctagcactagaaaataataaggacataattgcagcgtcaaaaggtgatgttgcagcagcagaaagagttgtaaatcgacaaaatgcagggatgattgcgattgctcttggtttaggaggaagtgcgagcattattggtggtcacactgttattgcagcaacaccagaacttattgctattacgcaagctgcatttagtacatgtaaagctaattgggtttattgtgctaatcagctaggtattaatatcgctgggatatcagctccagaagctgcaatcgctggtgtcaccgttggtactggttataaagtattagctagttcagaagaaagtgctaaagctttctctagcatgttagctaatagttcaaagtctttaatgacttcaggaaaattaaatataactgctataaaaccgatagtagaacaagaaaaattattaataactaccaacaaaaaagctattgaaataatcaataacggggagtttataatatattcaggagtaactacgaatggatataaagtatctaatggagccaaaaccgtagtttttaaaaatgaattagaacatcctattgttcaatctaggattaatattaaagtgggagatgttgaatcaggttggttgcatgtacaaaaacgtcatttttcaggagcgcaaaatgctagccaatttacgcttagtgaacaggaaattaaagatatattattaagtcctgctgtcattaagattcctattaataaaacgagagaatcatataataaaaacaccaatagtattgatattttgtatgaaagagtgattcagcttgataaaaatataggaattgataaatttagtaaacagccaactaacataattactatgctcacagataaaaatggaaatttaataactactacccctggggaaataaagtga

SEQ ID NO: 293757 - DNA, 207 bp, Proteus mirabilis
gtgagagtaattgatggagtattaataaatgagcaaccatcacaactaattccattaggattagcaattaaaacatccgcttgttgtcctgcaacttctaatttacctaataactgtgaacgactattaccgacaacttcattaataattaaattagccgtattaccttttaaatttttattagcagatattttttttgctaattga

SEQ ID NO: 293758 - DNA, 1560 bp, Proteus mirabilis
atgaataacattaaaagggaatgtgttaactatttattaggattaatggcgctatttttattaacgataagtaagataacttttgcagaaataaataataatgtaaataattgcttcttaattaatgaaataaaaatagaaaggaatggtttattaactaataaggcacaaaaagaattaatatctaaatatataaataaatgtttaacattaagtgatatgcaacatatcattaaatcaatgactaatgcgtatattgaaaaaggctatattacttcacaagcttttattgccgatcaagatctctcaaatcatcagttaaccattaacgtaattgaaggaaagataaaatcaatctttattgataatatgacttcccccatggttgatattctatttccttcatatcaagataaacgacttaatttacgtgagttagagcatgggcttgaacaacttaatcgattaacaacatcactatatagattagatattcaacctagtgacaggataggatactcgactatttttatttataaggaaaacgaaacgcatcctttcagaaatcaacttactattgataattcaggttcaaaagcaacaggtgaaatgttactgacgaataccacagcaatagattcgttatttggatttggagagcagtgggagctctccttaaatagtaatacagatttattacattcacattattatagaggctatacagcgagtataaacattccctatggctattggttttatcaatatcagttatcttataaccgttcttctcattttattaaaagttatagtaatcaatatatctataaaagtataaatactaatcagcaagttgatattagtcgtttactttatcgggatagtaagaagaagataatattaaaaggcatattaaagcataaaaaagtaagaacggaattagccaaacagccgatattaatcaatagcccaacattaacatcactatcattagcgcctcaatatcattttaatctgacatcaggttatttatctattaatccatcagcagaaattgggttgtctttttttggggcatcacctgattatattgctgaaaactcaccccgaagccactatagaaaattgagtctaaatatacattatcaatatttatttccttactctgtctcctatattacgtctttttatggtcaatatacatctgataatctttatagtgtggaaaaaataaccatagatggattaaatgcggttcgtggtactaaacaaaataagcttagtgccaatagaggactttattggcgtaatgaaattaatacaccatggataaattcatttttaggtcaatggcgttttattacggctgttgattatggcgttatctattctgatcaatatgaaacaaagcagcagtctttattagctggcgctatggggctttcattttatcgttcccctttttcttcacaactattgataaacaaaccattcatttatccaaagtggtcaaatgctaaccaatggtctttatcttggtcaatttcttttgctctttaa

SEQ ID NO: 293759 - DNA, 1467 bp, Proteus mirabilis
atgaagtacttgcaactcacaaaaacactgtttcgcttaagtgatacactctgcttgcatatcgatgatttaactatcaatgaaggagaaagttgggcattcgttggtagcaatggtagtggtaaaacggcgctcgctaatacattatgccaagaggggattttattatcgggtgagcttattaataggtttactcgtccgattaatctctcttttgaaaaattacaaaaaatgatagaggaagagtggctgcgtaacaatacagacttattaagtgaagatgaggatgatacgggattaaccgtggctcaggtgatccaaatgcaggtaaaagataatgatcgctgcctgttattagcaaaacaatttggtattgatgcacttttatcaaggcgttttaaatatctttcaacgggagagtctcgtaaggtactgcttattcagttattgatgaataaacctgatctattaattttagatgagccttttgatggtttagatattgactctcgtcgtacattaagtgagttactttcatcactacatcaacaaaagctaacgattgttcttattttaaatcgctttaatgatattcctgattttgtgcaaaatgctggcttattgattgactgtaaactcgtggcacaaggtaaaaaaagtgatattttatcagactcagtaattgcgcaattatctcacagtgaaacacttgaaaatctgatcttacccgcctcagactccgttgatgcagttcctaccttaccaccaacgctttcccctattatacttaaggatggcgtggtcagttataatgataaacctgtgctccatcacttaacctgggaagttaaaccacaacaacattggcaaatattaggtcctaatggcgcaggaaaatcgaccttattaagcttaatcacaggagatcatcctcaaggctatagcaatgatttaacactatttggtcgtaaaagaggcagtggtgaaaccatttgggagatcaaacgccatattggttatgttagtaatgccttacatcaaagctatcgcgtctcttcaagtgtgaaaaatgtgattatttctggttttcatgactctattggtatttatcaagccgttaccgataaacagcaaaaattagcggatgaatggctaacactaattggtttaactgcactcgctaaccatccttttcactcactttcatggggacaacagcgtctagtattaattgtaagagcattggttaaacacccgacattattgatcctcgatgaaccactacaaggattagatacaaccaatagactattagtacagcgctttattgatatcatgataagccatagcaatactcaactactgtttgtcagtcatcatcaagaagatgcacctcactgtattacccatcgactgatttttattaaagaaggagatatctatcgttaccaacaacaaccctgttaa

SEQ ID NO: 293760 - DNA, 753 bp, Proteus mirabilis
atggcagtaactaagcttgtgctagttcgacacggtgaaagtgtatggaacaaagaaaaccgttttacaggctggactgacgttgaattgtcagataaaggccgtaatgaagcgcaagaagcaggtaaactgctgaaggctgaaggttttacttttgactacgcatatacttctgtactaaaacgtgcaatccacactctgtggaacattcttgatgaagttgatcaacaatggctgccagtagagaaaagctggaaactaaacgaacgtcactacggtgcattacaaggcttaaacaaagctgaaacagctgaaaaatacggtgacgagcaagttaaacaatggcgtcgtggttttgcggttaccccaccagagttaactaaagatgatgatcgcttcccaggtaaagatccacgttatgcatctttaactgaagctgaactgccattaacagaaagcttagcgttaactatcgaccgtgtaacaccatattgggaagaagtcattaaacctcgcgttgcttcaggtgataaagtgattattgccgctcacggtaactcactgcgcgctctggttaaatacctagacaatatgagtgaagaagaaattcttgaactgaatatcccaacagcagtacctttagtttacgaatttgatgaaaatatgaaaccaatcaaacgttactacttaggtaatgcagaagaaatcgcagcaaaagccgcggctgttgctaaccaaggtaaagcaaaataa

SEQ ID NO: 293761 - DNA, 1059 bp, Proteus mirabilis
atgaattaccagaatgatgatcttaaaataacacaaatcaatgaacttttaccgccagtggcattattggaaaagtttccagccactgacaatgcggcgtttacagttcgtcatgcccgtgaagctattcatcaaatccttgctggaaaagatgatcgcctattagtggtgattgggccttgctctattcatgatcctaacgcggcactggaatatgctcagcgtttaaatttattaagagaagagctgaaagataaacttgaaattgtgatgcgagtttattttgaaaaaccacgtaccacagtcggttggaaagggctgataaatgatccacatatggattgtacctttgatattaatgaaggattacgcattgctcgtcgtttgctattaaccatcaatgatagtggattaccaacggctggcgagtttttagatatgataaccccacaatatgtcgctgatttgatgagttggggagccattggtgctcgaacaacagaatctcaagtgcatagagaattatcctccggactatcttgtcctgttggttttaaaaatggcacagatggcacaattaaagtggcgattgatgccatcaatgctgcaggctctccacactgtttcttatcggtaactaaatggggtcactcagcgatagttcgtactgcagggaataaagattgccatattattttacggggcggtaaagagcctaattacagtgcagaacatgttgctgccgtaaaagaaggtctgaaaaaagcaggattaccccaaaatgttatggttgattttagccacgccaatagctgtaaacaatttaagaaacaaatggaggttggtgccgatatttgccaacaaattagcgcaggagaaaaagctttaattggtgtaatggttgaaagtcatttagaagagggcaatcaatcattagaaagtggtgaacctttggtatacggtaaaagtgtcacagatgcttgtattgggtgggatgatacagaaacgttattacgccaattagccgatgcagtcgctactcgtcgtaataaatcataa

SEQ ID NO: 293762 - DNA, 729 bp, Proteus mirabilis
atggatgtcattagttggtttagtatcaataatattttagtcaatattccattaggaaaagaaggctatccactctcatggattgaagctatagggactattgctggattattatgtatatggcttgcgagccaggaaaagatcattaactatttatttgggttaattaatgtcactttattcgccattatttttttccagatccagttatatgccagtctactgctacaaattttcttctttgctgccaatatttatggttggtatgcatggagtagagtgaatgattttgaacaagcagaattgaaaatacgttggttaaagccgggccaacaaatcgtattaatcattgtctccattgctgccattattgcgctaacgtttaatattgataccgtttttggctatttagcagttattgctgttgatatcttaaatgtcttcggggcaaatttagccacacctgctatcgagccagatgcttacccattctgggattcaacaatgacggtactctccattgtggctatgatcttaatgacacgcaaattggtagaaaactggttaatttggtctgttattaatgtcattagtattgttatattttataaacagggtgtttatgccatgtctattgaatatatcatcttattggctatcgctattaatggctctcgtttgtggatcaaatcagcaaagcattcaaataaaaataattatctctcataa

SEQ ID NO: 293763 - DNA, 891 bp, Proteus mirabilis
atggagccaatcacccgcttaatcgatcgcatgttatcttttgcattacttgatcctcgaattgaggctgtggtattaacaggctcagtgagtcgtaataagaagatagacagctattctgatattgatatagagcttattggtcacggtgcgactgagctagcaaaaaaccaacattggctatcacaatttggtaaacacctcgtctctttagcaacagaatgtgaagatccgaacggcattcgctggccaatctatttgcacgtattagctcaaggccgaaaaatggatattttgatggcagagcctgaaagaattatcaatatgaaacaaaatggtctaagtccagtttatcaacgaggctatcgtgttttacttgataaaacaggtttatgtgaccaacttccagaaattagcactgtgacacccccagccctttccatagagcaagctgatgccttggctcaagagttttggtttgaagccacacaaatcgctatagctatcttacgtaatgaattttggttcgctgaatatcgtatgagtgatataagggaatggttgatccgtttactagagcaagttgctctgcaaacatcaacacaagatgtctggtatcaaggcaaaaacttacgggagtggttacctaagttttactcattacgttcattagaaagcacactggctatgagtaccccttatgaagcagcggctgcattaagtattatcatggctttttttattgatgcatcaaagcgttttggtttgtcgatagaaaaggcaacacaagctcaaacacttattagcgattggtttattgataatgaactattaactgaaaatgaatattaccaaataaccacttccattatttgtcattatccaacttaa

SEQ ID NO: 293764 - DNA, 774 bp, Proteus mirabilis
atgaacaacagtaacttcagacctttattgatgagtctgttgttactggttggcgtagcggctcctgtagccgctattgcccaagcgccaatcagtaatatcggttcaggctctactgatgaacgactcgcccaacttgagcgtatctctaatgctcatagtcagcttttgacccaattacagcaacaactcgcagattctcaacgcgatattgatatgttgcgtggtcaaattcaggaaaatcaataccagttaaaccaagttgtagagcgtcaacgtaatatctatcaacaattagatagcctaaatggtggcaactcagcaccaacaacggatgaggcttcaacgggtggcaatgtaccttcaacatctgatacaagtacgagttcgtcgtcaacaggtgatgaaaaagccgattataacgcggcaattgatattgtattgaattcaaaagattacgataaggcaattgttgcattaaacaactttattaaaagttatccgaagtctagctatcaatcaaatgctcaattttggttggggcaaatgtattatctaaaaggtaataaagatcaggctgcgagtacttttgctattgttgtgaaaaattatccaaaatctcaaaaagcaagtgaggccttttataagatagggcttattatgcaagagaaagggcaaaaggataatgcgaaagctatttatcaacaagtggttaagcaatatccaaacagtgctggtgcaaaattagcacaaaagcagttagcagcactataa

SEQ ID NO: 293765 - DNA, 498 bp, Proteus mirabilis
atgcaattaaacaaagtgtttaaagggttgatgttagcattaccactcgttgctgttgcagcatgtagctcaaacaaaaacgacgatcaaacagatacaagcaacaatgtacctgttactgagcaaggccctacagctgaagaattagcacgtcagcaattagaacaactgaaacaaactaacattgtttacttcggttttgataaatatgacgttacttcagaatatgctcaactgttagatgctcacgctgcattcctgcgtgctaacccttcagtacgcattactatcgaaggtcatgctgacgaacgtggtactccagaatacaacatcgcgttaggcgaacgtcgtgcaaacgcagttaaaatgtatctgcaaggtaaaggcgtatcagctgatcaattatcaatcgtatcttacggtaaagaaaaacctgctgtactgggtcatgacgaagccgcttatgcgaaaaaccgtcgtgcagtactggtttactaa

SEQ ID NO: 293766 - DNA, 1296 bp, Proteus mirabilis
atgaagcaggcattaaatgttattttcggacttttgatattatgcgttacaacgctcgctaatgcagaagttcgcattgaaattacacaaggggtgaatactgcacgccctattggtgttgttccttttaaatgggaaggcacaggtcaaatgccagaagatattgctggagtgattgcggctgatttacgaaatagtggtaaatttaaccctattgatatgaatcgtttgcctcaacaacccgttaccgcttctgaggttcaacctgcactctggacagcattaggtattgattcagtggttgtagggcgtgttcagccctcggcagatggtcaatatgttgttagctatcaattagttgatgttgctggctctccgggagcggttttagcgcaaagtgagtataaaatcagcaataaatggttacgatatgctgctcataccgccagtgatgaaatctttgaaaaattaactggcattcgtggtgcgttccgtacccgtattgcttatgtcgttgtgactaatggtggcgcttatccatatgaattacgtgtatctgactatgatggatttaatcaagatcgcgtttatcgttcatcacagccattaatgtcacccgcttggtctcctgatggtgctaaactagcatatgttacatttgaaagtggtcaatctgctttagttgtacagacattagcaacgggggaagtgcgtcaaatcgcttctttccctcgacataatggtgcacctgctttttctccagatggctctaaattagcctttgcactgtcaaaaagcggtagtctaaatctttatgtaatggatttagccagtggcaatatgacacaggtaaccaacggtagaagtaataatacagaaccgacttggatgcctgatggacagactttggtctatacttcggatcaaggcggacgtcctcaaatttataaaattaatattaacggaggaacgccagaacgtattacttgggaaggaaaacaaaaccaaaatcctgcagtaagtcctgatggtagtttcttagttatggtgagttctgaaagcggtaggcaacatatcgctaagcaggatctagaaacgaatgctgttcaatatttaacagatacgtttctggatgaaacgccaagcatcgcgcctaacggcactatggttatttatagctctactcaaggcttaggaaccattttgcgactagtatcgactgatggacgtttcaaagcgcgtcttccggcgactgatggtcaggttaaatcacctgcctggtctccgtttatgtga

SEQ ID NO: 293767 - DNA, 1068 bp, Proteus mirabilis
gtgggaaagaagacgaaaccaatccgaagtaaattgagcggttcagttatcttgtctactgtcttgcatttactgatcatcgctttgcttatctggggatcgttaactcagaaatggaatttaggcggtggcggtggatctgatgggcaagttattgatgctattatggttgaccctaatgcggtagtacaagagtataatcagcaaaaggcgcaacaagctaatgtccaaaaagcagaacaagaacgtaaagcgcgggcgcagcaacaagaagaagagctacgccaacaacaaattaaagaacaagaacgtttaaaagcgttagaagtggaacgtttgcaagcaaaagaggctgcagaagctcaacgtcgtgaagcagccaccgccgctgctaaagcgaaagaagagcaaaagcaggctgaagaagctgccgcacaagctaaagctgaacgcgatcgtattttaaaagagcaagctgatgcgaaagccaaagcagaggcagaagcgaagaaacaagcagaattagcagcaaaacagaaagcagaagaagcgaaggcaaaagcagaagctgaggcaaaagcgaaggctgaagccgatgctaaagcgaaagcagaggctgatgcaaaagcgaaggcagccgcagaagctaaagccaaagcagcagcggaagctaaagcgaaagccgctgcacagcaacaaagtaaagcggttgatagtctactcgatggattagttgctcaaggcgataaacaatcgggggcttctgcagcaggtcaaggtggtggtaatcgctctggggcaaatgctgcgggcattgatcgctatactgggcaagtaaaagttgccatcgaacagaagttttttgattctgatttatataaaggtcgtaaatgtgaccttaaaataagtattgcaccagacggtatgttagtaagtgcaaaagcggtaggtggtgatccggctttatgccaagttgcattacaagcggctaaaatggcaacattgcctaagccaccgaaagatatttacgaacaagtaaaatcaccaacaattgagtttaagccataa

SEQ ID NO: 293768 - DNA, 426 bp, Proteus mirabilis
atggcacgaggtcgcagtagccgccgaggcgtaaaatcagaaattaatatagtacctttgcttgatgtgttattggtgcttttgctgatttttatggcaacagcgccaattatttcacaaagtgttgaggttgatcttccacaagcaacagaaacacagactgtttcaaccagtgataacccgcctgtaattgtcgaagttgctggagtggggcaatataatatccgtgttgaacaagaggttttagagcttttacctcaagaacagattatggctgaagcaaaacgacaattagaaaaaaacccgaaagcggtctttcttattggtggcgctaaagatgttccttatgatgagataattaaagcactcaacatgttacgtcaagcgggtgttaagtctgtcggtttaatgactcagcctctttag

SEQ ID NO: 293769 - DNA, 687 bp, Proteus mirabilis
gtggctgacatgaatgttatcgatctctttctaaaagcggggcttttagttaagttgatcatgttgttattaatcggattttctattgcctcatgggcgatcattattcaacgtacgaaagtattgaatgcagcagatcgtgaagcggcagattttgaagataaattctggtcaggcactgatttggctcgtctatataaagaaagccaagctcgtcgtgacgagttatcaggggcagaacaaatttttcattctggttttaaagagtttgcacgactacatcaagcgaatgttcatgcacccgatgccgttgttaatggggcttcccgtgcaatgcgtgtttcatttaatcgtgaattagagtccttagaaacgcatattccttttttaggtacggtggggtcaattagtccttatattggcttattcggtacggtatgggggattatgcatgcatttatcgctttaggtagcgttaaacaggcaactttacagatggtggcacccggtattgctgaagcgttgattgcaacagccattggtttatttgcggccatccccgcagttatggcttataaccgctttacgcaacgtgtaaataagttggaacaaagttacgataactttatggaagagttcctgacgattttacatcgccaagcttttgtctccgcagaaaagaaatag

SEQ ID NO: 293770 - DNA, 396 bp, Proteus mirabilis
atgcggtttctttggccagttcgtgtctattacgaagatactgatgccggtggtgtggtctatcatgccagttatttaaaatattttgaacgtgcaagaacagaattactcagagaaaaaggtttttatcagcatgatttacgggagtatgatcatgttgcgtttgttgtgcgtaaattaaccattgactatattgcgccagcacggctcgatgagcttctgaaagtagaaagtgaaattactacattacgtggtgcatcaatgacattttctcaaaagcttatcaatcaagatggtgtggtactgtgtagggcagatgtattagttgtctgcgttgattcattaaaaatgaagcctgtagggcttcctaagtccattatcgcggagtttaagtag

SEQ ID NO: 293771 - DNA, 408 bp, Proteus mirabilis
atgagcattaaaatagacccattaatagaaagtgtgcaagtgttgcataatgagattgaaactgtttttactcaaacccctattgctacacaggcattaaaaaatatagaaatgttacttgccaacacgttttctatgattggtataacaggaaagaaaataaattatgatgatgtaatggcaatgttttctcgtaatgcagggaaaaggccagaattgaggattgaaacagatagttataacattatttaccaatctgaacattgggcaacggtgagctatcgtgaaacgcattatgaaaataagaagattctcacccgtcaatctgtggtggttttgagacgcacgtctctagattgtcaatggcagtggtattacttgcatgaaacacctgtattagataattaa

SEQ ID NO: 293772 - DNA, 1371 bp, Proteus mirabilis
atgtcttatcgttatcaaatagccattatttttttactgggtttttttattgattgtataaatatttttatgtcggcaattgcattaccagcaattgcagcggatatgaaggtatctatcgtctccattacatgggtatcaaatagttatattttaggtttaacactgattattccattgagtcactggttatctcaacgttttggcgtgagagtattaatggtcagctcgatgttgatatttagtgcttctgtggcgttagtaggctattcacactcattttttgagctgattttatggcgttttattcaaggtcttagtggtggattattaattcccatcggccaagctctaacatttcagtattttcaagggcatgaaagaagcaaagtctcaactttaattatggctgttgctcttattgcacctgcaatttctcccacaataggtgggtttatcgttgatgctgtatcttggcgttgggttttttatagtaatgtgcctttttcattacttactgcgtttttggcttttatttgggtaaaagagtctaaatcacaagaaaatataataccagatcttaaagggatcttattaatcagtattattatcgtatcagggttatgtgcattatctgcttacggtgagtatcactctacacaattagcattagtcatcagtttttttgctgcattattttctcttctttattatcgtcattataaacagagtttatcaccggtaattaatctaaatttattaaaaaatagaaacttatcactttccatttttctctattactgtattccaggtgtttttactggtgtaaatattctggcgattttttatttacaacaatatctccatttttcggggcagggtacaggcagttttatgctgctatatgctataggtgcatttatttccattattgttggtggtgcactttataataaattgggtatgaagcgcttagctatattcgctttaattctgcacagtattggtattgtattattagcattagtaaataaagagagcgatctgcctttattaatactggcttatttaatgatgggaattggtggagggatcggtgcaaatacagcacaaacaacggccctttatgactttgataaacaaaggcttattcaagctagtgttatttggaatataaatcgtcaagttgtatttagtgttggcgcgacacttgttgcaatgatcttcaacacattatctctttttgtatcgtcacaaatggcttatagcacgacattttttatctgtgcaaccataggattatttccgctatttcttttcatattgttaaagcaaaaaacaaacttacaggaaacaaatcatgagcattaa

SEQ ID NO: 293773 - DNA, 894 bp, Proteus mirabilis
atgcaaaatcaaatagaccgaattcgttcttttatcgccgtagtagatacaggctcttttacacaagcagcaaagtatttacgcttaagtaaatcaatggtgagtattcatattaaagcattagaaacggaattaaatgtatctcttcttaatcggaatactcggcgcttcacattaactgaaacgggagaaatcctttatcaagattttcgtcaagttttagttcaactcgaacaaacattagataaggcacggttaggacaacaaaacttacagggaactttacgattaacttcaacggctgaatttggtgaacattatatattgccacttttacatcaatttatgtgtttacaccctcaactaaaagtgcaatatatattcaattcttctattgatgatcttatcaatcataagttagatttggcgatacgccttggcgcattaaaagacagtaattatcgctatcgcaaattagcagattacacaatcaaattagtggtatcaccacatttattgaaaaaatatcctatccaagaaattgcagatttagcggcagttccctatcttgcaaacagcaatttacgccatagcaaactcagccaacaagataaaatcaatcaactattttcacaattgcactcaatggcacttttcgaaacgaatactattagtgcattaaaacagatggcactcaaacaaatgggaatgactatattaccagagtggtacattcaacaagaaataacacagggtgaacttgttagccctattcctgaacttaccttattaaatcaatctattaatgtcatttttccacatggtgaacatatgccaagaaaaacccgtctatttattgattttttaaaagagagaattaattctatgccctaa

SEQ ID NO: 293774 - DNA, 285 bp, Proteus mirabilis
atgttggataaaagttaccaactacttaacaagggcccaattagggctcttgttttaatcatggctctagcaatggcattttgtgttatgtgggatccgagtcgattcgcggctaatacaagctcattagcgatttggcaaggaatattactgatttgggctgtatgtgcaggggcagtttttggcttagcctatcgtcctaaacatgttgtagcgcaatatctattacatcccattcccgccattattattttagttgtagggctatattatttcttcttctaa

SEQ ID NO: 293775 - DNA, 1158 bp, Proteus mirabilis
atgtttgattatgaagtattgcggtttgtttggtggctactgattggtatcttactgatcggctttgcggtcaccgatggttttgatatgggtgtcggtgtgttattacgcgtaattgcaaaagatgacacagaacgccgtattttaattaactctgtagcacctcactgggatggtaaccaagtttggttaatcactgctggtggtgcattattcgctgcatggccaatggtatatgctgcggcattctctggtttctattttggtatgatcttcgtactggcggcattattcttccgcccagtaggttttgactaccgttctaaattagaatcaccaaaatggcgtggtatgtgggattggggtatctttattggtagctttgttccaccattagttatcggtgttgcttttggtaacctgttacaaggtgttccattagaagtcgatagcatgcaacgtgtatcttataatggtacaactaacgcactaattaacctgttaagcctattaaacccatatggtctattagcaggtgttattagcttaatgatgattgtggcacagggtgctagctatcttcaaatgcgtactaccggtgagctgcatgagcgtactcgtaaagcaacttacattacctctttaatcacttttattgcttttgcattagcaggcgtgtggttaatctacggtattgatggctttattatcactagtgcggttgatactgcgggtccttcttctccgttgttgaaaacagtttctcacgaagctggcgcttggatgacgaactacaacaactatcctattttatggatcttaccggcattaggtctgttaagtcctttattagcggttgttgcaactaaagcaaacaaaggagcttgggcattcctgttcacttcactgactattgcttgtgttatcctaacgtttggtgtaaccctgttcccattcattatgccatcaagcacattccctgatgtaagcttgacaatttgggatgcaacttcaagcctgttcactttacaagtgatgacagtagtcgcgattatctttgtacctatcgttctcctctacactatctggtgttactggaaaatgcatggtcgcctcgataagaaatttatcgaaggcaataatcatactctttactaa

SEQ ID NO: 293776 - DNA, 1569 bp, Proteus mirabilis
atgtttgatattgtcgaactgtcacggttacagtttgccttaacagcgatgtatcacttcctgtttgtcccattaacgctcggtatggcgtttatgttggcaatcatggaaacgatatatgtcctgtcaggtaaacaagtttacaaagatatgacaaagttctggggtaagttattcggtattaactttgctctgggtgtcgcaactggtttgaccatggagttccaatttggtactaactggtcatatttctctcattacgttggtgatatcttcggtgcgcctttagcaatcgaaggtctgatggcattcttcttagaatcaactttcgtcggattattcttcttcggttgggatcgtttaggcaagaagcaacacttaatggtaacttggttagttgcctttggttctaacttctctgcgctgtggatcttagtcgcaaatggttggatgcaaaaccctgttgctgcagacttcaactttgaaaccatgcgaatggaaatgttgagttttgctgatctggtcttaaacccagtcgctcaggtgaaatttgttcacaccgttgctgcaggttactgtactggtgcattctttgttttaggtatcagctcttactacctactcaaaggtcgtgatatcggttttgcaaaacgttctttcgctgttgcggcaacctttggtatcgctgcggtattatctgttatcgtactgggtgatgaatctggttatgaaatgggtgacgtacaaaaaaccaaattggctgctattgaaggtgagtggcatacagagccagcaccagcttcctttaacttgattgcattccctaatcaagaaaaaatggaaaacacgtttgctctacaaattccatatgtcatgggtattatagcaacacgttcttttgatacgccggtattaggtctgcatgatctgatgagccagcatgaagtgcgtattcgtaatggtatgaaagcgtatgacctgttaactgaactacgttcaggtaacactgatcctgccgtacgagctgcatttaatgagtctaaaaaagacttaggctacggtctattattgaagcgttatactgaaaatgtttctgatgcaactgaagagcaaattaagtcagctgtaaaagattctattcctaacgtcgcaccacttttctggtcattccgtatcatggtcgctgccggcttcctgatgttattggttgttgcgatctccttctggactgttctgtctaaccgtatcggtaactacaaatggttactgcgtgctgcgctatttagtattccattaccatggattgctgttgaagcgggctggtttgttgcagaatatggacgtcaaccatgggcgattggtgaaatcttgcctacggctgtagcaacttcttcactgacacaggctgatattctcgtttctatgggacttatctgcggtctgtatactctgttcctcgttgccgaaatgttcctgatgttcaaatttggtcgccttggcccaagtagtctgaaaacgggtcgctatcactttgaacagaagacagcttcttctgcacaaagtaagtaa

SEQ ID NO: 293777 - DNA, 873 bp, Proteus mirabilis
atgtctattttaatcgataaaaacactaaagttatttgccaaggtttcactggaagccaaggaactttccactccgaacaagctattgcttacggtactcaaatggtgggtggtgttacaccgggtaaaggtggtacaacacatttaggcttaccagtatttaatactgtacgtgaagcagtggaagcaacgggggcgacggcgacggttatttatgtaccagcaccattttgcaaagactctattttagaagctattgatgcaggtattaaactaattattacaattacagaaggtattcctacgctggatatgctgactgtaaaagtaaaattagatgaagctggtgttcgcatgattggccctaactgtccgggtgttattactccaggtgagtgcaaaattggtattatgcctggtcacattcacttacctggcaaagtaggtattgtctctcgttcaggtactttaacttatgaagcagtaaaacaaactactgacgttggtttaggtcaatcaacctgtgttggtatcggtggtgacccaattccgggatcgaactttattgatattctgaagctattccaagaagatccgcaaacagaagcaattgttatgattggtgaaattggtggtacagcggaagaagaagcagctgcttatatcaaagatcacgttaccaaacctgttgtaggctatattgctggtgttacagcacctaaaggtaagcgtatggggcatgctggcgccattattgcgggtggtaaaggtactgctgacgagaaatttgccgcattagaagccgctggcgttaaaacagtacgtagtttagctgatatcggtgatgctgttaaatcgctattaaataagtaa

SEQ ID NO: 293778 - DNA, 1167 bp, Proteus mirabilis
atgaatttacacgagtatcaggcaaaacagcttttctcacggtatggattaccagcacctgctggtttcgcctgctccacgccgcgcgaggcagaagaagctgcatcaaaaattggccaaggcccttgggttgttaaatgtcaagttcacgcgggtggacgtggtaaagcgggtggcgtaaaagtcgtcaactcaaaagaagagatccgcgcatttgctgaacaatggttaggcaaacgtttagtaacttatcaaacagatgctaatggccaaccagtaacacaaatcttggttgaagcggcaacagatattgctaaagaactttatcttggtgctgttgttgaccgtggtacccgtcgtgttgtctttatggcttccactgaaggtggcgttgaaattgaaaaagtggcggaagaaacgccagagcttattcatcgtgccattattgatccgctgacaggacctatgccttatcagggacgagaattagccttcaaactcggtttaaaaggcaaacaagttagtcaatttgctaaaatatttatggggttagcgacgatcttcttagagcgtgatttagcgcttattgagatcaacccattggtgatcaccaaagatgatgatttgatttgtcttgatggtaaattaggtgtggacagtaatgcgttattccgtcaaccggaaatgcgtgaaatgcatgatccatcacaagaagatccacgtgaagcgcaagcggcacaatgggaattaaattatgtagcactcgatggcaatatcggttgtatggttaatggcgctggtttagctatgggaaccatggatatcgttaaactgcatggcggtgaacctgctaacttccttgatgttgggggaggggcaaccaaagagcgtgttacagaagcatttaagattattttgtcagatgaaaatgtcagtgctgtattagtcaacattttcggtggcattgtacgttgtgaccttattgcagacggtattattggtgcagttgaagaagtcggtgttaacgtaccagttgttgttcgtcttgaaggaaacaatgcagagttaggcactaaaaaattagcagatagcggtttaaatattattgctgctaagagcttaacggatgccgctaaacaagttgttgcagcagcggaggcaaaataa

SEQ ID NO: 293779 - DNA, 1209 bp, Proteus mirabilis
atgagtagtgtagatattctagtaccggatctccctgaatcagttgctgacgcgacagtcgcaacttggcataaaaaacctggtgatagcattcaacgcgatgaagtgctggttgaaattgaaacagataaagttgtgttagaagtaccggcgagtgaagctggggtgctggatagaattcttgaagaagaaggcgctacggtaggttcacgtcaattattaggacgtattcgtcttggtgatagcactggtattcctgcggatgtgaaacctgcacaagatacgacgcctgcgcaacgtcaaagtgcagatattgttgcgaaagaaagcaatgatgctcttagcccgacagcacgtcgtttagtcgctgaacacgatattaatccagcagatgtaaaaggcagtggtgttggtggacgtttaactcgtcaagatattgaaagccatgttgctaataataaatcagcaacagcagccaccgctgaagtttctcaagctccattatcgcatcgtagtgagaaacgtgtaccaatgacacgtttacgcaaacgtgttgcagagcgtttattagaagcgaaaaatactaccgccatgttgacaacgtttaacgaaatcaacatgcagcctattaaaaatttacgtgcgcaatatggtgaagcattcgaaaaacgccacggtgtacgtttaggctttatgtctttctacattaaagcggtagtggaagcgttaaaacgttatccagaagtcaatgcgtctattgatggtactgatgtggtttaccacaactattttgatatcagtattgccgtatcaacaccgcgtggtctggtaacaccggtattacgtgatgcagatgcgatgagcatggcggatattgagaaaaatatcaaagcattagcagtgaaaggtcgtgatggtaaattaaccgttgaagatttaacgggcggtaattttactattactaacggtggtgtttttggctcattaatgtcaacaccgattatcaacccaccacaaagtgctattttgggtatgcatgcgattaaagatcgcccaatggcagttgatggtcaggttgttattctacctatgatgtatctagcactttcttatgaccatcgtttaattgatggccgtgagtctgtcggtttcttagtgaccgttaaagaaatgctagaagatcctgcccgtttattactggatgtgtag

SEQ ID NO: 293780 - DNA, 2805 bp, Proteus mirabilis
atgcagaacggcgcaatgaaggactggctagattccacatttctagcaggagagaatcagtcttacatagaagaaatctatgaagattacctaactgacccaaactctgttgacgaaagttggagagaaatctttcaacaactacccgtaagtcaaggcgcagaacagtcgcattctcaaacccgcgactacttcagacgcctcgcaaaagaatccactcgatatcatacctcggtaagcgatcctgcaatggactcaaaacaagttaaagttttgcagctcattaatgcgtttcgttttcgtggtcaccaaaatgctaatctcgatccgcttggtttatggaaaagagaatctgttccagatttagatcctgctttccataatctcaccaaagaagattttgaagaaacctttaatgttggttcttttgctatcggcaaagaaaccatgaaactcggtgatatctatgaagcactgaaacgtatttactgcggttctatcggtgctgaatatatgcatattaccaatacagaagaaaaacgttggatccaacaacgtttagaatctgtcaatgttgcagaccaatttactaaagaagaaaaaattcgctttttagcagaactgactgcagctgaagggttagaacgttacttaggggctaaattcccaggagcaaaacgtttctctttagaaggtggggatgctctgatcccaatgttaaaagacttaattcgtcatgcagggaaacaagatacccgtgaagtggtacttggcatggctcaccgcggacgtttaaacgttctggttaatattttagggaaaaaaccggcagatttatttgatgaatttgcgggtatacacaaagagcatttgggaactggtgacgttaaatatcaccaaggcttttcatctgattttgcaacagaaggtgctcaagttcaccttgctttagcctttaacccatctcacttagaaattgtgagtccggttgttatcggttctgtccgtgctcgtcgtgaccgcttagatgaagcgcgcagtaatatggttcttccgatcaccattcatggtgacgcagcagtgacagggcaaggtgttgttcaagaaacactgaacatgtcacaagctcgcggttatgaagttggtggtacggttcgtattgttattaataaccaagttggttttaccacatcaaatcctaaagatgcccgttcaacagaatactgcactgatattgtgaaaatggttcaagcacctattttccatgtaaatgcagatgatcctgaagcggtagctttcgtcacccgtttagcgttggatttccgtaatacctttaagcgtgatgtgatgattgaccttgtttgttatcgtcgtcatggacataacgaggcggatgagccaaatgcaactcagccattgatgtatcaaaaaatcaaaaaacatccaacacctcgtaagatctatgctgataagttagtagagcaaggtttaatcgaagctaatgatgttactgagttagttaatctctatcgtgatgctctcgatcgtggtgattgtgtcgttgaagagtatcgtcctatggggctacattcttatacatgggaaccttacttaaaccatgaatggaatgaagagtatccgcataaagtcgaaaaatcacgcttacaagatttagcgcgtcgtgtcagcacagtaccttctgaaatcgcaatgcaatctcgcgtcgagaaaatttatgccgatcgtgctgttatggctgaaggcgaaaaattactcgattggggggcggctgaaaccttagcgtatgccactttagtggatcaaggtattactattcgcctctctggtgaagatgcaggccgtggcacattcttccatcgtcacgcggttattcacaatcaaaccaatggttcagtttatgtaccattagccaatattcataacgcccaaggtcaatttaatgtttgggattctgtcttaacagaagaagcggtattagcatttgaatatggttatgctactactgagcctcgcgggctgactatttgggaagcgcaatttggtgactttgctaacgtagcacaagtggttatcgaccaatttattagctctggtgagcaaaaatggggtcgtatgtgtggcttagtcatgctgttacctcatggttatgaaggccaaggtccagagcactcatctgcacgtttggaacgctatctgcaattatgtgcagagcaaaacatgcaagtttgtgtgccttccacaccggcgcaggtttaccatatgttacgtcgccaagcgttacgtggtatgcgtcgcccattaatcgttatgtcacctaaatcactgttacgtcatccattagcggtatcgagcttagatgaattagcggatggtaaattcttacctgtaattggtgagttagatgaattaaatccagcggatgtgaaacgtgtcgtgatgtgttcagggaaagtttactacgatttattagaacaacgtcgtgctaatgggcaaacagatgttgcgattattcgtattgaacagctatatccattccctcatgatgatatggcacagattttggcaccttatgctcatgtgaaagattttatttggtgtcaagaagaaccgctaaatcagggcgcttggtattgtagtcagcataacttccgtgatgctattcctactggcgcaacattacgttatgcaggtcgtcctgcatcagcttctccagctgttggttatacctctgttcatcaggagcaacaaaaagctctggttgaagatgcactgaaagttgaataa

SEQ ID NO: 293781 - DNA, 717 bp, Proteus mirabilis
atgaaacttgaattttcaatttatcgttataatcccgacgttgataatgcgccgcgtatgcaagattacacgcttgaagtacccgaagggcgtgacatgatgttgctagatgcattaattcaattaaaggaaaaagatcctacattatcattccgtcgttcttgccgtgaaggtgtatgtggctccgatggagtgaacatgaatggtaaaaatggtttggcatgtatcacacctatttcatctttacagaaaggaagtaagaaaattgtgatcagaccgttaccaggtctaccggttattcgtgatttaatagtggatatgactcaattctatacgcagtacgagaagatccgtccatatgtgattaacgacgacaaaaatcctccggctcgtgagaatctacagtcaccagaacaacgtgaaaaacttgacggactttatgagtgtattctttgtgcttgttgttcaacatcttgcccgtcattctggtggaatccagataagtttatcggacctgctggactgttagcagcgtatcgtttcttgattgatagtcgtgatactgaaacagaatctcgtcttgatgatttaagtgatgcgtttagtgtattccgttgtcacggtattatgaactgtgtcagcgtatgtccaaaagggttaaatccgactaaagcaattggtcatattaaatcaatgttgctaaaacatagtgcataa

SEQ ID NO: 293782 - DNA, 1767 bp, Proteus mirabilis
atgaatctgccagttagagaatttgacgcagttgtaattggtgctggtggtgcaggtatgcgcgccgctttacagatttctcaaatgggtctgtcatgtgcactaatctcaaaagtttttcctactcgttctcatactgtttccgctcaaggtggtattacagttgctttaggcaatacccatgaggataactgggaatggcatatgtacgatactgttaaaggttccgactatatcggtgaccaagatgctatcgaatatatgtgtaaaaccggtccagaagctattttagagctggaacatatgggacttcctttctctcgtcttgatgatggacggatataccaacgcccatttggtggtcagtcgaaaaattttggtggtgaacaagctgcccgtactgctgccgctgctgaccgtacaggccatgcactattacatactttgtatcaacaaaatttaaaaaatcataccactatcttttctgaatggtattcgctggatttagttaaaaaccaagacggtgatgttgttggttgtaccgctatttgcattgaaacaggtgaagttgtttattttaaagccaatgccaccattttagcgacaggtggtgcggggcgtatttaccaatcaacaactaatgcgcatatcaatacgggtgatggtgttggtatggcagttcgtgcgggtgtgcctttacaagatatggaaatgtggcaattccacccaacaggtatcgcaggggctggggtgttagtgacggaaggttgccgtggtgaaggtggctatctactgaataaagacggtgaacgctttatggaacgttatgcaccaaatgctaaagacttagcaggtcgtgacgtagttgcacgttctattatgattgaaatccgtgaaggccgtggttgcgatggaccatggggacctcatgccaaactgaaactcgaccacttaggtaaagaagttctggaatctcgtctaccgggtatccttgatctctctcgtacctttgctcatgttgacccagttaaagaacctattccggttattcctacttgtcactatatgatgggggggatcccaactaaagttaccggacaagctattcgcatgaatgagaaaggcgaagatgaagtgatcccaggattatttgctgtgggtgaaattgcttgtgtatctgtccatggtgctaaccgattaggtggtaactcactgcttgaccttgtggtatttggtcgttctgcgggtgttcacttaaaagagtctttgatggagcagggcacgatgcgtgatgccagcgattctgatgttgaagctgcattaacacgcttacatcgttgggaaaataatcgttcaggcgaagatccggttgagatccgtaaagcattacaatcttgtatgcaacataacttctcggtcttccgtgaaggggatgcaatggcgaagggcttagaagagctgaaagtgatccgtgaacgcctgcaaaatgcccgactcgatgataattcaagtgaatttaatacacagcgtattgagtgcttagagttagataacttgatggaaacagcttatgccacagcggtatctgctaatttccgtacggaaagtcgtggtgcacatagccgtttcgatttccctgatcgtgatgatgaaaactggttatgccatacattatatcaaccgcaaaccgaaacaatgacacgacgtaaagtcaatatgcagccgaaactgcgtgaggctttccctccaaaagtgcgtacatattaa

SEQ ID NO: 293783 - DNA, 345 bp, Proteus mirabilis
atggtaagtaattcttctactttaggccgtacaggcatacaggattggttattcctacgtgcaactgccatcattattttcttatatgttttatattttgtcggttttgttgcaacaactgatattacctatgaagtttggcgtggattctttagctcctctctaaccaaagtttttaccctattaacgctactttctattctaattcatgcatggattggaatgtggcaagtgttaacggactatattaagccaatagcattacgcttgacgttacaacttattattgtcgttgcgctgttggtttatcttatttatggaacaattgtggtgtggggtgtgtaa

SEQ ID NO: 293784 - DNA, 282 bp, Proteus mirabilis
atgttagtcgcagttggtattttactgtggttacttggcacctctctctcatctcccgaaggttttcagcaagccgctgatatcatgactggcttcttcgcgaagtttattttatggggcatcctaacagcattggcataccacatttgtggtggtattcgtcatatgttaatggacttcggctttattgatgaaacattggttgttggtcgtcgttctgcggcaatttcaatgattattaccgttattttatcaatattggcgggggtattagtatggtaa

SEQ ID NO: 293785 - DNA, 1284 bp, Proteus mirabilis
atggctgataacaaagctaagttaacgattggtgaaacttctgtggacttggacgttctctcccctacactcggttccaaagtcattgatattcgtactctcggctccaaaggttattacacctatgatccaggctttacctcaacggcatcttgtgaatcgaaaattacctatatcgacggtaataacgggattttactgcaccgcggtttcccaattgggcaattggctactgagtcaacctacttagaagtatgttatatcctgctttatggcgaagcaccgacccaagagcaatacgataaatttaaaacaaccgtcactcgccataccatgatccatgagcaaatcacccgcctgttccatggtttccgtcgtgactcacacccgatggctgtactttgtggtgtgacaggagctttagctgccttttaccatgatgcgcttgatgtctctaatccagttcaccgtgatatcacagcatatcgtttactgtctaagatgcctactgtagccgcaatgtgttacaagtactccataggacaaccttttgtttatccaagaaacgatctgtcttatgcaggtaacttcctacatatgatgtttgccacaccttgtgaagagtatgtggttaacccagttcttgaacgtgcgatggataggatctttattcttcatgccgaccatgaacaaaatgcttcaacatctactgtacgtactgcaggctcttcaggtgcaaatccatttgcctgtattgctgcgggtattgcttcactatggggacctgctcatggtggtgctaacgaagcttgtttacgtatgttggaagagatcaaaaccgttgaacatattcctgaatttattaaacgcgcaaaagacaagaatgactctttccgtttaatgggctttggtcaccgtgtatataaaaactacgatccgcgtgcaacagtcatgcgcgaaacttgtcacgaagtattaaaagaactgaatctcaatgacagtttacttgaagtggcaatggaattagaacgcatcgccttaaatgacccgtattttattgagaaaaaactctatcctaacgtcgatttctactcaggcattattctaaaagcgctaggtattccatcaaatatgtttacggtcattttcgctattgcacgtactatcggttggattgctcactggaatgaaatgcatgaagatggactgaaaattgcacgtcctcgtcagttatatactggctataacgagcgtaaattccatagtgaacttaaaaataaataa

SEQ ID NO: 293786 - DNA, 762 bp, Proteus mirabilis
atggcttggcttaatcaatacgaccactttgtgccagaagaacaccttgcatcagttgtgggtattgctgcagagatgggaaaacatgattcaggttttcactcacatgatagggggcagttactgtttactcaatcgggttgtatgagaattactttagcctctcgtgtatctgttttgccacccatgagaattgcttggatcccgccaaaactggaacaccgagtcgagatgtatgcggctgtaggttatcgttcagtttatattgccgataaatttcatcatcgtttcccaactgaaagcgaaatactgactatttcacctttacttagagagatattagagcgtattgccattgctgattttgacacccagtgggaagtagggcgttatgcaaatttattagctgtttttttagatgaaattcagcaagctaaacgtcaacctaatcatttatcaatgcccaatgatagacggttaagaaaattatctttcgatgaattacctccgccactacaagaattagcgcaatatattggcgctagtgaaaaaaccattactcgattattttataaagaaacaggattaagctatcaacaatggcgtcagcaatggcgattaatgaaagcgatagagctattagccacacatcatcgttatttagaaattagtcaattattagggtttgccagcgatagtgcctttatcactttttttaagaaaatgaccgggcaaacaccacaagagtatttaagaaattga

SEQ ID NO: 293787 - DNA, 291 bp, Proteus mirabilis
atgcgccgtcagcttgagtacaagcagctctggcgaggaggtcaggtactggcaataccccctgcctacaccagtcagaagtgcgcttgctgtggtcatacagcaaaggaaaaccgccagtcacaaagtcaattcgagtgccttgaatgtggatatacagcgaatgctgatatcaacggggcacgtaacattttagcggcaggacatgccgtgcttgccagtggagggagggtgcagtcagaccgcccgtcgaagcaggaacccgccgaggtgattcagacatcagtctga

SEQ ID NO: 293788 - DNA, 1140 bp, Proteus mirabilis
atgaaaaaaacaaaacatttatttaaaacaaagggttgtaatattccttttacttctgtgatgatggtaagttttgtcttaatgggctgtaacgatcaaccgactcagccaaccaagcctgctatcccagaagtgggagtctatactgtcaaagaggaaattcttccattaacggtcgatttgccagcaagaacggcatcttatcgtgtctcacaggtgcgcccacaagtcgatggtattttagaaaaacgtctatttactgaaggtagtgatgttaaaaaagatcaaccactgtatcaaatagataaaaaaccttacgaaactcaggtagctaaagcacaagcggcttacgataatgtgaaaaaattagctgcccgttataaatctttacgtgccactaatgccattagtcagcaagaatatgacgatgtagtttcacgccttgatcaagctaaagccgatttaaatcaagcaaagattaaccttggctatacccaagttttatcacctattagcggcaaaatcagtcgctcttttgttagtgaaggggcattagtgagtagtggacaaagccagccattagcgaccatcacacagcttgatcctatctatgtggatattactcaacctattactaaccaactgaaattaaagtcactgatccaacaaggtgtcgtcactgatagtgaagataaaatggatgtgacgctgtttttagaagatggctctcagtacccttataccggtacattaagtttttccgaagtacaagttgagccaagtacaggctcagtgacattacgcgccaaattccctaatccacagcaccaattattaccaggaatgtataccaaagctcgcattatgcaagggactcaagagaaagcgattgttgtgccacaacaagcgattacctttgatgcccgtggtaaatccatcacatatatcgttgatcaacaacaagtattacaagcaagagatgttgaaatattaaaaccacaaggtaatggatggatcataaaacagggattacaagctggcgataggatcatgacagaaggtcatcatcgtgcaaaaccgggcgtaaaagtcaatgcggttcctgctaacaacatttcattaaagaccaccttagagtaa

SEQ ID NO: 293789 - DNA, 3135 bp, Proteus mirabilis
atgtctcgattttttattaatcggccaatactttcgtgggtgatggctattgttattatgattgcaggaggattgtcgttaataaaacttcctgtgagtcaatatcctgaaattgcagctccagcgataatgatcaccgcagtttatcccggtgcatcggctgaaacagtgcaagacacggttgttcaagttattgagcaagagcttagcggattagatggcttccgttatttaagttcaaatagtaatacggatggtagctttgaagttatcgccacctttgaacaaggtacggatagtgatattgcgttgatgcaggtacaaaataaactgcaattagcaactcctaagttaccccttgaagtacaacgacaagggatgagggtagtgaaattccagattaactttatgcaagtggttgccctcgtagatgaatctggaaaattagatgcctttgatttaggtaattaccttgcctcacatatgaaagatcctatttctcgtattgatggtatgggggatattctgttattgggatcaccacgcgctatgcgtatttggcttgatccggataaactgaccaattatcacctgatgccgaaagatattgccgcggctatccaagatgagaatgtacaggtgtccgccgggcagttagcgggcttaccggcattaaaaggtgttgagttaaacgcaaccattaccagctcatcacgtatggtatcagtagatgaattcaaccatattctattaaaagtgaatcttgatggctcacaagttctgttacaagatgtagcgaaagtcgaagtaggggcagataatttctctatttcaagcttatacaatggtaaaccgtctgcgggtatggctatgcgcttagcgcccggagctaacctacttgatgtgtctaaaaaagtaaaagaggttgtggaagctcagtcgcagtttttccctcaaggtgtaaaagcccttttcccttatgacacaacgccttctgtaaaatcgtccattagctctgtggtaagaacgattgtcgaagcttccatcttagtgttcttggttatgttcctgttcctacaaaatattcgggcaaccttggtaccaacattggctataccggttgttttattaggaacttttggtgtattagccgcattaggtttaactatcaacgtattaacgatgtatgccatggtgctcgcaatcggcttgctggtggatgatgccatcgttgtggttgaaaacgttgaacggatcatgcatgaacaggcgatttcggtaaaagaagcgaccattctctcgatgacgcaaattcaaggggcgttagtggggattggtcttgttttatcagcggtctttgtgccaatggcattttttggtggatcggctgggattatttatcgccagtttgcagcgactattgttgtcgcgatggcattatcagtgcttatcgcattaacatttacacccgcattatgcgcgtcaatattgaaaaagccacaaccaaaggtgaagaaacgtcgtggattcttctggctgttcaaccgtttctttgatagaggaactaactattacgagaagggggtacgcaatatcttgtaccgtcgaggccgttatatgtttattttcctcattattaccgttggaacagggtggttatttacgcaattacctaaagccttcttaccaaatgaagaccaaggggttgtgatgattgaagtccgtatgccagcaaatagtaccgctgagcgtatggaacaaaccatggcagaatttagggattatttactgaccgaagaaaaacatctggttaaaacagtatttactgttaatggctttaactttgcaggtcgtggtcaaaatgcgggtatggcatttgttaacttggctgattggtcagagcgtaaaggaaaaggagaagatgttttctcattagtggcacgagcacagcaacactttaactctatccgtgatggtatggttattgcgttcccaccacctgctattatggagatggggaatgcgatgggatttgatttctacttacaagataatgcgggtttaggccatactgaattggttaaagctcgtgataaattcctcgaattagcagcacaaagtccagtattaactaatgttcgcccgaacggtaaaaacgatgaacctcaattacgtgttgtgattgataaagagcgtgcaagagcattacaactgcgtttatctgatattaacgatacattatctgccgcatggggatcgatgtatgtaaatgattttattgatgaaggtcgtgttaaacgtgtttatctacaaggggaagcctcagcgcgtatgttgccaaccgatctggataaatggcatgttcgtaatcagcgcggtgaaatgatcccattcaacgcctttgcaacaacacaatggtatatggggccaccgaaattagagcgttttaatgggctatcagcgattgagatcttaggtgaaccagcgccaggttacagtacgggtgacgcgatgctggcaattgcagatattatgaaacaattgccatctgaaatcagcctaagctatagcggtctgtcttatgaagaaattcaaacacaagaccaagcacctgcattatatgtgatgacaattctgtttgttttcttaagcttagcggcactctatgaaagttggtcagtacctttctctgtcgctttagtggtgccatttggtattttaggggctgttatcgcgacactgttacgaggtttatcctcagatgtctatttccaaataggtttgatgaccaccattggcctatcagcgaaaaatgccatcttaattgttgagtttgctaaacatctttatgagaaggatggtaaaccattaatcgatgcggcagcagaagcggcaagaatgagactacgccctatcattatgacctcactcgcctttacttttggggtattacctatggcacttgctgcaggtgcagggcaaggtagtcagcactctgttgcaacaggggtaattggcggtatgctcgcatccactttcttggctattttctttgtaccactgttctatgtctttgtggttaaactattttcacgaaaaaaagcacatgtgagtattgaggaaatagataagtaa

SEQ ID NO: 293790 - DNA, 2391 bp, Proteus mirabilis
atgtctaaacacgctcatcaacacgataaccataaacataccgatgcttgctgttcaagctctcaatgctgctctaatcaggcagataatagtagtatgcactcacatactgaaagtggacacactcatagcaaaatcgataagagtgatcctgaatgtgaagaagaacatcatcatggccatcaacatgagcataatcatcacgctcatgatggtcatgatcatgcccatggctgttgtgacagcaacgcccctgtctctaatgtagagcctgaaaaaattgcacagcaacgttttagttggaaagtgcaaggaatggattgcccaagctgcgcgcaaaagatagagacagcagtactgaaagtggtcggcgttaaacaagcgaagatcttgtttgccactgaaaaactggttgtcgatgccgataccgatttacgtactgatgtgattagtgccgttaaaagtgccggttttgaactatttgatatctcatcagcgggatctcagcctcctgcaaaacaaagcctcttaaaagagagctcattcgtcattatcttagcgattttaatggcgataagttggggtgccgagtttattgatccacaagcaggtcgcgctgcctttattgcaacgacattaatcgggttattccctattgtaaaaaaatcactacgactcattcgtagtggtaccccattcgcgattgaaaccttgatgagtgttgcggctattggggcactgtttattaatgccaccgaagaagcggcaatggtaattttgctgtttatgattggcgaaatgcttgagtcttatgctgcgggtcgtgcacgccgcggagtcagcgcattaatggctcttgtacctgaagaagcggtagtaataaaagagggtaaaaaacagacagtccctgtagctcaattgcgccccggcgatattattgaaattgcaccaggtgcgcgcttacccacagatgccgaattaattactgcttttgcaagttttgatgaaagcgcattaacgggtgaatcggtgccggtcgaacgtttacaaggtgaaaaagtcgctgctggctgtttatctgttgatcgctcggtgcaaatgaaagtggtctctgaacaggggcaaaatgccatcgaccgtattttacaactgatcgaagaagcggaagagcgtaaagcgcccattgaacgttttgttgaccgtttcagtcgctattacacaccactaattatgctgttttccgcattagtgatcattattccacctttgttattcgctcaaccttgggaaacttggttctaccgtggtttaacactgttattaattggttgtccttgtgctctggttatttcaacaccagccgccattacatcagcactggcagcagcaacaaaacgaggtgccttaattaaaggtggtgcagcacttgaacaactgggcacagtcaataccgttgctctagataaaacaggcacattaacagagggtaaacctcaagtcactgatgtcatagcaaatgtaggctttaatgagaaagagctactgatgttggcttcttctgtagaagttggctctcatcaccctctcgcaaaagccattattaataaagcacaagagcaacaaattgatgttgtggaagccgataatcgcaaggctttagcgggtaaagggattgaaggttatttaaataatcagcatattctggtcagtgccccaacacaattatcagaaaccacaccattatctgcacaatggcaacaacaagtcgctcgtcttgaagatgaaggcaaaaccgttgtggtggtattaaaagaagatcagttcattggtgtgattgcgatgcaagatacattgcgcaacgatgctatcgaatcaatgaaagtgttgaaatcgatgaatatcaatgccgtgatgttaaccggtgataacccaagagcagcggctgcgattgcacaaaaactgggtatggatttccgtgcaggattgctccctgaagataaagtcacctcagtgatggaaatcagtcaaacacataacacaatgatggtgggtgatggtattaatgatgcaccagcaatgaaagcggctaccattggtgttgcgatgggaagtggtacagatgtcgctttagaaactgccgacgcagcattaacccataaccgtttaactggcttacccgaaattattcagctatctcgtgcaacacgtaaaatcatccgtgaaaacattaccatagcattgggtttaaaagcgatattcttagtcaccagtttattcggtatcactggactttgggttgccgtattggctgactcaggagcaacagctttagtgaccgccaatgccgtaagactattaaaagttaaactaaaatctcctcaccaagattaa

SEQ ID NO: 293791 - DNA, 627 bp, Proteus mirabilis
atgagttggccttttctcgctgtcttattttctgggtggctttatatcgatgccgcgtatcgtggccctaattggcaacgatggctattccgtcctattacactactactattactcctttgggcatggcaagtccctgagcatagcattaatagttatcttattgtcggcgctttattagcaacattactttctgatgtattaaaaatgtttgaaggtaagtatttactaccttctttagccttgttattcctaagttatattctctacctaattagttttgccttaccattacaaatctctttttatcttcctttgcttggttttgttatcgttgccgcaattatcgtgttagccatcatctggactaaactggataaatttgccatacctgtattactgactttattagcggcttttgcgatgttttgggttgcaggagagaaattcttctacctgagcaacgactacaacttttctatcatgataggctcactcttgttagtaattgcttactctatttggcttatcaaccgtttccgcttctctttttcagcctctaaaggactggtaagtgcctgttactttattggtcacttctttattgttagagccctttttctctaa

SEQ ID NO: 293792 - DNA, 396 bp, Proteus mirabilis
atgaataaagcgggaatgttaggtatcgcggtgctgattatcattatcgctagcgcaacatatcgtttttttgagcaaagaaaacagcgtatcagtgatgataattcacccgttaaattatatatggtagaagttgttgataagcaacaaataccgaaaaacgatcgacgttcaagagaaaatgatgttaatgggccagaaacaacctattactatcaagtgacttttcgtttaacaacggactctcagcaagatattatcttacgtgtggataaaaccactttctcaaatgtagcgctggagatgaaagggcgattatttatgcaaggtagtcgtttcgtgcagtttgaaaccgatgcaccagataatgagagtggtaaaacatcaactaaataa

SEQ ID NO: 293793 - DNA, 294 bp, Proteus mirabilis
atgttaatctttttaggtcgatttttaatgatcggtgtgtggggatttctttgtttaaatcttatttccccattccctaaacctttaaagtactttatggatatcgcattaatctttatggtgattatgcacggcttacaaattgccatgtataaagcaggccaacccgaagataaaaaaccttctggcttactccaatttaagatcttcttttttggtatttttgagctattgagaatacaaaaagagttgcgcaaagagtatctagaaaaacaaaaaaataaaaaccaataa

SEQ ID NO: 293794 - DNA, 585 bp, Proteus mirabilis
atggctaagaaaccacaaaaaacgccgatgggacaaatcagaataatcggaggtaaatggcgtggtcggaaacttcctgtgcttgatagccaaggattacgtcccaccaccgatagagtcaaagaaacactgtttaattggcttatgcccgttattcaggacgctcgttgcttagattgctttgccggcagtggtgggctaggtattgaagcactctctcgctatgcaaaagaaacgacattcattgagttcgaccgtaaagtcgcgcaacaaattactgctaatttagcgctgcttggcgctgataatgggcatgttattcaagatagtgcgttaaattatctagctaaacaaggtactgcatatgatgtggtgtttttagatcctccttttcatcaaggtatgttggcaaacaccctgcaattattagaaaataaccaatggttagccgaaggttgttatatttatattgaagaagaagtaaacgcacaggtttattctttaccagaaaattggcgattacatagagaaaaaatcgcaggccaagtcgcctatcgtctttatattcgcaatttatctgcttaa

SEQ ID NO: 293795 - DNA, 1839 bp, Proteus mirabilis
atggcaaaagaaaaaaaaggttttttctcgtggctcggatttggccgtaataaagaagaaaatactgcacaagagaaagaacaacaacgtttagaggccgaacgtgcagatcaggcgcgtttagccgaagaagaagctcaacgtcaagcgcaactagaagctgaacaagtgcgtttagctgaagaagaagcccagcgtcaagcgcaacttgaagctgaacaagcacgccaagaagcgcaaagagcagaggcagaacgattagctgctgaacgtgcagagcaggcacgtttagccgaagaagaagcccagcgtcaagcgcaattagaagctgaacaagcacgccaagaagcgcaaagagcagaagctgaaaaattagctgctgaacgtgcagagcaggcacgtttagccgaagaagaagcccagcgtcaagcgcaattagaagctgaacaagcacgccaagaagcgcaaagagcagaagctgaaaaattagctgctgaacgtgcagagcaggcacgtttagccgaagaagaagcccagcgtcaagcgcaattagaagctgaacaagcacgccaagaagcgcaaagagcagaagctgaaaaattagctgctgaacgtgcagagcaggcacgtttagccgaagaagaagcccagcgtcaagcgcaattagaagctgaacaagcacgccaagaagcgcaaagagcagaagctgaaaaattagctgctgaacgtgcggagcaggcgcgtttagccgaagaagaagctcaacgtcaagcgcaacttgaagctgaacaagcacgccaagaagccgaagctgaagaaaaagcgcgtattgcacaagcacaagccgaagcggaagatattgtcgcgttacgcgaagaggtattagtcgataaacccgtagagcaagagagaccgaaaaaagaaggctttttctctcgcttgaaaaagggattattaaaaacacgacaaaatttaggctccggttttatggggctattccgcggtaagaaaattgatgacgagcttttcgaagagttagaagagcagttgttaattgccgatgtgggaatggataccactagcaagatcattaacagtttgactcagcatgctagtcgtaaagatctcaaagatgctgaatctctttatggtaagttgcgtgaagagatgggcgatattttaaataaagtggataagccattaaatattgaaggtaaaaaaccttttgtcattttaatggtcggagttaatggggtcggtaaaacgaccactatcggtaagttagcccgccaataccaagctgaaggtaaatcggtgatgttagctgcaggagataccttccgtgcagcggcggttgagcaactacaagtttggggtgagcgtaatcatatccctgttattgctcagcatacgggggctgatccagcatcggttatttttgatgctattcaatcggcgcaagcaaaaggtgtcgatgttctgattgcggataccgcgggacgattgcaaaataaatctcatttaatggaagagctgaaaaaaatcgtccgtgtaatgaaaaaattagacgaggaagcaccacatgaagtgatgctgacactcgatgccagtacagggcaaaatgctgttagccaagcaaaattgtttaatgaaacggttgggctgacaggattaaccttgacgaaactggatggtactgcaaaagggggcgttatcttctctatcgctgatcagtttggtattcctattcgctatatcggcgtcggtgaaggtattgaagatttacgtccgtttaaggccgacgattttattgaggctctgtttgcccgcgaggagtag

SEQ ID NO: 293796 - DNA, 666 bp, Proteus mirabilis
atgatccgcttcgaacacgtcagcaaggcttatttaggtggaagacaagcattacagggggttgattttcatcttcgccctggtgagatggcttttttaaccggacattctggtgctggtaaaagtacattgcttaaattaatttgtggcatagaacgtccaagtgatggcgctatttggtttgctggtcatgatatcagtaggctaaaaaatagtgagatcccttttttgcgtcgtcaaatagggatgatcttccaagatcaccatttgctgatggacagaacggtttatgacaatgtctctctacctttgattattgcaggcgcaagtgaagaggatattcgacgccgagtttcagccgccttggataaagtcggactacttgataaagcgaaaaattaccctatccagctttcagggggggaacagcaacgagtgggaatagctcgtgctgttgtgaataaacccacggtgttattggctgatgagccaacagggaatcttgatggtgaactttcagaaggcattatgcgtctgtttgaagagtttaatcgcgtgggggttaccgtgttaatggcaacgcatgatatgacacttgtagagcgcaggaattaccgtattctaaccttaggtcaagggcgtatggtgggaggacaaaatggctaa

SEQ ID NO: 293797 - DNA, 978 bp, Proteus mirabilis
atggctaaaggaaaacactcccgtaaggcaatgccaacaccaaaagcgaaaacaaaagcattacgtggtggacgccgtgagcagtggcgttatgcatggcgtaataccatggccgactttttacgccaacctctctcttctttcttaacggtgatggtagtagcgatttcattaacactacctagtatctgttacattgtctggaaaaatgtatcaacagccgcagagcagtggtatcccactccgcaactgacggtctatcttgataaatctctagatgacagcttagcgcaggcaacgataaaaaatatcgaggcattagataaagtcgaagaggttaattatctttctcgtcaagattcattagtggagtttcgctcatggtctggatttagtagcgcattagatatgctagaagaaaatccattacccgctgtcgcgattgtgactcctgttatggatcctaatgacgagcaattaatggttaatttgcgtgatgcagtggcaaatattgccggtgttgacgaagtgagaatggacgatagctggtttactcggttatctactttaacctcattagttggacaaatcgcaatggtgatcggtagcttaatgattgtggcactgctattggttattggtaatagtgttcgtcttaatattttcagtcgtcgtgataccattaatgtgatgaaattaattggtgctactgatggctttatcatgcgtccctttttaaattggggtttagtactcggctttatcggggctatttttgcgattattttctctgcattattggtatggaagttatctgatgtcgttacgcaagcggcgaccgtatttggaacaactttctcaatatctggattaggttttgatgaatcggttattttgatcctcgtttcgatgaccattggctggtttgctgcttggttgaccaccatgcaacatttacgtcaattcacaccagaatag

SEQ ID NO: 293798 - DNA, 855 bp, Proteus mirabilis
atgacaaaagaaatgcaatccttagcattggttccacaaggcagcattgaagcgtatatccgtgcagccaattcctatccgatgttaacggcagaggaagaaaaggaactggctgaacggctgcattacgagggcgatttggaagcagcgaaaacgctgatcctttctcatttacgcttcgttattcatgttgctcgcagttattcaggatatggtttacctcaggcggatcttatccaagaaggtaatattggtttgatgaaagcggtgcgtcgctttaaccctgaagttggggttagactggtttctttcgccgtgcattggatcaaagccgaaattcatgaatatgtgttacgtaattggcgtatcgtgaaagtcgcgacaacgaaatcacagcgtaaactgttctttaatttaagaaaaaacaaaaaacgcttagggtggtttaaccaagatgaagtcgagttagttgcgaaagagcttggggtttctgagagcgatgtgcgtgaaatggaatctcgcatgtcggcacaagatatggcatttgacatgagtgctgatgatagtgatgactcacatcctgtagctccggtgctattcttagaagataaatcttctgactttgctgatggtattgaagaagataactgggataaccatgcagctgaccgactgactttagcgataaaaacactggatgaacgtagccaagacattatccgcgctcgctggttagaagatgataataaatcaactttacaggagcttgcagataaatatggtgtttctgctgagcgagttcgccagttagaaaaaaatgcgatgaaaaaattgcgtttagcgattgaagattaa

SEQ ID NO: 293799 - DNA, 1149 bp, Proteus mirabilis
gtgaaagagataaaaatagttatcgccccagatccttttaaagagagcttaagtgccaaagaggtggcagaggcgattaaacaaggcttttcacgttatttacctgatgctgattattgttgtattcctatggccgacggcggtgaaggtacagtaacgtcattagttgatgctacccatggtcgttttatcacaacgccagtttgtgatccattaggtaaacaggtaacagccacttggggagtgttaggcgataatactactgccgtgattgaaatggcacaggcatcaggtcttcatcttatcccttcatctcaacgcaatcccaatttaacgacgagttatggtaccggtgagttaatttgtgccgcactagatttgggggttaaaaagatcattttaggcttaggaggaagtgccacaaatgacggcggtgcaggtatgatgcaagcgctcggtcttggtcttaaagataagtctggaacatctttgccttttggtggacatgcattaagtcaacttcattctatagatatcaatcaactacatccaaaacttgcctctgttgatatagagatcgcctgtgatgtaactaatccattatgtggcgaattaggggcttcaaaagtctttggcccgcaaaaaggggcgacagaacaagatattgagcaactggatagcgcactacaccattttggtacttatcttgagaaaatgacacaacgcactcttatcaatattgcaggaagtggtgcagcaggaggattggctctgcctttgctggcatttacgcaagcaacactttcaccaggtattgatttggttgctaacgctgttgaattagaaaaacagttaatcgatgcagatttggtcataactggcgaagggcgaatggacagccaatcggcgcaaggtaaaaccccgataggtgttgctaaattagctaaaaaataccatcgcccagtgattgcattagttggtggttatttaccggattatgatgtggtccatcagcagggtattgatgcggttttctctatcctgcccggtgttgccactttacaacaagcctttgataatgctgagcaaaacttacaggaaaccgcttataatgtagcgaggctttatgctttatcattgcagaaataa

SEQ ID NO: 293800 - DNA, 417 bp, Proteus mirabilis
atgaaactaaccattgaaaatctgccgcagctttcagcacaagataaaatagatttagggaaaatttggcaagatagtgagtaccaaatggcactcactgcaccaatcaccacagagcatgctctttttgtcgcccgttttaacgggcgattgctagcggcttgtcgtataaaataccgagcaaaaacagcgcttatcagtgattttatggtaagagaagtgactcgtcgtcgtggtgttggacattacttactaacacaatgccttgaaaaaaatccaaccattacacattggcaagctttattgaaaacagggcaaatcaacgatcctgtagcacaggcttttttagcgcatcatcattttgctacttcattacaggctgatacttatgattatttctgcaatgataaagcataa

SEQ ID NO: 293801 - DNA, 1188 bp, Proteus mirabilis
atgaaattatcaatccgtagtctgttttaccttgtttgctttagcgctttattaggctctctagcacaaaatatttatactcctgtgctgccattgatccagcagcaatttaataccacattatcactggttaaccttacggtatcagctttcacttttgctatggctgttatgcagttatgttatggttcattgattgacaaatggggcagaaaacctattttgctcagtgggttaacaatttcaattatcggcgcacttatttgtatatgggctaattctattaacctattaatttttgggcgagtgatccaagccataggtatcgcagccatccctgttgtcgcagcaactattttaggcgatctctatcaagggaatgagcgtgctaaagcaatgggaagttaccaaatgttgctagcattagcaccagcgagtggtcctttattaggcggctatttagcacaacattatcactaccagagtatttttgttttcttaagtatagtgggacttgttttgctgattgcccatctgttttatttacctgaaactcgcccagaacaaaaacagtccgttaaaagcttatctgctatgcgacaagtactcgccgccccagagggtaaatctgtttttgtgataagttttatggtgttttataactacttctgcctattagtatttttacctttaattgcttttcacctttatcacttaaatagcagtgaaattggtgggctttatgttcctatgtccattgcactggtgttaggcagttacctttaccgtaaggtttgtcatttgtttagcgctgaatatggtgtgatcataacttcatgtataaaccttgccatgttgtcgttatttgccctattttggcaaatctcattaccaataatgttaatattaacggtgttatatggtctctctttaggattaactatgcctacacacacgaccttattaaccagccactttagttcagtaagagcaacggcaatgggtatttataattttatccgctactgtggtatggcagcagggcctatggtcgcaagctattttgtcaccgataatcattatcaatatgtcttttattcttgtgtgatcttaacaagtttggcattgtgttttgccatcaaaacgctactttccacattaaaacaacaacgacaaaccatcgactaa

SEQ ID NO: 293802 - DNA, 477 bp, Proteus mirabilis
atgacaaaacagcaagtaaccacacaggaattgcttaatggtttaagtgaattgttgcacttaaaagaagcgaataatgatgaaggtcataagaaagtattagcagagaagggggtagaaaattattcactcacagagcttcatgtgatccattgtattggtgaagagagtatgcgcaacctcacaacgatcagtgattatatggcaatgacacgtggggcagtctcaaaaatttgtcgtcgcttacagagtaaaggcgctattgagaaaataaaattagcggataaccaaaaagagatattttttattttaactactgaaggggaaaagctgtttcacgctcatgaattgttacatcaacaatctcaggcaaaatggataaccttatttgaacagtatgatcaaaatgaaaggctggcaattaaacgctttttagctgatgttgcaaatcgttttcgccacaaggaaaaagcataa

SEQ ID NO: 293803 - DNA, 753 bp, Proteus mirabilis
atgaaaataaaactacttgcgacagtgatggtatccgcggcattactctctggctgtaaaaatcttgatacttctatgttagcgcaatcaggtacacaacttttccaagcggcaacattaagtgatgacgatgtcaaagcgctaactaatgatgcatgtaaagaaatggatgctaaaaacaaaattgcacctgcaaatagtaactacactaaacgcttaaataatatcgcgaaagcgttaggtaatgaagttaatggcactccagtaaactataaagtttatctcactaaagatgtcaatgcatgggcgatggcaaacggctgtgtgcgtgtttatagcggtttaatggacatcatgactgacaacgaagtggaaggtgtattgggccatgaaatgggacacgtggcattaggccatacacgtaaagcaatccaagtagcacatgccaccgttgcggcacgtaccgcggcctcttcagcggggggagtagcagcacaattaagtagttcccagttagcagaaatgggtgaaaaactggttaatgcccagttctctcaacaccaagaaacacaagctgataacttctcttacgatctgctgaaaaaacgcggtgtcaatacttcaggcttagtgactggctttgaaaaattagctaaattaggtggtagtgattcaagcatgtttgattctcacccaccatcaaaagagcgtgctgacaatattcgtaaccgcattgccgaagataaaaaataa

SEQ ID NO: 293804 - DNA, 1095 bp, Proteus mirabilis
atgactaccgtaacactgactaatttagaaaaacgttatcctaatggttatcaagcaatttccacgctcaatctctctattgagcaaggcgaaatggtggttttagtagggcctagtggttgtggaaaatcaacactactgcgcatgatagcgggattagaaaccatcacagatggcgatttactgattgataatcgacgcgtaaatgaacatgagcctagtgagcgagatattgcgatggtttttcaaaattatgccctctacccacatatgtctgtctatgacaatatggcgtatggtttgcgtaatcgaaaaatccccaaagctgaaatcatagcccgagtcgatcgcgctgctcatatgctagaaataagccatttactggatagaaaacctaaagagctttctggtggacaacgccaacgcgttgccatgggcagagcgattgtccgtgatcccaaagtcttcttatttgatgaaccgctctctaaccttgatgccaaactacgcgtacaaatgcgtcttgaaatcaaaaagctgcagcaaaaattagccactacttctgtttatgtcactcatgatcaagtggaagccatgaccttggcggataaattagtagtactaaaccaaggtcatatagaacaagttggctcccccttagagatttatgaaagcccagcttctgtatttgtggcaacatttatgggatcaccggcgatgaatattttaaccactcatatcaatcgcggtattattgaaattgcggatggtcatcttgctatttctgcccactcattacctaatggtgagatccaactaggattacgtcctgaacatttgctcataaatcaacaaaatccactgtttcatgctaatgtcgattttattgaagctttaggggctgatgttttaatttacgccaccacttgtgaccaacaatctattgttattcgagccacaaacgatcatggtgttaatgtgggtaatagaataggtgttgctatttatccagaaaatctacatttttttgatcgacaaacccaaaaacggattgaacgtcctaccatgttgttaagtgaacgattagtctcttaa

SEQ ID NO: 293805 - DNA, 849 bp, Proteus mirabilis
atggttgaacgtagacctctcttccacgctttttgccatcttattctgattattggcattctttctgtagcatttccggtatggatcgctgttgttgcgactacccaccaaaataccgaatttgccacaggctcgcctctttggtttggtcaggagggtatcgaggtttttaaaacgctcttttcatcagcgggaacgactcaaaatagtgcaattaccattaatggtatgctattgaactctttggttatggcgttggtgatcactattggtaaattggttatctctattgcctccgcttacgccgtggtgttctttcgttttcctggcagaatgctggctttttggacaatcttctttaccttgatgctccccgtcgaagtgcggatcatgccgacctttgaggtagtgacaaatcttaatatgttgaactcctatgcaggactgaccattccactgattgcgagtgcaacggctacatttttgtttcgccaattttttcttaccatcaccccagagctgattgaagcggccaaaattgatggtgcagggccaataaaatttttctttactattttattgcctttatcccgtaccaatattgccgcactttttgttatcacctttatctatggctggaatcaatatctttggccaatgcttatcaccacagatactcagtactacaccattgtcatgggcatcaaacagatggtggccgtatctgatggcgtgattgagtggaacaaaattatggcaaccactttaattgcaatgttgccacctgtctttatcgtcattttgatgcaaagagcctttgttaaaggctttgttgatacggagaaataa

SEQ ID NO: 293806 - DNA, 885 bp, Proteus mirabilis
atggcttcccaatccgtttactttaaacaaaaatggttacctatcgcgctgatcttccctcaattagccattactttaattttctttatttggccggctggacaagcattgttgcaatcttttcagttagaagatgcttttggccttagtcgtgaatttgttggtttagaaaattttcagcgcttatttaatgataattattattttgacagcttaatcaccacgcttatttttagtaccagtgttgtattactttcaatgttatctgcggttattttagcgggtattactgagcaaatattacggggtaaattgttttaccgcacaatacttatcgctccttatgctattgctcctgttatcgcaggttttctctggttgtttatgctcgatcctaccattggtgtattaagccgagtattaaacaaaatcggtatcaattgggatccggtcttaaatacatctcatgcaatgtggatggtgattttaaccgccacatggaaacagataagctataactttctgttttttcttgccgcgttacaatctgtgcctaaatcgttgctagaagcagcagccattgatggcagtggtccaattaaacgttttattaccattagtttgccattaatttcgccgacaacttttttcttattggtggttaattttgcctacgccttttttgacacctttcccatcattcatgccatgacccaaggtggccccggtaatagcacctcaacattagtttataaagtgtataacgatggatttgttggattagatttaggctcatcagcggcacaatcggttattttaatgttgattgttgccatattgaccattattcaatttcgttatgttgagaaaaaggtggcttactaa

SEQ ID NO: 293807 - DNA, 1305 bp, Proteus mirabilis
atgtcgattaaatccttcagtacgcttgccatagcaatagcattatttacttcaccaacctacgcaaaaaccgaaatagagtggtggcatgctatgggaggcgccttaggtcaaaaagtcaatcaaattgcctcagactttaatgccagccaatcagaatatgtgatcaaacctgtctataaagggacttatccagaaacgatgaccagcgctgttgctgcatttcgagccaaaaatcaacctgcgattgttcaagtgtttgaggtgggaacagcaagtatgatgggagctaaaaaagccgtttttcctgtttaccaattaatggaaaaaaccaacgagccatttgatcctaatagctacctctcgacagttaccgcttattacaccaccagcgatggtaagatgatatctctaccttttaatagctcaacgcctgtgctttattacaacaaagcactatttaaacaagcaggcatagagcaacctcctaaaacatggaaagagatgggggctgtctctcagaaactacttgatgctggcgtgaaatgtggttttaccaccacttggcaatcatggacccaaatagagaattttggcgctcgtaataacttacctatcgccaccaaaaataacggctttgatgggactgatacctcatttttatttaatcaggcaccgtttgttgctcatatccaacgcatggcggattggtctaaatccggtatttttaaatatggtggccgccaatctgatgctatgccgctattttatactcaagaatgcgccatggtgatggagtcatctgcaggctttgcgggtattaaagagaatatgaaaggcattgatattggtgttagccaattgccttatgacgatactttagttgataaacccgctaatagcattatcggaggtgcctcattatgggtaatggcaggtcgtcctgatgctgaatataacggtgtcgctaaattctttacctatctttctagtcctgaagtacaagcagattggcatcaagcaaccggttatttacctgtgacgaaagccgcttatgcattaacacaacaacaggggttctatcagcaaaatcctggtgctgatacggctattttacaaatgaccacctctgactctacagcaaactcaaaaggcttgcgctttggtaactttttacaaacgcgagaaatcgtcaatgaagaattagaaaaagtgtggtcaggcaaacagagcgcacaagccgccttggataatgcggttaaacggggaaatgaacaactacgccgatttgaacgcactcagtaa

SEQ ID NO: 293808 - DNA, 717 bp, Proteus mirabilis
atgaaaatagccgctcatagaggattttctggaaaggcacctgaaaacacattagctgcatttaaaatggcaattgattttgggtgtgaatggattgaaaccgatgtgcaattaacggcagatcatgtacctgtactgatccatgacaagacggttaatcgttgcacgaatggacaaggtgcggtgcgctttcatagtttggatgatttacaccgccttgatgcaggcagttggtttagttcactttatcaaggggaaaaaattcccacactaagacaaggtttgcagttgataaagcgctcaggcactaagctcaatatcgaacttaaaacatggcctgatgatgatgtagagcgcttatgtttagcggtatctgaaatgataaaaagcgcagatatccctaacgaacaaatcctgttttcctctttcgatactcacgcattaatggtgatgaaacgttatctgcccgccattcgtcgaggacagctatgggatgatattcctgataatgcactagaaactttacaagctatagaggggtttagcgtgcattgtaattatcaatatttaacgcagcaacaagcggctatgttgaaacaagcaggctatgaaatttattgctatacccccaatgatcctaaagaagtgaaagattttgaagcatggggagtcgatatgttgatcactgatgtcccagatatttatcaacagaattaa

SEQ ID NO: 293809 - DNA, 1197 bp, Proteus mirabilis
atgacagccttaccacgaaaaaatatgtggcagattgtccttactatcattttagtaggaataaatttacgcccttttttaaccgggcctggccctgttattgacaatattattgcttcaacaggcatgagctatagccaagtctcattactcacgttattacccatgattttaatgggagtcggtgctttggttgtgccctttttacaaccttatattcaagctcgtagagggctacaagttgcgatgcttatcttattattagcatcgttttctcgtgcctatgtttctgatggtgatcaattacttattactgctctattttgtggtttaagtgtcgcttatatccaagcggttttccctggcatcatcaaagcgtggtttggacagaaaactcccattatgatgggtctctactcagctatgctaatgggaggaggtgcattaggtgctcagttatcccctgttcttacggcatctgatggcaattggcaacaggctcttgcttggtttgcgttacccgcgagcgtcgcattagttgctattacgctatcaattaaaaagaatatttccgaaaccaataaactgccacttaatacattgatttggcgaccaagaacagccttattaattgttggatttggatttgttaatgccggctacgcttcgatggtggcatggttagctcccttctatcaatcattaggtatgccaagtgcacaaagtggctcattagttgctattttgtcactttttcaagcatcagcagcattaattattccatttcttgctgccaaaaatcatgatcgccgtttttggctacttttaacactgacaagccaacttattggatttttagcgctgatgacaatgccaatgagtgccccttatctatggagtatctttttaggctgtgggttgggtggttgtttctcaatgatgatgattgccgcattagatcatgttcctcatccattacacgcaggagcactatcagccttgatgcaaggtggcggatttattattgcctcttttgggccgctgatcgcagtatggctacaacaagatgatggtagttttacctatgcttgggcttttcatgctgtcttagtgatattaactatgggattatttgcacggttaaatcctcataattataataaggcctatcctactagccatatattgacagattag

SEQ ID NO: 293810 - DNA, 966 bp, Proteus mirabilis
atgttgagtatggaaaaaattaagcaaccctattggccagcattaaaattgatattaagttcacttattgtttttagtttctatttgaaacaaagccatacccctgacttttcattactgattaatatatttgatttaacattaattcctatgtttgtttttattatcgggtttattactaaaaatgggacatggaaaagttggcgtgataatttattagctgccttagtgatttatgcgactttccaaactattgatatgatccctctttattattcagggcaatttgaccttaatacttaccttctttttcctcaaaatggtgtttggttttttcttgctacacctatttggcaagcttttttcctattgttaccttcatacatcagacatcataaaccaatattattctctcttctgcttgtcagtattttgctatcgttgttaactaaaggctatgaaactaaactatccactttcttggctataatacaatattttccattttttattatcgcttatttagtagaccaacaaataattactaaattgagaagtcaatcttttgtggttattgctttaataagtttattatcaatatttatactttattatcaatctaatatcaattatattattctaacaaaattagaaggtagtctattttttgcaaaattaattatatatattatctctttattgataagttttattttaagtgcaggaattatttaccttgcagcaaccactcaaaaatacgcttctcttgccaataatgcgttaggtgtttatctaattcatccaatcatttgctttatccttttacaaggcataatcttttttcagttatctcttacattaccgatggtttttgcactcaccgttatcaccattagcctagcactattattggcatcaattaagcttattcattggtttattagcccaacttttaatatccgatag

SEQ ID NO: 293811 - DNA, 417 bp, Proteus mirabilis
ttgaataaggttattaaatttatttttattgttctattacttgtagggtctattctgaatatacccattttatttgtagataatcatttttcatacacaaaacatgatttcattaggtataatttatttacctttgatgaaatcaaaaacgctcctattatttcaagcaattacattatattttacgactcacctgatggtgtagcaccaatgactaattcaattctattttcaaatgtaaatccaaaccgtaaaatagaattgataaattatattgaaaatctaggttatgtaaaagatataaatgcatattggaatacagatggaaatgaatcctggcgtaaagacaatttatttatacaaataaaacaaattaatagtgaacatacgattttattcttagtggagaaaaattaa

SEQ ID NO: 293812 - DNA, 327 bp, Proteus mirabilis
ttgttttatcttcaatgtgatggcattgtcaagggtgctaaattctgtctaattttttcatttgcttatacttataaaggattggaatgggcatttaaggatcaatatcatttagccgattttttgggaaatgtaacggttgatatggcaaaaacagctttggctgctgctggagcttgggctgtaggcacagtattattatcaagcgctgtggtaggaggcagtgtagtagctgttgggttaattgtctttcttgtaggggttggtatcacgatgactttagattatatagataagcaatatggcttaagtgaaaaagtcatttaa

SEQ ID NO: 293813 - DNA, 435 bp, Proteus mirabilis
atgccaagatgggataaaataatagtttccatattctttcttattttatttatcgtaattggaatacttgtttatggttacactatttcgttatttctgatggaagatattattatattttcagagcctattgttatgttaacactgggggtaccacttgtcatatatacttgtttcgcaatgacaattgagttttttcttggtgtaaaatcaattgtttttatgtctttaatgacatttaataaattaataatgcgatatttagtctatttaggacttgccggtgtattgctcagttttcctatctcatttgtagtaaatatctttcttcttgatgaaggatataaaacgtgtgataaaatttcgtggctatcacccactacatatgtaaaagaattatcgttttgcaataacaaaaaagcccttaacaaataa

SEQ ID NO: 293814 - DNA, 297 bp, Proteus mirabilis
atgttcgaacaacgcgtaaattcagacgtactaaccgttgccactgtaaattcacaagatcaggtaacccaaaaacctttacgtgactcagttaaacaagcactgaagaactattttgctcaattaaacggtcaagatgttaatgacttatatgagctggtattggctgaagttgaacagccattgttggacatggtgatgcaatacacccgtggtaaccaaacacgtgctgcgcaaatgatgggcattaaccgtggcacactgcgtaagaaactgaaaaaatacggcatgaattaa

SEQ ID NO: 293815 - DNA, 972 bp, Proteus mirabilis
atgcgaatcggacagtatcagttaaaaaattgcctcattgcagctccaatggctggcgttacagaccgaccttttcggtcactttgctatgacatgggtgcggggatgacagtttctgaaatgctttcttctaatcctcaggtttggaagacagacaagtctcggttacggatggtacatagcgatgaattggggatccgctccgtacaaattgcgggaagtgaccctgttgatatggctacagctgcgaaaataaacgtagaaggtggcgctcagattatcgacattaatatgggttgtccggcaaaaaaggtgaataaaaagttagcaggctcggcattgctgcgttatccggatttagtcgcagagatcctttctgcggtggtcaatgcggttgatgtacctgttacactcaagatccgtacaggatggtcacctgatgaacgaaactgtgtagagattgccaaattggctgaagattgtggtattgcggctctcaccattcatggacgtacgcgcgagtgtttgttcaaaggtgaagctgaatacgacagtattcggacagttaagcagagtgtctctattcccattattgcgaatggagacataactgacccgctaaaagccagagcagtgcttgactacactggagccgatgctttaatgatcggtcgcgctgctcagggaagaccctggatctttcgggaaatccagcactatctggacacaggtgaactgttgcctcctctgccgattgcaaaggtgcaacaaataatgcaaaagcatgtgcgtgaattgcacgacttttacggtcaaggcaaaggaactcgcattgcacgcaagcatgtctcttggtatctcaaggaacatgcccctgatgaccagtttcggcgctccttcaacgccatagaggatgccagcgaacagctggaggcgttggaagcatatttcgaaaattttttgcgtaaataa

SEQ ID NO: 293816 - DNA, 882 bp, Proteus mirabilis
atgccttggatacaattaagactaaatgccacctcagaaaacgccgaagccattggtgatgagttggttgaaagtggcgcggtatcagtaacctttcaagatagccacgatacccctatttttgagccattaccgggagaaactcgcctctggggtgataccgatgttattggcttatatgatgcagaaaccgatatgagtatcatcgtggctatgttagaaaacacggcggtgctgggtaaaggatttgtacataaaatcgaacaattagaagataaagattgggagcgcgaatggatggataacttccaccctatgcgctttggcgaacgtttatggatttgcccaagctggcgtgaagtgcctgatcctaacgctgtaaatgtcatgctcgatccaggtctggcatttggtactggtactcacccaaccacctctttatgtctacaatggctcgatggtttagatctcgcaggtaaaaccgttatcgactttggttgtggctcaggtattttagccattgcagcattaaaactgggggctgcgaaagcgataggtatcgatatcgacccacaagctatccaagcaagtcgcgacaatgcgcaacgtaacggtgtcgctgatgcactgacgctataccttgctaaagaccaaccagacaatctcagtgccgatgtagtggtagcaaatatcttagctggtccattacgtgaattagctcctattatcagcacactgccacgtcaaggggggcatttaggtctttccggtgttcttgccacacaagctgacggtgttgcacaagcttatcaagaacaatttactttagatcctgtggctgaaaaagaagagtggtgtcgtattaccggagtgaaaaaataa

SEQ ID NO: 293817 - DNA, 1452 bp, Proteus mirabilis
atgacaatgcaaactgaggttatcgtgccactggttggctatctcttattggtcttcctattatccgcatacgcatatcgtaaacgtgaaaaagggcaatttcttaacgagtattttcttggtaaccgctctatgggtggatttgtccttgcaatgaccatcacggcaacctatgtcagtgctagctcttttattggtggaccaggagcggcttacaaatacggcattggttgggtacttctttcgatgatccagctccccgctatttggctctccctcggggtactaggtaaaaaatttgctattttggcgcgtcgttataacgccgtcaccctaaatgatatgctctatgctcgctaccaaagtcgctttttagtctggtttgccagcttaagtctactggtagcttttgtcggcgccatgaccgtacaatttattggtggtgctcgcttattagaaaccgcggcgggtattccctatgaatttggtttgctgatatttggtatctcaatcgcattatatacagcgattggcggatttagagccagtgtattaaatgatgccttacaaggccttgtgatgttattgggcacctttattttgctttttgccattatctacaaggcgggtggtttagatattgcaatacaaaaactaaatgctatcgatcctgcccttacctctcctcatggtgctgacggcattttaactggcccctttatggcgtcattttgggtattggtctgttttggggttatcggccttccccatactgcagtgcgctgtatctcttataaagacagcaaagccatgcacagagggatcatcatcggcaccatcgtgatggcgttattaatgtttggtatgcactttgcgggcgcattaggtcgggcaatcattcctgatctcaccgtgccagatcaagttattccaaccttaatggttgatgtattaccaccttttgctgccggtatatttttagcggcaccgatggcagccatcatgtcaacgattaacgcacaactgctacaatcatcagcgacattggtcaaagatctctatctcaatctcgcgcctcatgccataaacaatgaaaaacgcattgcgcgtttatctagcctatctactttgattttagggatcttattgctatttgctgcatggaacccgccatcaatgataatttggctcaatttacttgcctttggtggactacaagcggttttcttatggcctctagtacttggcctttactggaacaaagcaaaccgttatggcgcgattgcgggcatgataaccggtgccacactctatgctacactggcaacatttaatatccagattgctggatttcatcctattattcctgcgctgttattgagcttagtggcttttcttgtcgcaaataggtttggagaacaaaccttgcctcaatctgctccattacagtga

SEQ ID NO: 293818 - DNA, 249 bp, Proteus mirabilis
atggacaagcgttttgttcaggcccacaaagaagccctcttggccttagtgcttacttttatctacttattgggttggttacttactgcctatttacccgataatagtgtgggactaaccggcctaccggtttggtttgagctttcatgcctatttttacctgtgctattttttttactgtgttatctgatggtacgctattttttcaaagatatgccgttaggagatgagcatgacaatgcaaactga

SEQ ID NO: 293819 - DNA, 1350 bp, Proteus mirabilis
atgctagaaaaaatcctcattgccaaccgtggtgaaattgcactgcgtatcctaagagcttgtaaggaacttgggatcaaagcagtcgccgttcactccacggcagaccgtgatttaaaacacgttctgctggcagacgagactatctgtattggtcccgctgcttcagcaaaaagttacttaaatattccggcaattattgccgcggcagagataagtggcgcgcaagccattcacccaggatatggcttcctgtctgaaaatgccgattttgccgaacaagttgaacgctcaggctttatttttattggccctaaagcggaaaccattcgcctaatgggtgataaagtttcggctattgaagcgatgaaaaaagccggtgttccttgtgtaccaggctcagatggcccattaggtaacgataccgccaaaaatatcgaaatcgccaaacgcattggttaccctgttatcatcaaagcatcaggtggtggcggtggtcgcggtatgcgtgttgttcgctcagaaaaagacttagcgcaagcaatctccatgacccgtgcggaagccaaagcggcatttagcaacgatatggtctatatggaaaaataccttgaaaatccacgccacgtcgaaattcaggtgatggccgatggacaaggtaatgctatctatttagctgaacgtgactgctcaatgcaacgtcgccaccaaaaagtggttgaagaagcaccagcaccgggtattacccctgagatccgtaaaaatatcggtgaacgctgtgcaaatgcctgtattgaaattggctaccgcggtgcgggtacgtttgaattcctctatgaaaatggcgaattctactttatcgaaatgaatacccgtattcaggttgagcaccctgttactgagatgatcaccggtgttgaccttatcaaagagcaactgcgtattgcatcaggcttaccattatcggtcacgcaagatcaaattcacgttcatggacatgctattgagtgccgtatcaacgcagaagatccaaaaaccttcttgccaagcccgggaaccatcactcgtttccactcaccaggcggatttggtgtacgttgggaatcacatatttacgcaggttacaccgttccaccacactatgattcaatgattggtaaattgatcacttacggtgaaacacgtgaaattgcgatttctcgtatgaaaaatgcgttggcagaacttattattgacggcattaaaaccaatattgagctacaccaattcattatgaatgatgagcaattccaaaaaggtggtactaatattcactacctagaaaaacgcctaggtttaactgaaaattaa

SEQ ID NO: 293820 - DNA, 471 bp, Proteus mirabilis
atggatattcgtaaaattaaaaaactgatcgagctagtcgaagagtctggcatttctgaactggaaatttctgaaggtgaagagtcagtacgcatcagtcgcaactctggcgttcagggtcaaatggctcctcagcaatattttgcggcaccagcagcacctcaacctgcattagcagctgctgtggcacctgtagcaccagaaacaccagcggctacagcaacgcaagaaattagcggccatgttgttcgctcaccaatggtaggtaccttctatcgttcaccaagcccagaagcaaaagtctttgttgaagtgggtcagcaagtcaatgttggcgatacactgtgtatcgttgaagcaatgaaaatgatgaaccaaatcgaatctgataaagcgggcgttgttaaatctatcctttgccaagatggcgatactattgagtttgacgatccactctttgtcatcgaataa

SEQ ID NO: 293821 - DNA, 444 bp, Proteus mirabilis
atgtcggaaaattttcatattttgctcctgaatggtccgaacttaaacctgcttggcactagagagccggaaacttacggacacctaactctgaatgatattgttcaaagtttgtcagcggatgctcaagcattaaatgtgaaactgactcattttcaatcaaatgctgaacatgagctaataaataaaattcatgcggcgcggggaaatgttgattatattcttatcaaccctgcagcatttacgcacaccagtgttgcactgcgtgatgcattattaggggtgaatattccatttattgaaattcacctatccaatgtctacagtcgggaacctttccgtcaccactcttatctttctgatatcgcaactggcgtaatctgtggattaggtgctgaagggtatcgatttgctttacaggcagcggtcaaccgcttgtcttaa

SEQ ID NO: 293822 - DNA, 975 bp, Proteus mirabilis
atgaaagcattattagtcgaacaacacagcgataaacttagcgccggcgtccaacatatcgatgaatcacaactccctattcatgaggtcattgttgatgtccactactcgacactaaactacaaagatggcttagccataacaggtaaaggaaaaattctacgccaatttccgatggtccccggtatcgatttttcaggggtggttcaccatacagaagatccccgttttcatattggacaacatgtgttactaaccggttggggggtaggtgaaaaccactggggcggtttagcacaaaaagcgggcgttaaaggtgattggttaacggcgctgcctgaaggactgtcgttaaaaaatgccatgatcattggtaccgctggttttactgccatgctttgtgtgatggcgttagaacaaggtggcataacacccgatagtggtgagattttggttacaggtgccagcggtggtgtcggtagcaccgcaattagtttattaaccgcacttggctatcaggttaccgctctcagtggcagagccagcaatcacgattatttacgtaaactgggggccgagcatattatcacccgtgaagcatttgaggctgcgggtaaagcgttagataaacagcgttgggcaggcgctattgataccgtaggtggacaaatccttgccaatatcttgtcacaaacacattacaatggcaccgttgccgcctgtggattagcaggaggatatacgttacctactacagtcatgccatttattttacgcaatgttcgtctgcaaggtatcgattccgtttattatcctgcagaaaaacgcgctcaagtatggcaacgtttactacagctattgcctgatacattttatcagcaaacagtaactgaaattacactcgatgaggtgccacgctatgctcagatgataatggataatcaagtaacaggtagaaccttagttaagttgtaa

SEQ ID NO: 293823 - DNA, 1044 bp, Proteus mirabilis
atgtttaaaaaatttcgtggcatgttttccaacgatctgtctattgacttgggtaccgccaataccctgatttatgtcaaaggacaaggtattgttctcgatgaaccttctgtagttgcgatccgccaagatcgcgcaggtacatcaaaaagtgttgcagccgtcgggcatgaagccaaacagatgctagggcgtacacctgggaatatcgcagctattcgtccaatgaaagacggtgttatcgctgatttttatgtaaccgaaaaaatgcttcaacacttcataaaacaggttcataacaacagctttatgcgtccaagccctcgtgtattagtgtgtgtacctgttggtgcgacacaagttgagcgtagggctatccgcgagtcggcacttagtgcgggtgctcgcgaagtctttttaattgaagaacctatgtctgctgcaattggtgcaggtttaccggtatctgaagcgacgggttcaatggtcgttgatattggtggtgggactacagaagttgcggttatctcattaaatggtgtggtttattcctcttctgtacgtattgggggagaccgttttgatgaagctatcattaactatgtacgtcgtaactacggttcgttgatcggtgaagcaactgctgagcgtattaagcatgatattggctcggcttatccttcagacgaattaaatgagattgaagtacgtggacgtaatttagcggaaggggtaccacgtagctttactttaaattccaatgagatcctcgaagccttacaagagccattaacaggtattgtaagtgctgtgatggttgccttagaacagtgtccgccagagcttgcttctgatatttcagaacgaggtatggtcttaacgggtggtggggcactgttacgtaacctagaccgtttattaatggaagaaacaggtattcctgttattgtggctgaagatccgcttacctgtgtggctcgtggtggtggtaaagcattagaaatgatcgatatgcacggtggcgatctatttagcgaagattaa

SEQ ID NO: 293824 - DNA, 1047 bp, Proteus mirabilis
atgaagcctatttttagtcgggggccttccctgcaactaagattaataatcgctgtgattatcgcgatatcgttgttaattgctgataatcgcataggtgctttttcaaaagtccgtcagtatttggatactgctgtgagtcctttctattttcttgcaaatgggcctcgtcgtttccttgatcaactctctgaaacctttgcaactcgcgaacgtttacaatttgaaaatcaagcgctaagaaaagagcttcttgttcgcagtggtgaaagtcagctactggaacaatttaaacaagaaaatgcccgcttacgagaattacttggttcacctttacgtcaaaatgaacaaatgacggtaacacaagtgttgtctggtaatagtacgccttatcgagatcaagtggtgatagacaaaggcactaatgatggggtgtatgaaggtcagcctgttattagtgataaaggcgttgttggacaagttattgccgtaagtgagttaaccagccgagtactgttaatttgtgatacctctcatgcattaccggtacaagtattacgtaatgatattcgcgttattgcctcaggggctgggtgtgcggatgatctactgttagaggcactacctgcgaatatcgatattcgtgtaggggatgtgttagtcacctcaggattagggggacgctttcctgaaggttatcctgttggggttgtttcttcggtaaaagtcgataatcaacgtgcttattcggtgattaatgtgcgaccttctgctgaattacaacgtttacgttatctgttgctattatggaacgcctcagagaagaaacaagcgccaccgttaccctcagaggtttaccgtgctgccaatgaacgtttgatgcaattaatgccacaggtactgcctaactatgaacaagcggggccaccactgcctcgttctatgtcacaagagccaacggaaaatagcgccaccccaagtgatatagcaccagtaccaccaacggaaaacaataaacctcaacctaatacgaatcgaggtagatag

SEQ ID NO: 293825 - DNA, 495 bp, Proteus mirabilis
gtgacaatcaatccttatcgtagccgtgggcgttggattatttggctctcgtttctaatagctttggtgttacaaattatgccttggcctgagcaactagaagtttatcgccctatttggccggtgttgtttctgatttattggataacgtcattacctcatcgtattagcgttggaacagcatttgttcttgggatgagcatggacttagtgcaagggacaacattaggggtgaatgcgttggcttataccctagtaagttatgttatcgcctttaaatatcaattattttgtaacttagcgttatggcaacaggcattagtggtaatgttagcgattggtgtggttgatcttactgtattttgggcagaatttttgctttctcccgtgacttttcacccacaagtattctggaatagtccagtcagtggtattctttggccatggctttattttttgcttcgcaaagtccgtcaccagttttcagttcattaa

SEQ ID NO: 293826 - DNA, 588 bp, Proteus mirabilis
gtgatcactctttaccttgcatcgagttcccccagaaggcgagagcttctgtcactgttggatgttcaatttagcaccattacaccggcaattgatgaaatttggcaacaaggtgaagcaccggaagattatgttatccgtttggcgagggagaaatctcaagagggggtacgtcaagcgacaaatgactatccggtattaggctctgatactatcgtggttcaagcaggtcgtattctggaaaaaccacgagataaagcgcatgcagcacaaatgctaagtaatctttcaggtgcaacccaccaagtgatgacggcgattgctatttcagataaaactcgaacaataagccaattagttgtcacggatgtgacttttagaaagatgacagaaagtgaaattagtgcgtatattgaaacgggagagccaatggataaagctggcgcttacggtattcagggaaaaggaggccgttttgtacaacggattgagggtagctatcatgctgttgtcggcttaccgcttgttgaaaccgaagcattgatagctcaatttttgtctctagcgaatgataaggagatttcatga

SEQ ID NO: 293827 - DNA, 1470 bp, Proteus mirabilis
atgacagcagagctattagtgaatgtgactccctctgaaacccgagtggcctatatcagcgggggcatactacaagagatccacgttgaaagagaagccaaacgaggtcttgtcggaaacatctacaaaggtcgggtaagtcgtgtattacctgggatgcaagctgcatttattgacattgggcttgagaaagccgcttttttacatgcttctgatattatgcctcacacggaatgtatcgcgggtgaagagcagaaaaaatttaatgttcgtgatattgcgcaacttgtacatcaaggtcaggacttgattgtacaagtggtgaaagatcctctaggtacaaaaggggcacgtcttacaacagatatcacattaccatcacgttacttggtgtttatgccgggggcttctcatgtgggtgtttcacaacgtattgaaagtgaagaagaacgtgagcgcttaaaacgcttggtagaagagtattgtgatgaaaatggtgggtttattattcgcactgccgctgaaggtgtcggcgaacatgaaataaaacaagatgctgcttttttaaagcgcctatggaataaaatcattgagcgtaaaaaaagaaataaaacgcgcattcaaatttatggtgagctcgctttagcacaacgtattttacgtgattttgcaggggctgaattagatagcattcgggttgactctaaattaacttatcatcaattacaggagtttattggtgaatatattcctgaattaaccgctaaacttgaattacaccaaggtaatcaacctattttcgatctttacggggttgaaagtgaaattcagcgcgcgttagagcgaaaggtcgagttaaaatcaggaggctatctgattatcgaccaaaccgaagcaatgacaacgattgatatcaatacgggcgcttttgttggtcatcgtaatttagaagagacgatttttaataccaatgttgaggcgagtcaggcgatagcgcggcaactgagattacgtaatttaggcggcattatcattattgattttattgatatgagtaatgaagatcatcgccgtagagtattagcttccttagaacaagcattgagcaaagatcgcgtgaaaacgaccatcaatggtttttcacaattaggtttggttgagatgacacgtaaacgaacccgtgaaagtctcgagcatgtactttgtgatgactgtcctacttgccaaggccgtggtacagtaaaatcagttgaaacggtatgttatgaaatattacgagaaattgttcgtgttcataaaaccatagacgcagatcgctttttggtttatgccgcccccgctgttgtggaagcactaaaaggtgatgaatcacatgctttagccgaagtggaaatttttgttgggaagcaagtcaaagtgcaaactgagctactctatagtcaggagcagtttgatgtggtgatgatgtaa

SEQ ID NO: 293828 - DNA, 3804 bp, Proteus mirabilis
atgaagcggctgtctaaatctttattattgataacccttttttgcctgattattttcgccgtagtattaagtggatttcgttattttctgcctcgtttagataattatcgccctgaaattgaaacctatttatctaaacagttcaatagcccagtcaccatgacacaggtgaaaggagaatggcaaaactttggccctgatatccaaattactgggctgtatattgataataacagtgttgaagtgagtgctgaacagatcactttctcttttgatgtttggcgttcactacttcattttcaactctattttcgtgaattaacctttgaacaattagcagtaaattacaaaaagcctatttttactgggcaaaatggtgatattactttcactgaacccgatgatatctcttccattttcttaaaacagtttgatcgatttaaattggttgatagccgtttcgtgtttttatcaccttctggtgacactagcacgctccatattcccgaattaatgtggctcaatcagaaaaaccgccatcgtgcgcaaggggaagttactttagataccccaataaatcactatggtggactaaaagtacgtcttgatctctatacgaaaaagcagggggcactcgataaaggacaggtgtttgtcaccgctgatgaggttgatatttccccttggttaagccaatgggttaaaagtaacagtggccttggtgaagcgaaagccagcctatctaattggatagagatcagcaatgggcggatcacgggtagccagttacaaatccatcaaggtgaaatggattggcgtaatgaagggcgcacacatgtattaaaggtagaagatttaattctacgtatgagacgccaagaaaatggctggcttgctgatatcccttatacccgaaaaataacgatggatggtgatgaatggccagatggttatttagcggtactttatcaacctaaagaaaaacaacaggatgaagcttggcgtatccgtgctaaaaatattgaattagaacggttatctgcgttattgcctttgttctcttttttaacgcctgatgtcgtgcgccaatggcagtatcgtcaattttctggcatggtcgactcatttgctcttgatgtagctcccgatgattttaaacgtagtgccattgatatcagttggcaaaatgttgcttggaaacgctggcaagaaatcccttctgtggcacattttaatggtcatttaaagggcacattacagcaaggagcgcttaattttgcgcttaataacagtgaaattgatactgctgagctttttaaagcgccacttaatatagaaaaaggcactggtacggtttactggcagcatcagggagattctctgtcgttatggagtcaagggattgatataaaagccacctccgcttgggttgccggtgattttcgttatcaaaaacaaggagagcatcaacaactgtctattctttcgggagtgaatgtgaccgatgccggtgagacatggcgctatttacctgaaaaatatgtcggtaaagatttaacacaatatctctctgacgcgattattgccggaaacgttaaaaacggtacgtttatttttcatggtgatccgcgggatttcccttttgaacaacataatggttggtttcaagtctatgccccagtaaaacaggcaaccttcaaatatgatagtgaatggccggcactgtttgatctcaatgttaatcttaattttatgaataacggcttatggatgtcctctgataatgttcaggttggtaaagccaccgctaaaaacttgacggcgattattgaggactataacaaagaaaaaattgttattgatgcagatattgaagccacgggcgatgatttaaaagagtattttctagcttcgcaaatggcaacgattggtcatacacttgaaatactaaaagtggctggaaaaattaacgggagtttgcatctcgacattccttttgatggcgagcaggtggtcgcttctggtcaggtaaacttaaacaataatgatgtcacattagcctttatggataccaccctagaaggtgttacgggacaatttcgttaccataatgataaattagagagtgatactttaaccgcgaattggtttggtcaacctctgacattttcttttgctggtggtgagcaacgggatgcttatcaagttggtgttgatctaaaaggacaatgggatatcgcgaaaattaagggattacctaatgatatacaacataaattaagcggttttttaccttggcatggcgcggtaagtgttaatattccagaaacagcggatgtcaattatcaagtggatctgaccggacaagtgaatgcgctacaaagtcagttagctgcgccaagtaccgatgattttaaaaacgcttcccccattgtgatttcagcaaaagggaatagtgaaaaacttaacgttagtgccgatgcacaagatcagtggtcattaaatagtgaatgggcgttaggtgaaccattacgtctattacaaggtaatttagtctcttcctcgctcacactacctcaattaaatgatcaatcacgattgactattgcattgcagggattgcaaggcgataaatggctacctactttaatggctttttcatcattagccccttctgaaaacgcaatacgtttccctaccaatattcatattagtttgcctgaacttaattttgctggtcagcaatggattgcgccacaaacagaaattatgcgtgctgatgatggcgtaaaattatccttctcagggagtgagttacgaggtgacttatttgtacccaatacggcacaaccttggcaggtgaatattacctatctctattttaatggcgctagcccaacagaagaaaataaatccttaaaaatggcaaatgtgcctgatgccaaaaaagcagttcaattttcacttaaagatattcctgctatcaatttcgcctgccaagagtgttgggtgaatggattattactagggaatattgaaggtgcaatacagcctcgtgacggagcattattgttaactgcaggtaagcttaaaaatagcagtggcgagctatctgtgagtggtgtgtggtcagaagatagtttaggcaacagtatcactaagttggcaggtaaactaacggcaccggaagtcgatgaaatggcggcttactttggttatatcattccgattgttcagtcaccacttacggcagatttctcactgcagtggcacaataccccttggaattttgatctaaaaacactcaatggtgaagtgaatgcttctcttggaaaagggcgtattgaaaaggtggatgttgggcaagcgggaaaattattacgtctagtcagttttgatgccctgttacgtaagttgcaattcgactttagagatacttttagtgataattttgagtatgattccattaaaggtgatttgacggttaaacaaggtgttttaaacgcgaaaagtgttgctgtagatggtgttattgccgatattgctataaaaggtcaagtggatctgttggcgcgtaaaatggacttacaagtagtggtaactcctgaaatatcagctacagtaggcgttgctaccgcatttgctattaaccccatcgctggtgctgctgtatttgcagcttcaaaagtactggggccactttggagtaagatttcagttatacgttatcatgttaccggaacggtagaacaacccaagattgacgaagtactgcgtcaacttaaggaggatcaggcgttatga

SEQ ID NO: 293829 - DNA, 861 bp, Proteus mirabilis
atgaaaaaagttaatgtcgcacttttgcagctttgtagcggaaaaaatataaaaaataatctggcgcaaatagagcaacagattaagcaactccccgattcagtcaagcttgtattaacgcctgaaaatgcattacttttctccagcgcaaaagattatcataaacatgctgaaattcaggggaaaggaccattacaagatgcgattgctaatatggcgcagcgctataaggtgtggatcttagtgggttcaatgccattgattagccgagattctcctgagcagatcaccagtagtagtttagtttttgatgatgaaggggtgatccgcgctcgttatgacaaaattcatatgtttgatgtgaacattgatgatgaacaaggcgaatataatgaatcagccatttatcaacgtggtgaacgcttgactgtagtggatacacctgtgggtaaattaggtttaacgatttgttatgatttacgttttcccggtcttttccaagcattaagagaaaaaggtgctgaaattatttctgtaccggcagcctttactcgtttaacgggtaaagcgcactgggagccattgttacgcgcgcgggctattgaaaatcagtgtattattttggcaccggctcaagtcggtacccatgatgctcgtcgcacatggggtcatacaatggctgtggatggttgggggaaagtattgaaaaagaaccctgatgcggtcagtgccctaacgctcaatattcgagtcgatagtttagaaggtatgcgtgaacagatacgggttgtgaaacataatcgctttcgcccgaaactgacacacttaataaaaaaagttaaggataaaaaagaattatga

SEQ ID NO: 293830 - DNA, 1446 bp, Proteus mirabilis
atgagtttagctgttgtcagcgaaagtctgttggaagcgaacaacctgagtttagatgatttagcatcgacactagagcagcttgcacagcgtcaaattgattatggtgatctttattttcaatcaagctaccacgaagcatggatattagatgatcagataattaaagatggctcttacaatattgaccaaggggttggcgttagagcgatttatggtgaaaaaacaggttttgcttatgcagaccaattaacactcaacgcacttaaccaaagtgctcatgctgcgcgtagtattgtgcaagcacaaggcaatgggcagatccatacactgggtgctattcaacatactccgttatacaacctaaatgatccattacaaagtttgtctcgtgaagaaaaaatagcactattacatgacgttgatcgtgtggcacgggctgaagataaacgtgttaaacaagtcaatgcctcattaacgggggtatatgagcatgtgttagttgctgcaacggatggtactttagcggcggatgtgcgtcctcttgtacgtctttcagtaagcgtactggtcgaagatgacggtaaacgtgaacgtggttcaagtggtggcggtggtcgttttggttatgattattttctgactaaagaaaatggcgaaacccatgcagcgacttatgcccgtgaagcggtacgcatggcattagttaatttatcggctattgctgcaccggcaggtacaatgcctgtggttttaggcgccggatggcccggtgttttattacatgaagctgttggacatggtttagaaggtgattttaatcgtcgtcaaacatcggtattctctgggcgtattggcgataaagtaacttctgagttatgtactatcgtggatgatggttcaattgaaggccgacgaggctccgtggcgattgatgatgaaggcgtaccaggtcaatacaacgtattaatcgaaaatggcatcttaaaaggctatatgcaagataagatgaatgcgcgtttaatgggggtaaaaccgacgggcaatgggcgtcgtgaatcctatgcacatttgccaatgccacgtatgaccaacacctatatgcttgcgggtaaatcttctcctgaagagatcatcgccagtgtcgatcgcggtatttatgcgccaaactttggtggtgggcaagttgatattacctcgggtaagtttgttttctcaacttcagaagcctatttaattgaaaagggtaaaattactaaaccaattaaaggcgcaaccttgataggttcaggtattgaagcgatgcaacaagtttctatggtgggtaatgatctcgcattagataaaggtgtcggggtgtgcggcaaagaggggcaaagcttgccggtaggggttgggcaaccgacactgaaattggataagttaaccgttggtggtactgcttaa

SEQ ID NO: 293831 - DNA, 507 bp, Proteus mirabilis
atgggcaaacgtctattccctgttcttattgttgtggctgttttattttttgttctttataaaggattagtacctgaaacgcagataccagcaacagcgcctcctacatcaacaacatctacatcgtcaaagagttcaatcagtcagcctgagtctcaacgtcctttaacaattgatgaaaagacacaagccaataaagtggctgattatttgcaacaacacgctcgtttacctgatttttatatcagcaaaaaagaggctcgagctaaaggttggaatgcgaaagcgggcaatttatgtgaagttttaccaggacgggcgattggtggtgatcgctttatgaaccgtgaaaaacagttacctgaagaagcagggcgccaatggtttgaagcagatgtcaattatcaatgtggacatcgtggtagcgatcgcttgctatattctaatgacggattaatttatttaaccaccgatcattaccgtaccatgcaaagagttgcaccttaa

SEQ ID NO: 293832 - DNA, 282 bp, Proteus mirabilis
atgaaacagattatttttgatttcagcacattggcggatcgagatgctttttatcatcagtttgctcagcaatttcaattggatgaagcatttggtaataatcttgatgcgttatgggatgtattaacaggagaaattgaattgcctgttaatattgttttcagacatgcaccgcatcattcccgcaccttccagcccattattgagataatgcaagaagcgcaagagacgctgggtaaagagctatttcgctttcattgtgaacataaaaaagctaagtag

SEQ ID NO: 293833 - DNA, 561 bp, Proteus mirabilis
atggcaaagcagccagaagagtggcactacctcaatcctgaatttgacaatacaccgttagaagaggaagaagaggaagagatcatttgggtcagcaaaagtgaaattaaacgtgatgctgaagcgttaaagaaattaggcaccgaacttgttgagttaagtgctcaagagcttgaacgagttcctcttgatgaaaaactactcgcttcaattaaattggcgcaaaaggtacaacgcgaagcgcgtcgtcgccaaattcaatatatcggtaagttactccgtaatgttgatgaagagccgatccgccaagcactagataaactaaaaaatcgccataatcagcaaattttagtgttacataaactagaagatctgcgtacacgtctgattgacggtggtaatgaagtgattgaggaagtggtagcgctttatcctatggccgatcgccagcaattacgcacacttattcgtaatgctaaaaaagagaaagaagccaataaaccgccaaaatcattccgcttattgtttcaatatctaaaagatctctcagagtcagcttaa

SEQ ID NO: 293834 - DNA, 1329 bp, Proteus mirabilis
atgaataatacagatcaggtaaaacagctggaagaggcagtttctcttgcactggagatcgccgcaaaacagtgtgacggtgcagaagttgcaattaataaatcaacaggtataagcgttagtacacgctatggtgaagtagaaaatgttgaatttaatagcgatggcgcattagggatcaccgtctatcagcaacaacgtaaagggagtgcatcttctacagatttaagtcctgatgcgattaaacgtgcagtacaagcggcggtagatattgcgcgctacacttctgttgatccttatgcagggcctgctgataaagccctgttagccttcgatgccccttttcttgatctctaccacccaacagacataacagcagataaagcgattgagctggcgtctcgtgcggagcaagctgcattagacagtgatagccgtatcgtcaataccgaaggaggaagctttaatagtcatagtggaactcgtgtctttggtaacagccttggtttattaaaaagctactcttcatctcgttattcaatgtcgagttgcgttatcgctcgtgagggtgaggatatggagcgcgattatgcctataccattagtcgccgttttgaggcgttacaatctcctgaatgggtaggacaagaatgtgcacgccgtaccttatctcgtctagctccccgtaaattatccaccatgaaagcgcctgttctcttctcagcggaagtagcaacggggatcttcggtcatttagtggcagccatcagtggtagcatgatctaccgtgagtcatcttgtttgttagatagcttaggaaaacagattttccctcaatggttaaatattcaagagcgtccacatattgtggggggattagcatcaacgccttttgatagtgaaggggtacgcacatcagatgcagatattattaaagatggggtactgcaagagtggctccttactagctattccgcaagaaaattagggttaaaaagcaatggacatgcggggggcattcataactggcgtatcccagggcaaggtctctcctttgatgaattgttaaaagagatgggcacagggcttgtggtcactgaattaatgggacaaggggttagcacggtgacaggggattattcccgtggtgcgagcggtttctgggtcgaaaatggtgaaattcagtatccagtaagtgaagtgactattgccggtaacttgaaagagatgtgggcgaatattgccacaataggtgatgatattgaaacacgcagtaatattcagtgtggatcactactattaccagaaatgagtatcgcaggtcagtag

SEQ ID NO: 293835 - DNA, 411 bp, Proteus mirabilis
atgacaaagccaacaattatcatcaatgaacttgatgcagaacgtttagattcattactagagcaacctgcctttgcagacagcccaattgcagaagctttaaatgaagagttagatcgtgctgacattgttacaccagctgatatccctgctaacatcgtcaccatgaacagcaaagtccgctttatggacttaaaaaataatgaagagcgtattcgtactttagtttatcctgcttcattaaaagatagtgcgactgaattatcagtcatggcgccaatgggtgctgcactattaggtttagctatcaatgatgagatcagttggcagcttcctaatggccttgaaactaaggtcaaagtattagaaattctctaccaacctgaagctgctggtgaattacaccgttaa

SEQ ID NO: 293836 - DNA, 273 bp, Proteus mirabilis
atgacccaatatcgacgcgtagcgataaaaaaccgtttaggcatgcatgcaaggcctgccatgaaattgtttgatttggtcaatacatttcaatcaacggtgacgttacgtaaccatgagggcgttgaggcgcaagcagatagtgtgattgcgatgttgatgttagattccgaacaaggcagtcacatcgatatagaagccagtggctgtgatgaaaaagaagcgattgatgcgattattgcattatttgaatcagggtttgatgaagattaa

SEQ ID NO: 293837 - DNA, 855 bp, Proteus mirabilis
atggtgctgatgatagtcagcggacgctctggttcaggtaagtcagtcgctttgcgtgcgcttgaggacatgggattttattgtgttgataacttacctgtcgatctgttaccggagcttgcgaaaacactggctgagcgtgatgctgccgctgccgcagtcagtattgacgtacgtaatatgccagaatcaccggagattttcgaaaaggcgctggaaagtttacccgcggaatattctccacaactgttatttttagatgctgatagaaatacgctgatccgccgttatagtgatactcgacgcctacaccctctttcaacgaaaaacctctcgctagaaatggcgattgatacagagagtgatctgctcgaacctttacgatcacgggctgatctgattattgatacctcagagatgtcagtgcatgaattagccgaaatgctacgtactcgcttactcggtaaacgtgaacgcgaattgaccatggtatttgagtctttcggttttaaacatggtattcctatcgatgctgattatgtctttgatgtacgatttttacctaatccccactgggatcccaaattacgcccaatgacggggttagatcgtccagtcgcagccttcctcgatcgccataccgaagtgcataactttatttatcaaacaagaagttatctagaactttggctaccgatgttagagacgaataatcgtagttacctaactgttgctattggttgtactggcggcaaacatcgttctgtttacgtggctgaacaactggcagactatttccgctctagagggaaaaacgtacaatcacgccatcgaacacttgaaaagcgcaaatga

SEQ ID NO: 293838 - DNA, 450 bp, Proteus mirabilis
atgaatattagcgacgtacttactctggcatgtacacataacaatgtgcattgcacaagtaaaaaacgcgcgttagaaattatcagtgagaatgcagctcaagcactgaatttaccagaaacactgatttttgaggctttattaacgcgtgaaaaagtcggtacaacagggattgggggtggattggctatccctcatgggcgtattgaaagtgatgaaactgaaaaagttgttggtgtgtttcttcacctaagcgagcctattgccttcgacgctattgataatcaacctgtcgatttgttgtttgcattactcgttcctgcaacacaatgtaaggaacatttacacacactgtctttgattgcaaaacagttggctgacaaaaatttatgtcgccgactacgctccgcacaaagtgatgaagagctttatcagattatcacagaataa

SEQ ID NO: 293839 - DNA, 288 bp, Proteus mirabilis
atggaacttcaaatcactggtcataatattgaattaactgatgctctgcgtgataccgtcaaagcaaaaagcgctaaattacctcagttctttgacaaaattaataacgtccaagttatcctcaaagtcgaaaaagtgactaaaattgcggaagcgacgattcaagtaaatggcggtgaattacatgcctctgcggaagcagaagatatgtacgcagcaattgatggattaatggataaactggctcgtcaattaaccaaacacaaagataaactgagacaacattaa

SEQ ID NO: 293840 - DNA, 1476 bp, Proteus mirabilis
atgaaacaaagtctgcaacttcgtcttagtcagcaattggccatgacgccacagctccaacaggctattcgtttgttgcaactttctacgcttgaattacaacaagaaattcaacaagcccttgaatctaacccattgcttgaacaagaagacgatcaagcggatgtaacgcatcctgatagctcatcaacacaagagagtgatgatagtacaccagacaatgagcgtgataatgaggtattagataccctagatgcactagagcaaaaggatatgcctgacgatcttcctctcgatacccaatgggaagaaatttacaccgcaggcaccccttcaggcaccagtaatgattatgcggctgatgaattaccactctatcaaggtgaaaccacggcttcactgcaagattacctaacttggcaagctgacctaacaccttttactgatactgatcgtgctatcgcgacaagcattattgatgctgtcgatgaaacaggatatttaacagtttcaacagatgacattcttgccggaatgggtgatgatgagttagagcttgatgagattgaagcggtattaaagcgtattcaacgctttgatcccgtaggtgtcgcagccagagacttaaaagagtgtctgttaattcaattgtcgacatttccaactaatacaccttatttgaaagagactcaacttgttattgagcactatttagcgttattaggtaatcgtgattttcgccaattaatgcgtcacactaagctacgtgaagagacattaaaagtagtgattgagaccattcaatctcttgatccaaaaccgggtttaagtattgatacagaggaatcacagtatgttattcctgatgtactggtaaaaaaatcaggagaacactggcaagttgagttaaatacggatagcattccccgcctacgcataaatgagacttatgcagcgcttgggcaatcagctcaaaacgaaagcgatgggaaatttattcgtgacaatttacaagaggctaaatggctgataaaaagcttagaaagccgtaatgagacattattaaaagtcgctcattgcattgttgacacacagcaggcgtttttcgaattcggtgaagagcatatgaaaccccttgttttggccgatattgcagaacaggttgagatgcacgagtccaccatttctcgcgttacaacgcaaaaatatttgcattgtcctcggggaattttcgaattgaagtattttttctcaagccacgtaaatactgataacggaggtgaagcctcttcaacagcaattcgggctttagtgaagaaactaatcgcagcagaaaacccagcgaaaccactaagtgatagtaaactggcaaatatgctcgccgagcttggtatacaggttgctcgacgaactgttgcgaaatatagagagtcattatccatcccgccttcaaatcaacgtaaagagttggtttga

SEQ ID NO: 293841 - DNA, 726 bp, Proteus mirabilis
atggcgctgttaaaagctgaaaatttagcaaaagcatacaaagggcgcaccgttgtcggtgatgtgagcctcaatgttaactccggtgagattgttggcttacttggccctaacggtgcggggaaaaccaccaccttttatatggtggtaggtattgtcgcccgtgatgcgggtagcattactatcgacgatgaagatattaccttactcccgttacatgaacgtgcacgtaagggtattggttatttgccacaagaagcctctatttttagacgcttaagcgtttatgacaatatcatgggaattttagaaatacgccatgatttaacggccgaacaacgaaaagatcgtgcagaagagctacttgaagagtttaatgtcagtcacttacgtaatagtttagggcaatctttatcagggggtgaacgccgtcgtgtagagatagcacgggcgctagcggcaaatcctaaatttattttattggatgagccttttgccggtgttgaccctatttccgttttagatattaagaaaattatccaacatctacgcgattatggcttgggcgtattaattaccgaccataatgtacgcgaaaccttagatgtgtgtgaacgtgcttatatcgtcagtcaaggacaccttattgcccatggttcaccagaagaaattttggcaaatgagcaagttaaacgtgtttacttaggtgaaggcttccgcctgtga

SEQ ID NO: 293842 - DNA, 534 bp, Proteus mirabilis
atgaatcgaaaaatccgtaatacactaattatcagtacgttattctcaataagtgtcccagttatggcacttaaagatgatacacaacaacctattgttgttaattccgagaaacagtcacttaatttagaaaaaaacattaccactttcacacaaaatgttgtggtaaaacaaggctctattgatataagagctgataaagtagtggttacacgtcctggtggcgattctaaaaaaatcgtgattgaagcttttggtaaccctgtgacattctatcagttacaagatgatggtaaaccaatcaaaggtcgtggtgataaaatgacctatgagatggacaaagagctggtgaccttaacaggtaaagcttatcttgaacaattagacagtaatatcaccggtgataaaatcacttatctcgtaccgacacaacaaatggaagcatttagcggtaagggaaaacaagtcaccaccgttttactcccttctcagttacaagagaaaggtcccggtgttaacaacaaaggtaagtaa

SEQ ID NO: 293843 - DNA, 579 bp, Proteus mirabilis
atgaataaattaaaatcctggtttaccctgattttagccattattgctcttgggctgattggctggaactatactaacaatactgagcttgatgatggaaagattgttgaagatggtcaacccacctaccaatctaaatcatcaatatcctttgtttatgaaccaacaggtatactgggatataaactagttgctgatgatgtcaaaaactatgctcagcaaaagtttacatggtttactaatcctgtcttaacgacttattcgccgacaggagatgcaacatggaccgtgcgtgcaaataaagccaaactgacaaacagtaaaatgctctatctttatggcgacgttcaaattgatagtttaactgatgactcccaacttcagcggatcagcacagaaaatgctatcgcagatctggatacacaagatgtttcctctgatgatgaagtgactattatcggcgtcggactgaaatcagtcggcttaaaaatgcgaggcaatctgcgtgaaaaacgtgcagagctgattgaacaggtgaacacctattatgagatccctaatgaatcgaaaaatccgtaa

SEQ ID NO: 293844 - DNA, 558 bp, Proteus mirabilis
atgaatacaatgatagagacctgctacggtgcagtaagcaagcaaataatgcaaaaagcagaaaaagtccaattgctgatttgcgatgttgatggtgtgatgtctgacggacttatttatatgggcaataacggtgaagagttgaaagcgtttaatgtccgtgatggctatggcattcgttgtttacttacatcgggtattgaggtcgctatcattacgggtcgtcaatctaagcttttagaagatagagccaaaacacttggcattacatatctttaccaaggacagcataataagcttttggcgtatcaacaactgttagatacactaaaccttaaaccagaacagacagcctatattggcgatgatctgattgatttaccggtaatggaaaaagtaggactgtcagttgccgttgctgatgcccatccattactcacacctcgtgccgactatgttacccatattttaggtggacgcggtgcagtacgagaattatgtgatttgatcctattagcccaaggtcgacttgaagaagctaaaggtttatcgatttaa

SEQ ID NO: 293845 - DNA, 975 bp, Proteus mirabilis
atgaccggatttgattttcagcaagcaggtaaaaaggttcttcaaattgaacaagaaggattagctgagttagcacaatatatcaatgacgatttttctcttgcctgtgaaaaaatctttcactgtcagggaagagtgattgttatgggcatgggaaaatcaggtcatattgggcataaaattgccgccacctttgccagtaccggcaccccttctttttttgttcaccccggtgaagccagtcatggcgatttaggtatggtgacagaaaaagacattgtgctggcaatttcaaattcaggtgaagccagtgaaattctcgcccttatccctgtcctcaagcgtaaacagatccttttaatttgtatgacacgctcacctcaaagtacaatggggaaagctgctgatattcatctttgtataaaagtccctaaagaagcttgtccgttaggtttagcccctaccaccagcacgacggcaacactggtgatgggagatgccttagctatcgctttattgcgcgctcgaggttttacggcggaagactttgcactatcgcatcccggtggtgcattggggcgcaaattattgcttcatgtcagtgatttaatgaataaagatgatgatattccacgcgtcagcaaagaagcgacattacgcgaagcactggtagagatcacccgtaaaaaattaggtatgaccgttatctgtgatgataatatgttgattaacggtatttttactgatggtgatttgcgtcgtatctttgatttaggtattgatcttaataatgccaaaatatcagatgtaatgacgaaaggcggaattcgcatttccccagatagcttagcggtagaagcgcttaatttaatgcaagcaaaacatatcacttcactgttagtcactgaaccagatagtgatattttattaggtgttttacatatgcacgatttattgcaagctggggttgtttaa

SEQ ID NO: 293846 - DNA, 981 bp, Proteus mirabilis
atgttgattactttgtctcttctcattgttgggttgatgttattagtctatgcatcagaccgactggtgtatggtgcaagtgtgtttgctcaatcattaaagctccctcctgccgttatcggtattgttattgtgggaatgggcacttcattgccggagctttttgttgcaaccgacgcggccatccacaatttacccgagatagcgataggtacagcaataggatcttcattaacgaatctgctactgattgctgggattggagcaatgatttatcccatgaatatccaatctgcggtactaaaaaaagaacttcctttgatgattatagtcatcttattagcaggactggtggtttctaatggtcatctagggttgagagaaggctgtttactttttttcatcggcttcgcctctctttttctaatgataaaaatgctccataaaaccctaacacaagtgcgccatgtgttaccgctagagacactttcacgttttgaattacaaactaatccacgtaattctgttgccctattttgggtggtaattgcattactgataatccctgttgcaacaagaatgatcattgataatgtttttatcatcatgcaacagtatcatctcagcggttttttagttggactaaccttgctatctattggcaccagtttacctgaattagcaacgaccgttgtggctgccttaagacgtgaaaatgaactggctctaggcaatattattggcgctaatatttttaatctcacctttgtgctaggcatgcccgcattactctctcctagcacatttaatatgcaagcattctattttagttttactgtgctggtggtcgcgggcctacttttctcactcttttcattggggcgcaaacagcggctaaaccgtggaaaggggattttcttattagtttgttttattgtttatattacggtgttgtgcgttgcacattctctcttaacctaa

SEQ ID NO: 293847 - DNA, 813 bp, Proteus mirabilis
atgaacgcacaaccagacaatttaattgaagtgcgcaatatgaactttactcgcggtagcagaaagattttttcgcaaatcaatctggatgtgcctagaggaaaagtgactgcaataatggggccttcagggataggtaaaaccaccttattacgcttgatggggggacaaattctgcctgatagtggtgatatttggtttgatggtgacaatattcctaagttatcacgctctgctttatatcagtcaagaaaaaaaatgagtatgctttttcaatcaggcgccctttttactgatatgaatgtatttgaaaatgtcgccttcccattaagagagcatactaatttacccgaggcgttaattcacactaccgtgatgatgaagttagaagcggtagggttaagaggggctgctaatttaatgccatctgaattatcggggggaatggcgcgcagagccgctttagcaagagcgatagcccttgatccagatttaatcatgtttgacgagccattcgttggacaagatcccattaccatgggggtattagtaaaactgattgatgaattaaaccatgcattaggggtcacttgtgtggtggtgtctcatgatgtccctgaagtactgagtattgccgattatgcatatattattgcagaacagaaaatcattgctcagggaagtgcaaaagagctacaggaaaatccagacagacaagtaagacagtttttagatggtattgctgatggacctgtacctttccgttttcctgcggggaactatcaggatgatctattaggacgaggtaattag

SEQ ID NO: 293848 - DNA, 780 bp, Proteus mirabilis
gtggttaatttactagcgcggttaggcgcgcgatcactgtcgatttttgcgacttttggtagagccggcatcatgctatttcgagcattgatcggtaagcctgagtttcgtaagcagtggccattattaatgaagcaactgtacagtgttggtgttcagtcgctactgatcattatggtttctggactttttattggcatggttcttggtttacagggctatctagtactgacgacatttagtgcggaagcgagcctaggtatgatggtggcgctttctttgttacgagagttaggccctgtggtgacagcactattatttgctggacgcgcaggctcagcactgaccgcagaaataggtttaatgaaagcaacagagcagatatccagtttagaaatgatggctgtcgaccctcttagacgagtggttgcgccacgtttttgggccgggtttattagtatgccattactttcactgatctttgttgcggtggggatctggggtggtgctattgtcggcgtggattggaaaggcattgatgaaggctttttctgggcatcaatgcaaggtgcggttgaatggcaaaaagacttagtgaattgttttattaagagtgtcgtgtttgccattaccgtgacttggatagcgctgtttaacggatatgacgcaatcccaacatcggaagggattagcagagcaacaacgcgtaccgttgttcattcatcgttagccgtattaggtttagattttgtgctaactgcactgatgtttgggaattaa

SEQ ID NO: 293849 - DNA, 537 bp, Proteus mirabilis
atgcaaagtaaaaaaattgaagtttgggttggtttatttgttgttattgcactgatagcggttgtctttttaagcttaaaagtggctgatattaaagaggtgggtaatcaacctacttatcgtgtctacgcaagttttggtaatattggtggtttaaaagagcgttcaccggttaaaatcggtggggtggttattggtcgcgttgcctctattaccttaaaagaagagatggaaggtaactatcgtcctgaagttgctctcgatattttaaacatttatgaccatattcctgacagcagttctctttctattcgcacatcaggtttattaggtgaacaatttttggccttaaatctcggcttttatgatgaagatttaggttctgattttctaaaggatggtggcagaattaccaatacccattcagccatggtgcttgaagatttgattggtcagttcctttataaaaccggtgacggagatggaaaaacaacctctgactcaaaaacgcaaactgaacaaccagcattaccttaa

SEQ ID NO: 293850 - DNA, 630 bp, Proteus mirabilis
atgtttaaacgcttattaatggtcgcattattggtgataacaccttttgcgatggcggtcgataaaaccaatccttatgctttgatggaagatgccgcgcaaaaaacctttgataaattaaaaactgagcaaccagaaatccgtaaaaatccggaactgttacgtgagattgttcaacaagagttgttaccttatgtacatatcaaatatgccggagcattagtgttagggccttattatcgtaatgcaacgccggctcagcgtgatgcttactttgccgcttttaaagattatcttgcacaagtatatggtcaagcattagcaatgtatgaagggcaagaatatcgcatagaacccgctaaaccttttgcggataaatcaaacttgactattcgtgtcactattattgataaaaatggtcgaccaccagtacgccttgattttcaatggcgcaagaacagtaaaacgggtgaatggcaagcctatgatatgattgccgaaggcgttagcatgatcaccaccaaacaaaatgagtggtctgatattttaagtgcgaaaggggttgatggtttaactaagcaattagaaattagtgccaaaacaccgattacattagatgagaaaaaatag

SEQ ID NO: 293851 - DNA, 294 bp, Proteus mirabilis
atgtcagcttcgttaaattggcaaaaagagggtgaaatactctcttttcaaggaacgctagatagagaaacgttattgccagtttggcaacaacgtaaagcgttattagctgatattaatatcatcgatatttctcaacttgatcatattgactcaaccggattagcactttttgtccatctaaaggccgaaatggaagcacttgagcgtcaatgtgttattcaaggtgttagtgagcgctttcaaacgctaatcacactctatgatcttgatgaaattatgaatattgcttaa

SEQ ID NO: 293852 - DNA, 255 bp, Proteus mirabilis
atggatacaaatgaaatcaaacaagtattaatggataccctatctttagatgaagtcattgttaatggtgatggcagtcattttcaggttgtggttgttggcgcgatgtttgaaggaatgagcagagtgaaacaacaacaaaccatttatgcccctttgatggaatatatcgcagataatcgtattcacgctttatctattaaagcctacacacctgaagagtggaaaagggatcgtaaactcagcgggctttaa

SEQ ID NO: 293853 - DNA, 1263 bp, Proteus mirabilis
atggataaatttagagtacaagggcctacctgcttatccggtgaggtcactatttcaggcgcaaaaaatgctgcactaccaattctgttcgctgctatccttgccgaagagccagtagaattaaccaatgttcctaagctaaaagatattgataccaccattaagttacttaatcgtttaggtactaaagtcgaacgcaacggctctgtttttgttgatgctcgtcatatcaacgaattttgtgccccctatgaattagttaaaacgatgcgtgcctctatttgggcattagggccattagttgcacgtttcggacgtggtcaggtttctttgccgggtggttgtgcgattggtgcgcgcccagttgatctgcatattacaggtttagagcagcttggtgcggaaattacgctggatgaaggttatgtgaaagcgcgtgttgatggtcgcttaaaaggggcacatattgtaatggataaagtgagcgtaggtgccactattaccattatgactgccgctgttttagcagaaggtaaaaccattattgaaaacgcggcgagagagccagaaattgaagataccgcgaattttcttaataccttaggcgcaaaaatcagtggtgcaggcaccgatagcattactattgaaggggtcgaacgccttggtggtggaacctatcaaattttaccagaccgcattgaaacagggacattcttagtcgcggcggcggtttctcgtggtcgtgttgtttgtcgcaatgctaaaccagatacgcttgatgcggtattagctaaattacgtgaagcgggtgctgatattgaaacgggcgaagactggataagccttgatatgcatggtaaacgtcctaaagcggtcactctgcgtacggcaccacatcctggttttccaaccgatatgcaagctcagtttagtcttttaaatcttgtggctgatggagcaggaatgatcactgaaacgatttttgaaaatcgttttatgcatattcctgaacttatccgtatgggggctcatgctgaaatcgaaagcaatactgtactttgtcatggtgttgataagctttcaggcgctcaagtgatggctaccgatttacgtgcttctgccagcttagtattagccggttgcattgctgaaggtacgacgattgttgatcgtatctatcatatcgaccgtggctatgaaaatattgaagccaaattacagggtttaggggctaaaatcgaacgtctacattctaatgactaa

SEQ ID NO: 293854 - DNA, 1305 bp, Proteus mirabilis
gtgaatgaaatatatgaaatagcctattcagcggcagcaaatagattatgtttgtttacaggaaccggtttttctaaagcactaacgaataacaaagctcttggctggcaatctttacttgaaaaagcctgtgataaattagatggtttaaataaagtcaaaaaatcactttttcccgaagatggaaaaaatccattaagcttagaagaagcggctcaagttatttatattgaatatcaaaaaaaaggagaaaatttacatgaaaagatagcagaaataataaaagaaattcatttatcaaaagataataagcatgtaaagaatttcttagataataattcaataagaataataacaacaaattatgataaacttatcgaagaaatgatcccaataaaaaaatgtcaatctcttgcacctggtttaccaataccaaaagcatcttccagtacaaaaatttatcatgttcatggttctattgattcgcctagtaatatggtagttacttctgatgattattttaaatttataaactataactcttatttttctaagaaaataagctccatgatttatgaaaatacaatcgttatattaggctattctcttggagacactaatcttaaagcaattattaatgagtacaaaaatttctcacgagaaaatgttattggttcctctatgtttttagtatcgagaaagaaagtagaatcttatttaaaagagtattattttcattgttatggcattagagtcattgataatttagatattcatgacttttttgataaattaaattcaaaaattcaagatgtacaaaaaagagtagaagattcgttagagaatatcgaaaaagtactgagtggaaaacacagcttttctaaaagttttctcaaggttgaaaataatttttatgaaataattatgtccttagctgcatttggtgttcttgtgacagatgccaaggcaatgaatatgatagaaaaaataatacaggaaaaaataaaactaacgagcgaaaatagtgcatgggaacaatatgttcatttagcaaattggctaatttatcttgcaacaattatcgaaataaaagatacatccttagaaaaaatatatcttaaagcggtatttcattcgatgaatcatatgagtaaagactattctataggatattcttggcacgcctataaagcatgggaaagtaagtggttttcgcttattgtatcaaatagagtcatgctaaaaaactatgtaagcaaaaacattaataaccaagatgctgttaacttagtgaaaaatctataa

SEQ ID NO: 293855 - DNA, 912 bp, Proteus mirabilis
atgaaaatagaattagccaaaagccttgaattaaatagaaatattacagcagaagaagctgataatttattttcaaaaaaaataataacatcaaaatatctttttgaatgtactgaacctgattgtcatgcccaagtaacttgtgccaatcttgataaaccaaaccgattacgaaaaagagttcctcattttaaatttgtttctgaacatagtgatacatgtaaaatagggatcaatgaagaaaatgaatttcgtagaataaaaaaaatgaaagaagatccagaggctcttccttttattctcgatgatattgttgagcttgatttctcaacaccttataaaactaaatttcatgatatcccttcatcaaaagaggaaaatggcatcaacaaacgcttaaaaacaaaaaatattgatgacgaaaatagtaataaaacacgtcattcaaaaaagcgtttatcaggactcgttaatgattttatcgataaaaaaaatttctttctcaatattgcagaaggaaagatccatttaagagatttcttcatttatattaatgataaaaaagatctaagcgaatatgtagatgaacctcgaatatacttcggtaaagcttggattaaacgtatagataattattaccttgtccgttttgataaaaaaatgaaaaaaggtgacttaatttgcaagccaacattttttatttctgaacgtcttgtaaataaatcagagtataaaagaacctctcggcaagaattagataaaatagcactatcaacaccgccaaaacctctttatttatttatatttagtgaattaccacctgtaaaaatgaataatggtgattttatcaatttcaaattagatgacttaacatacttatattacaaaacatggggtaaaaaaagtgaatga

SEQ ID NO: 293856 - DNA, 867 bp, Proteus mirabilis
atggctatcgcacgccaggacgtgaatatttcctcaccggaagctacaacttctgatgcacaatctaccgctaatcccactgtcttagtttttgactcaggggttggcggtttatctatttatcgagagatccgtgaaaaactgccggatgctcactatatctatgttttcgataatgaagcatttccttatggtgagaaaccacaagagtttattattgagcgtgtcgttcgtatcgtcagtgctgtcgcgcaacagcatgagttagcagcgattgtgatcgcttgtaataccgcaagtacagtaagtctgcctgctttacgtgctaaatttactgatatccccattgttggtgttgttcctgcgattaaacctgcagcaaaacttacctgtaatggtgtggtcggtctattagccacaagagcaacggttaagcgaccttatactcatgaacttatcgaacgctttgcgacggagtgtaaagtgcatctattaggttcagcagagctggtggagttggctgaaaaaaaactgcatggcgaaaaggtgtcatgcgatgagctacgtagaattttagccccttggcttaaaatgaaagagccaccagatacggtagtattagggtgtacccatttccctctattagaagaagagttactttctgttttgcctgatggtactcgaattattgattctggtggtgcaattgcaagaagaactgcgtggttagttgtaaatcaagataaaatcagaggttcaaaagaaattagttttgcttactgtcttaaagaagatgagtatagtgaattattaaaaccggttttagccgattttggctttaaaacgctcagaaaattggcgctttaa

SEQ ID NO: 293857 - DNA, 1854 bp, Proteus mirabilis
atgaataataaaaaagtattttttctttcaagtgttgctttaagtgttatgacgagcagtttcaacctatttgcacaggctgataatacattgagtgtgactgctaatcgttttcaacaacctacctcctctattttagcgccagtgactattgttgatcgtgaacagatcgatcgctggcagagcaatagtgtgcttgatgtattgcgtagaatgccagggattgatgtagcacaaagtggtggtatagggcagatgagttcagtctttgtgcgaggaactgactcaagacatgtattaatattaattgatggtgtacgtactaaccaagcagggatttctggctcttacgatatgagtcaactgcctctttctttagtacaacgtattgaatatataagaggccctcgttcggctgtttatggctccgatgcgattggtggggtcattaattttataacgaaacgccaaaatgatggtttaacgttaaatgcaggaataggaagccatggatatcaaaattacaatggttcaatacaacaaaaggtaggtgagagaaccacattatctgcggcaggtggatatacttatactaagggaatacatgcaacggatgattctgtccctgttgccgccccttttcatgacagacatggatttatgaataaatcctattggtttggtatcgaccatatttttaatgataactttcaaggctacatgaaagggtatggttatgataatcgtactacttatgttgcatcttatcccggtaatacagatcaaagtaaaacttataatcgtaattatgaagcgggtattaagttcagtggtgattcctattttagtcaattaattacggtgtatagccaaactaaagactataactacatttcaacaaatggccgtgatggtaagggctcttctgtagataattctaaacaatataatgtccaatgggggaacacctttttaattccaagtggcatgatcagcgctggaatggattggcaaagacaaactattgaagcgaattcagcatcagtacctcatcaaagaacaattgataatactgggctatatctcacatctcaaaaacaacttagttcagttatcgttgaaggcgctattcgttctgatcaccacgatgaatttaactggcatactacatggcaaaccagtgcaagttgggagtttgttgataactatcgagtaattgcttcttatggtacggcatttaaggctcctacattagggcaactttatgcggataatcctgcatggaacacaaaaggtaatcccaatttaaaaccagagaaaagtaagcagtgggaagtgggcgttgaagggttaactcaagggattgattggcgtttatctctatatcaaaatgatattgataatctgattgcttttagagataacgcttatattaattacaataaagctaaaataaaaggtgctgaatgggttggtgagatggatactggatcattacatcatcaattaacattgcagtaccttgatgctagagatagtgataataatctattaagcagaagagcaaagcaacagcttaagtatcaagtagattggaatatcgcagatatagatattggaattaattatcaatatataggaaagcgctatgatacggactttaaccaatatcctacgaaaagaataaaactaggtggggtaagtctttgggatttaactgcgtcatatcctattacatctcatctctcaattcgtggtagaatagccaacctgtttgataaagattatgagacagcttatggctatcgcacgccaggacgtgaatatttcctcaccggaagctacaacttctga

SEQ ID NO: 293858 - DNA, 1098 bp, Proteus mirabilis
atgcaaaattcattaccaacgcaaacataccagtctcaactgaatgaaaagaccgaacgcctacaaaagatgatggcaccttttaatgcgcctaatgtggaagttttttcatcaccagaacaacattatcgtatgcgtgcagaatttcgcatctggcatgagcaggacgctctgtatcatattatgtttgatcaagagactaagcagcgtatccgcgttgaccaatttccagtggcgagtcagctgattaatcagatgatggtagctttattggcagaaataaaagataaaccagcactgcgccataaattatttcaaattgattatctttcaaccttaagcaataaaatcattgtatcgttgttatatcacaaaaaaattgatgagacttggcaacaagaagcgacagcattacgccaaacattaattgctcaggggtttgatgtgcaattaattggccgtgcatataaaactaaaattatgctcgataatgattttgtcgatgaaatattacctgttgctggtcaacagatgatctatcgtcaagtggaaaatagctttacccaacctaatgcacaggtcaatattaagatgttggaatgggcactatcagtcactgaaaactcaaccggtgatctgttagagctttattgcggtaacggcaatttctctctcgcccttgcacgtaattttaagcgagtgctagccactgagatagcgaagccttcagtgcatgcagcgcaatataatatcgcgatgaaccatattgataatgttaaaattattcgtatgtcagcggaagattttactcaagcaatgaatggcgtaagggaatttaaacgcttagaagggattaatctacaagattaccaatgtgaaactatttttgttgacccaccacgcagtggtttggatgagaaaactgttgagttggttaagaattactcgcgcattttatatatctcttgtaatccgcagactctgtgccagaatttagaaacgctgatcaaaactcataaaatcagcaagttagcactttttgaccaattcccttacacccatcatatggaatgtggtgtgttattagagaaaagataa

SEQ ID NO: 293859 - DNA, 402 bp, Proteus mirabilis
atggaacaaaatcgctgtgaaaaaagcacactattactttccgtagttatcggtgttgctttacatggtagttactcaactttatttaacccacttactggaccttggtctatttttccactgattagtttagttctagctgtttactgcttataccaacgttatttaaatcaaccaatgactgatggtatgcctaagttaattttctcattctttttattagggctatttggttacaatgcatatttaaaaacctctaaccctgaaatgggctctaacttcttctcttctgtatgtattgtgattattgctctatggatttatcgtcaaattaaacagcgtaaacgtctacgtgaacaggaagaagacgctgagaaagcatcgcaagcagagcaatattaa

SEQ ID NO: 293860 - DNA, 681 bp, Proteus mirabilis
gtgagtaataatattggcatcagagcgaaacaaaaagaaaaaacccgccgttctttgattgaagcagcttttagccaactcagtgcagaacgtagttttactagcctaagcttacgagaagtggcgcgagaagcgggtattgcacctacctcattttatcgtcattttaaagatgttgatgagttggggttaactatggtcgatgaaagtggactgatgctacgtcaattgatgcgacaagcacgacagcgtattgctaaaggtggaagtgtgatccgtacatcggtttctacctttatggaatttattggtaataatccgaatgcttttcgattattgttacgtgaacgctctggcacatctgctgaatttcgtgccgctgtcgcacgagagatccaacattttattgcagaactggcagactatcttgagcaagaaagtaatatgccacgttattttactgaaatgcaggctgaagcgatggtgactatcgtatttagtgcaggggcagaagcattagatattgatattgaaaaacgccaacaattagaagaaagattagtaatacaactacggatgattgccaaaggcgcttactattggtatcgacgtgatttagaaacacctctacaaaataaccccgaaataaagaaaaaaatgcatcagaaaggagataaatga

SEQ ID NO: 293861 - DNA, 1398 bp, Proteus mirabilis
atgcaacattctcatttcgatgcaattgtaatcggttcaggtcctggtggtgaaggcgcggccatggggctggttaaacaaggaaaacgcgtcgccgtcattgaacgttatgatcaagtcggtggtggttgtactcactggggaactatcccttcaaaagctctacgccacgcggtcagtcgtattatcgagtttaatcaaaacccgctctatagcgaccaatctcgcctgatcaactcctctttttctcaaatactacgccaagccagcacggtaatcagtcaacagactaaaatgcgtcaaggcttctacgagcgtaatcattgtacgatgtattcaggcgaagctgcttttattgatgatcatagaattagcgtacgttatcctgatggtacttgtgatattctcagtgcagataattttattattgccacaggctctcgcccttattgcccaccggatgttgatttctcacactctcgtatttataacagcgataccatactcgaccttgagcatgaacctcgccatgtcattatttatggtgctggggtcattggttgtgaatacgcttctatttttagaggtctaagagtaaaagttgatttaattaatactcgtgatcatctactgtcattccttgatcaagaaatgtcagatgcactctcttaccatttttggaataacggtattgttattcgacacaatgaagagtacgacaccatcgaaggcgttgatgatggcgttattgttcatctaaaatccggtaagaaagtcaaagccgattgtctgctttatgctaatggtagaacgggtaataccgatacgcttggtttagaaaatgttgggatcaaaaccgatagccgtggacaagtggcagttaatgcgcattatcaaaccagttgtgaacatatctatgcagtaggtgatgtgattggctatccaagcttagcctctgcggcttatgatcaagggcgcattgcggcacttgcgcttaccacaggcacctcggaaacgcatttaattgaagatattccaacgggtatctataccattccagaaatcagctctgtgggtaaaacggaacagcaactcaccgcaatgaagatcccctatgaggtcggtcgttcacaatttaagcatcttgctagggcccaaattgcaggtatgaatgtcggtagcttaaaaattctttttcaccgtgaaaccaagcaaattttaggtattcactgctttggcgagcgcgctgctgaaataattcatatcggccaagcaattatggagcaaaaaggagaaggcaatactatcgaatacttcgttaataccaccttcaactacccaaccatggcggaagcctatcgtgttgctgctttaaatggtttaaatcgcttattttga

SEQ ID NO: 293862 - DNA, 918 bp, Proteus mirabilis
atgaatatccgtgatttggaatatctggtggctctagctgagcataaacattttcgccgtgcggcagattcttgccatgtgagccagccaacattaagtggccaaattcgtaaacttgaggacgaattaggcgttatgttacttgaaagaaccagtcgcaaagtactgtttacccagcagggattattgctagtagagcaagcgaaaacggtattacgtgaagtgaaagtgctacaagaaatggcatcactacaaggtgagagtatggcagggccgttacatattgggcttattcctactgttggaccttatttattaccgcatattattcccgaattacatagaaactaccctaagttagagatgtatcttcacgaagcacaaaccaatagcttattagctcagttagatagcggtaaactcgactgtgctattttagccatggtaaaagagagtgccccttttatagaagtgcctttgtttgaagagccgatgaaattagctatttatgatgagcatccatggcatgatcgcaaatcagtgccgatgggggacttagcaggccaacgtttattaatgttagaagatgggcattgcttacgtgatcaagctttaggtttttgtttccaagcaggggctaaagaagatacccattttagagcaactagtttagaaacattgcgtaatatggtcgctgcaggaagtggtattacacttttacctgatttagcggtacctcaagcacaaaaacgcgatggcgtttgctatttagattgtacttcacctaatccatcacgttctattattttggcttatcgccccggatcgcctttgcgtaatcgttatgaacaattagcagagacaatccgtgatcatatgaccgcattttatgaggctaagaaagcagcatcaaaataa

SEQ ID NO: 293863 - DNA, 1383 bp, Proteus mirabilis
atggcactttggggtggacgttttagtcagcaagctgatcaacggtttaaacaattcaatgattcactgcggtttgactatcgactcgcacaacaagatatctttggttcagtagcttggtctaaagcgttagtcacagtaggtgtcttatcgcaggatgaacaagctcaacttgaacaggcactttatgaactgtctgaggaagtaacagctaatccccattctattttacaaagtgatgcggaagatattcatagttgggtagagagtaaactgattgccaaagtgggtgatttaggtaagaagttgcacactggacgtagccgtaatgatcaggtcgcgacagatttaaaattgtggtgtaaagaagaagtcgcccacttacgtcaggctattattgaattacaaaaggcgttagtggtaaccgctgagcaaaatcaacatgctgtgatgcccggttatactcatttacaacgtgctcaacccgtcacttttgcgcattggtgtttagcttataaagagatgttagcaagagatgagagtcgtttagcggatgcattaacgcgtttagatgtaagtccactgggtagtggcgctttggcgggtaccgcttatgatattgatcgtgaacaattagctcaatggttgggttttgccagtgcaacaaacaatagtttagatagcgtatcagatagagatcatgtgttagagctattatctgcggccgctattggtatggtgcatctttctcgttttgctgaagatttgattttctttaatagtggggaagcaggttttattgagctttcagataaagtcacttctggctcttcattaatgccacagaagaaaaatcctgatgcattagaacttattcgtggtaagtgcgggcgtgtacaaggggcattaaccgcaatgatgatgactctaaaagggttgcctcttgcttataataaagatatgcaagaagacaaagaagggctgtttgatgccgttgatacttggtctgattgtttgcatatggcaacattagtgcttgatgggttgcaggttcgccgccctcgttgtgaagaggccgcaaaacaaggttatgccaatgcgacagagcttgctgattatttagtcgcaaaaggggtgccatttcgccaagctcaccatattgtcggtgaagttgttgttagtgcaattgagcaaggtaaagcgcttgaagagttggcgctatctgaattacagaagtttagtagcaaaattaccgttgaagtttacgagatcctttcattgcaatcttgtttagataaacgattagcaaaaggtggggtatctcaacagcaggtttcttatgccattactgaggccaaaaaacagcttaatatggatgagtag

SEQ ID NO: 293864 - DNA, 1212 bp, Proteus mirabilis
atgacaaaaggtattaaaaaaattgtactggcatattcaggtggtctagacacatcggctatcatcccttggttaaaagagcattatgacaattgcgaggtggttgcgtttgttgctgatgtgggacaaagccgtgaagatctggaaggtgtagagcaaaaagcattggcgtcaggggccagtgaatgctatgtggttgatttacgagaagagtttattaaagactatgtgtatccagtattaaaaacaggggcattatatgaagagagctatttgttaggcacttcaatggcacgccctgtgattgcgaaagcacaagttgaattggcattaaaactcggggctgatgccttggcgcatggcgcaacaggtaaaggtaatgaccaagttcgttttgaaagtacttataccgcactggcaccgcaacttaaagtggttgcaccttggagagagtgggacttgcgctcccgtgaagccctactggattatctaaaagttcgtcatattccaaccacggcgacacttgagaaaatttatagtcgtgatgaaaacgcatggcatatctcaacagaaggcggagtgttagaaagtccatggaatgcctctaatgaagattgctgggcatggacggtagatccgaaaaaagcccctgatacacctgaacaggtttctgtaacggtaaaagcaggtgaagtggttgctatcaatggcaaagctcaatccccttatgagtgtttagctacattaaatacgctaggtgtaaaacacggtattggtcgtattgatattgtggaaaatcgtctggtcggtatgaaatctcgcggttgctatgaaaccccaggaggcaccattatgatggcggcactgcgtggtgttgagcaactggttttggatagagatgcttttaaatggcgtcaacagttgggtttagagatgtcttatgttgtttatgacggtcgttggtttacgccaattcgggcttcattacaagctgctgctgactcgctggcaacagaggtaaatggcgaagtggtgttagagctttataaaggccatgtgaatgctattcagaaaaaatctgacaacagcctctactcggaagagttcgccacctttggtgaagatgaagtctatgatcacagccatgcagaagggtttatccgcctatactctttgccatcacgtattcgggcattaagtaaaaagaaataa

SEQ ID NO: 293865 - DNA, 774 bp, Proteus mirabilis
atggaaccattaattatcaaactaggcggtgtactgctagataacgaaaaagcgttaacacgtttttttacagcactacaagaatatcgcactagtcatagccgtccattagtgattgttcatggtggtggctgtttggttgattctctgatgaaaaagctgcaattgcccgttgttaaaaaacaaggcctacgagttacccccgccgatcaaattgacattattactggcgcgttggcaggaagtgccaataaaacattgctgtcatgggccacacgctttggtttaaatggtgtcggactttgtttgggcgatggtcaattagccaaagtaacaaaaattagtgatgagctaggtcatgtgggaaatgctgaacctggctctcctgagttattaaatctattactgaatgcagggtatctcccgattattagttctataggtgtgagcatccaaggtgaactgatgaatgttaatgctgaccaagcggcaacagcgattgctgaaaccttaggagcagatttggtgttgctctcagatgtaagtggcattttggatggtaaaggacaaaaactcacagaaatatctgccacaaaagcgcaagcattaatcgaccaaggcattatcaccgacggcatgattgttaaagttaatgctgcgttagaagcggcaaaaacgcttagacgtcctgttgaaatagccagttggcgtcacgcggaaaaactgactgatttatttaatggtatggcgatcgggacacgtattttagcttaa

SEQ ID NO: 293866 - DNA, 1005 bp, Proteus mirabilis
atgttaaatactctgattgtaggagcaagtggttacaccggtgctgaattagcagcctatcttcagcagcatccccatgtaaatttgagcagactgatggtatccgctcaaagtgtagatgcagggaagtgcttttctgagctttacccacaatatcgtggcttagttgatttgccacttgagcctatggtcgatgttgctaatgccgctaaaaatatcgatatcgtttttttagccaccgcacatgaagtcagtcatgacattgctcctatttttctcgctcaggggtgtgtggtgttcgatttatctggcgcctaccgagtacaaaataagcatttctatcaacaatactatggattcgagcataagaatactgattggttatcacaggcggtttatggtcttgccgaatggaacgctgatcagattagtcaggctcaacttattgctgtgccgggttgttatcccaccgtttctcagctgtcgttaaagccattagttgaagcgggattattagacagcactcactggcctgttatcaatgccaccagcggtgtaagtggcgcaggcagaaaagcgtctttaacaaacagcttttgtgaagtgagtttacaaccttacggtgtttttacgcatcgtcaccaaccggaaattgctactcaccttggcattgatgtcatttttactcctcatcttggtaattttgctagggggatcttagccactatcacctgtaagttaaaacaaggtgtcacagaaaatgaggtaaggcaggcatttgaaacagcgtatcaagaccaaccgttggtgcgtatgtatgacaaaggtctacctgcattaaaagccgttgtcggtaccgccttttgtgatatcgggttagcacaacaaggtgagcatttaattattgtcggtgcggaagataacttattaaaaggggccgcagcacaagcggtgcaatgtatgaacattcggttcggttttgcaccaaccgaaacacttatctaa

SEQ ID NO: 293867 - DNA, 1164 bp, Proteus mirabilis
gtgaatattaaattacctacatttattgagctttatcgacaattaattgcaacaccctcaattagtgcaacagatgctaagacagaccaaagtaacgaggcactgattaatctgttggctaattggttggaaacactcggtttttcaattgaaatacaaccagtacctgaaaccagagggaaatttaacctacttgctacccttggcagtggaaccggcgggttattactctgtggacatacggatacggtgccatttgatgaagggcgttggactcaagatccctttaccctaacggaaaaagaaggcaagttatatggtttaggtacggcagatatgaaaggcttttttgcctttattattgatgcattgcgagatatagatacctctcaactcacacatcctctgtatattcttgctacagcagatgaagaaacgtcgatggctggtgcacgttattttgccgctaataccgctattcgtcctgattttgctattattggcgaacccacctcattacaaccaatacgtgctcacaaagggcatttatctaatgctatccgtattactgggcaatccggtcactctagtgatccggaaaaaggtgtcaacgctattgagttaatgcatgaatctatcacccatctcagtacactgcgcgatagattaaaaacccgttataacaatccggcgtttgttattccctatcccaccatgaactttggttatattaacggtggtgatgctgctaatagaatttgtgcttgctgtgaattacatatggatattcgcccattaccgggattaacgctgcaagatcttgatgatctgctgcacgaaacattagccccggtaaaagcgcgctggccgggacgtttaagtgtcgaagcattgcacgagcctattcccggctacgagtgtccgaccgatcataaaatggttgccgtgattgaaaaactactgggtgaaaaagcgcaaactgttaattactgtaccgaagcaccttttattcaagcgctatgccctacgctagtgcttggtcctggctccattgaacaagcccaccagcctgatgagtttattgatatggcttttattgagccaactcgtgaattaatggggcaattaattgaaaacttttgtttagcagagaaagcgaaataa

SEQ ID NO: 293868 - DNA, 1725 bp, Proteus mirabilis
atgagtaagcaaacagttgcaacctatattgctaaagtgctccataatgcaggtgtgaaacgtatttggggggtgacgggcgattcattgaatggattaagtgatagcttgcgcaaaatgggtaccattgaatggatgggcacacgccatgaagaagtcgcggcttttgccgccggagcagaagcggctatcaatggtgaattagccgtttgtgccggctcctgtggaccaggtaacttacacttaattaatggactttttgattgtcatcgtaatcatgttcccgtgttagcgattgccgctcatattccctctgctgaaattggtagtaattactttcaagaaactcatcctcaagagttatttcgtgaatgtagtcactattgtgaattagtctctaatcccgatcagatcccacaaattctggctatcgctatgcgcaccgctattttgaaaaagggtgttgcggtggtggtattacccggtgatgtagcgttaaaacccgctccagaagatgcccatgaaaattggtatccactacaatcaccactgattatgccgaatcgttttgaaatcgaaaaactgtctgaggcactgaataacgctaaaaatatcaccttaatgtgtggtgccggttgtgctcaagcacatgatgaagtggtgaaactagcacaaaccttaaaagcccctgttgtgcatgcactacgtgggaaagagtatcttgagtggaataatccatgtagcgtgggaatgacgggtcttatcggtttttcatcgggttatcacgcaatggagaatgccgatactttagtgctgttaggtactcaattcccttatcgcgctttctatcctgccaaagctaatattattcaaattgaccttaatccaagtagtattggctcacattgccatgtggatatggcttttgttggagatgtcaaagcaacccttaatgcattacaaccgcgattaaaagagaaaacagataccgcacatcttgatgcctcgttaaaacattatgctaaagcacgcaaagatttagatgcattggctcaacctagtgagcgtgagttgatccaccctcagtatttagcacgtcgattaagtgaattagccaacgatgatgcggtatttacctgtgatgttggtacgccaacagtttgggcagcacgttacgtgaaaatgaatggtaaacgtcgtttaattggttcgtttaaccatggctcaatggcgaatgcgatggcgcaagctattggtattcaagcactggacagaaaacgtcaagttgtggcgatgtgcggtgacggtggttttaccatgttaatgggtgatttcatctcattggctcaaatgaacttaccggtgaaagtggtgatttttaataacagcgtattaggttttgtggcgatggaaatgaaagcggggggctatttgactgatggcaccgatttacataatcctgattttgccgctattgccaatgcgtcgggaattaaaggtattcgcgttgagaaaggcgaagatcttgatgaagcattaaaaacagcctttgaacatgatggccctgttattgtggatgtggtaaccgcaaaacaagagctttccatgcctccggaaattaaatttgagcaggccaaaggttttagcttgtatatgatgaaagcgattattaatggtcgtggcgatgaaatagtgcaattagcgaaaaccaactggttgcgctaa

SEQ ID NO: 293869 - DNA, 822 bp, Proteus mirabilis
atggacaaaagtagaagtccgataaaggttttctttattagtattctggcagtccttttcttaatttttatttcacaatatgtgattggtaaaaaagaaattaagattggcattgcagtcattcctattctaccaatgttatttgcagttattattggtatgtttatgtcggctggatttacccgcaaaaaaattaaagtttggggtaaattatttacagaaaaagaagaaggcttctgcggtaaaatggtaggtttcagcctacttattttaggtacgcaatatgctggcatgatcgtcccaaatataaaaatgattttaagtgtcggtattcctttatttgttcaagagctaggaaacttattaccagtattaattgccgtaccattagccattaaatttggttttggtcgccgtgcaattggtgcatgttcatctattagtcgagaaccttctatcgccgttattcaaggtagatttgggactggctcacaagaatatattggtgtattagctatttacttatgtggttctgttatcgggactttatggtttagcgtattaggtagtcttgcaccattaacaggcttacacccacttgctctagcagcaggctccggcgtaggttcaggttcaatgttaagtgctgcatcaggggcattaattaacggtttagacgaagctttagcacaacaagtattaagtgttgcggctgcatctaacttattatcttctgcacttggcgcactctcattaacctatttaggtttacctctttcagaaaaaatttataaagttttcaccagaggcaaaactgcatga

SEQ ID NO: 293870 - DNA, 450 bp, Proteus mirabilis
atgaaaaatataattatagatatgaaattagtattcgttgctattttactggcaatgtttactcaaacgttaacatcagggattgctatttatgcaatgtgggatagctttattgctatgtctgtagtggtttttatttcactcgttgctaaacaatatttaccttcatctctaccaacatttgcttatgcaactattatcgggatacttatttgtttacctgaaacacctgtaagagagttttttattagttctattggtaaagtctctttcttatcttgttgtgtacctttattagcatttgctggtttatccgttggtggccaattagaagaactgaagaaaatgtcatggaaagtgatccttattttcatgattgtttctacctgctgtttcttcggcgcatcaatcgtcgcacaaattggatttactatccagggagttatctaa

SEQ ID NO: 293871 - DNA, 1182 bp, Proteus mirabilis
atgaataatatttataatgtcagcgaaaaactctttcaattaaatgactttagtaaaaaaacacgacaagatctgcacaaaattcctgagttatcaggtgaagaatataaaacatcaaagtattgccgtgaattgatggaaagctttggctatcaaattaaaacctttgatggctatactggatttactgccgatttaattgttaatgctgattttccactaattgccatccgtgcagatatggatggattagaaatgccagacttaacgaacaacgaacacagctctatccatcaaggttgtgcacataattgtggtcacgatactcatatgaccattgcattaacggccgctaaataccttgctgaaaaccaagcagaaatgagcgctaatgtgcgttttattttccaaatggcagaagaggatatgcgtgttcctggtgctgacaaaatggttgagttaggttgcatggaaggcgttgatgaaacttacgcactacataatgatgcagctatcgaaaccggttgtgtacgttttaatgatggtgtcatgtcatcttacggctcagcatggacattagatgtttatggtgtttctgcgcacggatctacaccgcataaaggtttagatgctattcgtgaagcaactcgcttaattgattatatggattatgtggttgccaaaaaaactgatccctttagccctgcggtatttggttgcggcatgatcaatggcggtactattcctaatgcgttagcagatcacgttcaagcccgtggtactatccgctctatggatgaaaataccgacaaagtattaaaagaaagttttaatgaaatcgtagcacgcagtacagcgggtggatttaaaacaacattaacagcgacaggctaccctgctgttattaaccatcctacggcttatcagcgtttactagaagccactcgccaatttttaccagaagagaatatcgaatctaacggtaaaccaatgacgggtagtgaagactttagctatatggtgaatgccactaaaggtaaagttggcgcaatgttctttttaggcagtggtaatcaagctaaaggtatcaataactaccttcatgctaatccttattttgttgatgatgattgcttattagtgggtgcacagatttttgttaatctgctaactcgcaaataa

SEQ ID NO: 293872 - DNA, 1014 bp, Proteus mirabilis
atgaatattaatcaactgaaaagctttgttgaagtagtgcgaaatgactttaacattacgaatgcggcagagaaactctatacctcacaaccaacgattagtaagcaacttaagatattagaagacgaactcagtgtttctttattcgtccgtaaaaataataatttattagcacttagtcctatggggaaagaggtccataaaatagctagcgatattcttgggcaggttgataaaattaaaagtattgtggcagaagaagatcgtaataaaaaagtagatttgcacattgccacaacacatacgcaaatacgttactccttacccaacgtcattgatcattttcgccgctattaccctaatatttcactccattttcaccaaggtgctcctgctcagttagcagaaatggtaaaaaatggcgatgtcgattttgcgattgccacagaatcgatgcatttatatgaagatttaattactttgccttgctatcgctggactcgcagtttattagtaccttatgatcaccctcttgcatcattacctgatgatcaacaggttaccattgaacaacttggccaatatccccttattacctatgtgtttggtttcactcgaggctctaaactcgataaagtgttttataaaaaccatcttaaacctcaagtggcattgacggcgacagataccgaaattattaaatattatgtcaagcgccaccttggtattggtgtgattgccacggttgcttatgatgaaatagaagatagccaagcattaaagtgcatcaatatcgatcacttagtacagcccagttatacacatatatgtctaagtaaacatacgcatatgaaagattatatgcatgagtttatttcactctatgctccgcatattgatagaaatattattcagatgccagagcagtgggaaacccagtggcatagcaaagaagtgtatcaggggttacctgatctgatttcggtaaatagcaaagagaaaataatagaataa

SEQ ID NO: 293873 - DNA, 1503 bp, Proteus mirabilis
atgaaattgaagaaaaaaagaaacaaaccattaagaatcaatgatataaccattattgatgatagcaaacttaaaaaagccattactgcggcagcgttaggtaatgcaatggagtggtttgattttggtgtatatggcttcttggcttatgtattaggtcaagtgtttttccctggtgcatcacctggcgtacaaatgatcgcagcacttgcgacattctcagtcccattccttgttagaccattaggtggggttgtatttggtatgttgggggataagtttggacgacaaaaagtcttatctgtcaccatcataattatggcactaagtacttttgctatcggtcttattcctgggtatgacaccattgggatttgggcacccgtcttactgttattagcaaaactagcccaaggcttctcaattggtggtgagtactcaggtgcggcgattttcgttgccgaatattcaccagaccgtaaacggggctttatgggaagctggttagatttcggctctattgccggcttcgttatgggggcgggtgttgttgtccttatctcaaccattatgggtgaagctgcattccatgagtggggatggcgtattccattcttcttggcattacctttaggtctgattggcttatatttacgtcatgccttagaagaaaccccggcattccaacaacatgttgatgaaatgaacagcgatgatcgtaaatctatcgaaaatccgccacgtgtttcattacgagaaatcgcttccaagtattggaaaagtttaacggtatgtgtgggcttagtgattgcgaccaacgtcacctactacatgttgctaacctatatgccaagttatttatcccataacttaaattattccgccgatcatggggtcttgatcatcatcgcgattatgatagggatgctatttgttcagcctgtgattggattactgagtgataaaattggtcgtaaaccttttgttatcgggggtagcgttggactgtttatattggcatatccggcctttatgatgattaacagtgatgaaatcggcttaattttcttaggattattaattcttgcggttttattaaactgttttactggggtgatggcctctattttaccggctattttcccaacccatattcgttatagtgccttagctattgcatttaatatctcggtattaattgccggtgccacaccaactgcagcggcttggttagttgaagcgactggcaatttatatatgcccgcctattatctaatggtagttgctgttgtcggtttgataacgggtataaaaatgattgaaacagccaacaaaccattacgcggagcaacaccggcagcatcagataaatcagaagcgaaagagattttatctgagcactatgacaatatcgaacaacgtgttgaagatatcgaagcggaaattgaagcattacagaaaaaacgccaagcgcttatcgatcaacatccaaaattagattaa

SEQ ID NO: 293874 - DNA, 1431 bp, Proteus mirabilis
atgcactcagcgcctgttcatttagtttggttccgtcatgatctaagagtgaccgataataaagcgctcttttatgcttgccaaaatacacaggcgcaggtgcatgccatttttaccgtcacgcctgcacagtggaaagcccatcatatggctttatcacagcaggcgtttattcatgatgcattgcttaatctttcccatgcgctagctaaattaaatattccactgacacttatcatcagtgatacatatgctgatgcggcacaaagtattgtggattattgtcagcaacatcaggtcactgcgctattttttaatcatcaatatgcgcttaatgagcaaaaccgtgataaaaaagtaatggaattactcgcccataacaccacggtttattgttaccacgataacgtttttgtgccaccggggaatgtcgtgacccaacaaggagagatgtacaaagtctttactccttttagaaccgcatttttacggctatttctgtcgcaagataatgcttcattaccagcccccgaaataagagcacaccaaaaagccgtttcaccgttaagtgcaccactttttgcactaccaatatcatcaaccaagatgttcccagcaagcgaacaagcagcgttacagcgtttaaaacagttctgctatgaaagggtgatacattatgcaaaatggcgagatattcctgctattgatggaaccagtcaattatccccttatcttgccataggcctagtgtctgtgcgccaatgttttaatcgcctttaccaaacagagcctgatttcttagaaaataaccattccagtgcatttgtttggtttaatgagttagtttggcgcgagttttatcaacatctaatagttgctaacccgagtttatccaaacagatagcttttcaaccatggacagaaaatattcgctggcgtaatgaccaaactgaatttaccgcttggacacagggcttaacaggctttcctattattgatgccgcgatgcgacaactgaatcaaaccggctggatgcacaatcgcttacgtatgctgacggcaagttttttagtcaaagatctattaattgattggcgctggggggaaaattattttatgtcacaattaattgatggtgatttcgcgtcaaataatggtggctggcaatgggcagcatcaacaggtactgatgctgtgccttattttcgtatttttaatccgaccacccaaggacgtaagtttgatcctgatggtgagtttatccgccactggctaccagagcttgctgatgtcccagatcgcgatatccatactccttctgaatgggcaatcaaaacaggtcactacctcgattatccacagccaattgttgatcacgccaaagcacgagtaactgcaattgcgtcttatgaagaggccaaaaaaaggtaa

SEQ ID NO: 293875 - DNA, 984 bp, Proteus mirabilis
gtgaaaacaccgattatttctgttatcgttcctatgtttaatgaggcatctcgcattacgcgattattagagagcctactttgccaaacctttcacgactttgaagtgatcattataaatgatggctcaacggataatagtgttgacatcgctatgctctattgccaacaagataatcgttttcacctttatcaccaaactaaccaagggttatctagcgcgagaaatactggcttaaaatatgctcaaggtgattggatagtcttttttgatagcgatgattttattaaacctcaattactggcacattggcatcaattagccagcgaacaacatatcgatgtattaattggcaatggtgaacgctatgatgtacataatccacaaaagcatcaaactaccatccaccaacgtcaaccttatcaacaagtgatcagcggccaagagtgggtgatccatgccgttacgcaacatcaatggccacattttgtttggttacaatttattcgccacgaaataatcaaaaaacatcacctacgctttattgatggcctttatcatgaagatattttgtggacgacacaacttgcactggtcactcaacgtatcggctttgatgatcaacctctttattactattgcgctaatcctaactctattacgcgtaaacctaatccacaaaaagaagccaagcgcgcacaaagttatttgcaaattgttatacaactcttgcagcttgcagataaacaacatcaaccactattagccaacgcgttgcgccaacaagcactacgtgaacttggcagtttctttattctttttcgtaaacgctgtgatacaaaaaaccaaaccatcattgcacagcaatttaggacttatcacctctttccagcccttaataaaggcgcccaaaattggcatcaacgttggtttatttgccgtgtttattgcgttctttattggcatcgttggaaaaaaagataa

SEQ ID NO: 293876 - DNA, 2637 bp, Proteus mirabilis
atgaatcaacaatattctgctatgcgtagtaatgtcagcatgcttggcaaactactcggcgacacgataaaagaggcactcggtgaagaaattttagataaagtggaatctatccgaaagttatctaagtcatcacgagcaggtaatgaagttcagcgacaaaagctactattaaccttacaaaatctctctaatgatgagttattacctgttgctagagcattcaaccaattcttaaacctgactaatgtagcagagcaataccatagcatttctcctcatggcgaggcggcaagtaatcctgtggcattggctaaattaattgaacggctgaaagataaaaattttactaatcagcaactcaaacaagccgttgaacaaatttcgattgaattagtcttaacggctcatccaacggaaattgctcgccgtacgcttattcataagctagtggaagtcaatacttgcttatctcagcttgatcatgatgatcttgccgattatgaacgtaccaatattatgcgccgtttacgccaattggttgcgcaatcgtggcataccgatgagatcagaaaaattcgcccaacccctattgatgaagcgaaatggggctttgcggtggtcgaaaatagcttatgggaaggtgtgcctgctttcttacgtgaatttaatgaacagttagaagagtctattgactacaatttaccggtagaagcttctcctattcgctttacttcatggatggggggagatcgtgatggtaacccaaatgttaccgctgaaattacccgtcatgcattattacttagtcgctggaaagccgccgatctatttttaaatgatattcaggtgctcgtttctgagctgtctatgacagaaagcacaccagaattacgcgaattagcaggcggtgccgatgttgccgagccttatcgtgaaatagccaaacaattgcgcactcgcttacaagtgactcgtgattatttagaacaacgtatcaaaggtcagcaatcattacctcctgaaggcttactgattgataattcagcactttgggaacctttgtatgcttgttaccaatcactgcatcagtgtggtatgcgcattattgccaatggacagttattagatactttgcgccgtatccgttgttttggattacagctggtgcgactcgatattcgccaagaaagcactaatcataccgaagcgctgtctgaattaacgcaatatttagagcttggtgattatgctagttggtctgaagagcaaaaacagacgtttttactgacagaacttaactctaaacgtccattgatccctactcattggcaaccgagtgaagcaactaaagaggtatttgaaacctgtcgggtgattgctgagtcaccaaaagattctattgcttcttatgtgatttccatggcgaaagtcccttcggatgtattagccgttaaactattactaaaagaagcaggggcagatattcgtttacctgtagcaccattatttgaaacgttagaagacttaaataacgcagaaagtgtgatgacccgtctgtttgatattccgtggtatcgcgatttaattgataacaaacagatggtaatgattggttattctgactcagcgaaagatgcgggtgtgatggcggcatcgtgggcgcaatatcgagcacaggatgcattaattaagttatgtgagaaatctggcgtgacattaacgctatttcatggccgtgggggtactatcggccgtggaggtgcgccggcacatgctgcattattatcacaaccaccgggtagtttaaaaggtggattgcgggtgacagagcaaggggagatgatccgctttaaatttggcttaccgcaagtgactatcagtagtttggctcactatgctggtgcgattttagaagctaatttattacctcctccagagccaaaaacagcttggattgaggttatggatgctttatctgatgtatcttgcgagatgtatcgtggctatgtcagaggcgaaaaagattttgtgccttatttccgtgcagcgacgccagaaggtgaattaggtaaattaccattaggctctcgacctgctaaacgtcgtccaactggaggcgttgaaacattgcgtgctattccgtggatcttcgcttggactcagaaccgtttaatgttacccgcatggttaggagccggtgctgctttacagcatgagatagataacggaaaacaagccgtattggatgatatgtgtgagaattggcctttctttaatactcgtattgctatgctagagatggtgtatgcaaaagcggatctatggcttgcggagtattacgatcagcgtttagtcgaagaaaatttatggccattaggggcgaaattacgtcaacaactctctgatgatattaagagtgtattagcgatttccaaagatgagcatttaatggcggacttaccgtgggttgctgaatctatcgcattgcgtaatgtttatactgatccacttaacgtcttacaggcagagctattgcaacgctctcgtactcatagcgagtctgatccacgtattgaacaagcgttgatggtgactatcgcaggtattgcagcgggtatgcgtaataccggttag

SEQ ID NO: 293877 - DNA, 162 bp, Proteus mirabilis
atgtcaaaaattgaaaaacatgttgatcagctaaaagataaagcgacggaggtgaagcatcggacagaagaaaaattatctgaagttgcccacgatttaaaacatggtgcatctgatcttaaagaaaacgtagaaaaaaagattgattcattgaaaaagtga

SEQ ID NO: 293878 - DNA, 519 bp, Proteus mirabilis
atgaatagaattgttgaaaaatggatgtatcgctctcgttggttatttgcacctgtctatattggcttatctcttggattgttggcattaacgattaagttttttcagtcaatgtacgagatcttacccaatatatttgccttatctgaagctgatttagttttacgtttattatcgctaattgatttggcattagtgggggggttattgataatggttattttctcaggttatgagaattttattaccaatatggaaatcgaaggcgcgaaggataaactctcttggttaggtaacatggatgcagaatcgctgaaaaataaagttgctgcttctattgttgctatctcttctattcatttgttaggggtgtttatggacttaaaaaatatccctgataacaagttattatggtatgtggtgctacatctgacttttgttttttctgcttttgtgatgggctatttagagaagatctctaaacgaagtaagcgagcaaataaagccaatcaagggtga

SEQ ID NO: 293879 - DNA, 2439 bp, Proteus mirabilis
atgagcgtagtggcgattaaacaacaggcgcaaccaacttgccgtcagttacataaattcggtggtagcagtcttgcagacataaaatgttatcagcgagtcgtgaatatcatgacaaattatagccaacctaatgatttaatggtggtttctgcagcaggctcgacaacaaatcagctgattaactggttaaaactgagtcaaagtgatcgtatttctgcccatcaagctcagcaagaattacgtcgttatcagctatccttgattgaaggactattatcaaaagagcatgcacaagctctttcacaggcctttattgctgatttagaaaggctaagttacttacttgataagccgataacggatgcaacttatgctgaagtcgttggtcatggtgaaatttggtcagcgagattaatggcaagcttattaacggagcaggggttacctagtgtgtggttagatgcgcgagagtttttatgtgcagaacgcgccgcacagcctcaagttaatgaagccttatcgcgtcctttgttacaatcactgctggttaaatatcctcaatgtcgctttgtggtaacgggttttattagtcgtaatcaacagggtgagacggtgctattaggtcgtaatggtagtgactactcagcgacccaagtaggtgctttagcggatgtgggtaaagtgaccatttggagcgatgttgcaggggtttatagtgccgatccccgaaaagtgaaagatgcttgtttgctaccgttattacgtttagatgaggcgagcgagctggcaagattagcggcacctgttttacatacacgcacactacaacccgtctcagggagcaatatcgatttacaattacgttgcagttaccaaccagagcagggttcaactcgaattgaacgggtattagcatcaggcacaggggcaaaaattgtcactagccatgatgatgtttgtttaattgagcttcaattagccgcacatcaaaattttgaacaaatcgctaaagaagtggatgcattacttcagcgggtacaaattcgtccactggcaacaggtattgatagagatagtcagttgctacagttgtgttacaccagtgaagtcgctaatagtgcgttagatgttctgcaagatgcggccttaccgggtaaattacatctgcgagaaggcttttctcttgttgctttagttggcgccggagtatgtaaaaatccactccattgccaccgtttctaccaacaacttaaagatcaaccggtagagtttatttggcacgcggaagataatatcagtttagttgcggtattacgtaactatacggcttcattattacaaggtttacatcaaacattattcagggcagaaaaacagattggtttagtgctgtttggtaaagggaatattggctcacgttggttagagctgtttgctcgtgaacaggagccattatctgcacgtagtgattttgaatttattctggcgggggtggtagatagtcgtcgcagcctactagatcaccaaggtattgatcctagtcgcgcactggccttttttgatgatgaagcaacagtgcatagtgaagagtcgcttcatttatggatgagatcgcatccttttgatgatttagtggtggtcgatattaccgctaatgaagagcttgccgcctgttatgaagattttgccagctatggttttcatgtgattagtgcgaataaaatcgctggctcagcatcaagtttacgctatcgcgcaactcgtgatgccttctctaaaacaggacgccactggttatataatgcgacagttggtgcgggattacctattaatcatacggtacgtgatctacgtgaaagcggtgatacgattttatctatcagtggtattttctccggcacattgtcatggctatttttacaatttgatggcagcgtaccttttagtgatttggtagaacaagcatggcaacaaggcctaaccgagcctgatccgcgtatcgacttatcaggacaagatgtgatgcgcaaattgattattttagcccgtgaagctggctatgatattgaacctgagcaagtccgtgttgaatcgctggttcctgctcaagcgcaaagtggatcattagaagccttctttgaaaatagcagtgtgattaatgaacaaatggcacaacgtttagcggctgccaatgagatggatatggtactgcgttatattgcgcggtttgatgctaacggcaaagcgaaggttggggttgaagcggtgagaaaagatcatcctctggcatcactattaccgggggataacctatttgctattgaaagccgttggtatcgtgataacccattagtcattagaggtcctggtgctggacgtgatgtgactgcgggggctattcagtctgatctcaatcgcctttctcaactattgtaa

SEQ ID NO: 293880 - DNA, 1161 bp, Proteus mirabilis
atgacgaagaaaaccgcaaccattgccattcacaatgggcttaatgaagataagcaatatggctgtgttgtaccgccaatctatctttctagcacctataatttcttagcatttaatcaacctcgtgaacatgattactctcgtcggggcaatccctcgcgcgatatggtgcaaaatgcattagcagagcttgaaggtggggtgggagcggttgttactagcagtgggatgtcagcaattcatttaatttgtacgacttttttaaaaccgggtgatgtcattgtggcgccccatgattgttatgggggcagttatcgtctgtttaatagtcagcagcaacgtggtgcttatcgtgtggtatttgttgatcaaaacgatgagcaagcgttacaacaggcgttggcattagcaccaaaaatagtatttattgaaacacctagtaatccactattgcgcatcactgatattgagaaaataagccaattagctcaccaagttggggcgttggtggtggcggataacacctttatgagcccggtattgcaaaagccattggctttaggggctgatttagtggtgcattcttgcactaagtatcttaatgggcattctgatcttgtcgcgggtgttgtgattagtcagtgtaggaaacagcttgaggatttaagctggtgggcaaataatattggtgttactgctggggcgtttgatagttatttgttattacgagggatcagaaccttagtaccacgaattcgattacaacaagaaaatactcaagcattggtggattatctacaaacacaacccttagtggataaaatttattacccagcactagaacatcatgtcggtcacgcgatagcgaaaaaacagcaacaaggttttggtgcgatgttaagttttgagttaaaaggggggattgaggcaattaaatcctttttatctcatttaacactctttacactggcagagtctttaggtggtgtagaaacattaatttgtcatccggcgaccatgacacacgcaggaatgtctgaagaagcgagaaaaaccgctgggatcagtaacgctttattgcgcatttccgtggggattgaggatagtctggatctcatcaacgatttacaaaatgcgtttaatgcagcaacgaaaaggtaa

SEQ ID NO: 293881 - DNA, 318 bp, Proteus mirabilis
atggctgaatggaacggtgaatatatcagcccttacgctgagcatggtaaaaaaagcgaacaagtcaaaaaaattacagtttcaatcccattgaaagtgctaaaaattttgacagatgagcgcactcgtcgtcaggtcaataacctaaaacatgccaccaatagtgaattattgtgtgaagcatttttacacgcatttaccggacagcctctccccaatgatgaagacttacgcaaagagcgtaacgatgaaatccctgaagaggcaaaagaaataatgcgccagcggggtgttgatcccgagacttgggaatattga

SEQ ID NO: 293882 - DNA, 1305 bp, Proteus mirabilis
atgacacaacgagcagaagtcatacgaaaaatactacgtaatggacctgagccagcaaggcaactagctaatattatgaatattagtcagccaaccctgtcgagggcattaaaaatgttgtctaatgatattgttcaaattggctcgggtcgttctattcaatatgctttacgtgatggttcgcgtggcttcaactctgtacccatttatcgcataaatgaagaaggtaaaattaaattgttgggtaaattgacaccagtttatccagccggttttgttatggagcaggttgataatgtcaatcggtatagcgaaggattgccgtggtggttatttgatatgcgtccacaagggtatcttggacgtgcttatgctgcgacttattccgctgagttgggtttaccacataatccagacagttggtctgacacagatattatcagagctttaattgctcacggtcatgatgcagtgggaaatttgttaataggggaacaggcaaaaaaacattttttggcgatgccgatacctgctgtggttgctcgttcaacaacttacccaacattagctcgagcggttagttcaggggaagatcctggctcatccgcaggtggcgaacaacccaaattttgtacctataccgatagaggccatgtcatcgttaaatttacggcttctgacaataatgctatcagcgagcgttggcgtgatctcctgcaagctgagcatcttgccttaaaggtgctaggcgttgaaacagaaatttttgattttgaagggcaacgttttcttgaaataccgcgttttgaccgtgtaggtgctctaggtcgtgtcggacttttttctttacaagcattagatgcacagtttgtcgggcgagcaagagagccatggcctgtgttagttgatgcgttaattgagcaaaaacaggttcagcctgatgcctcggtaagtacaatgcgacgttgggcatttggtatgttgattggaaatactgacatgcaccatggcaatttatcgtttattagtctccatggccgaccatatgcgcttgcgcctgcttacgatattctaccaatgggatttgcgcctaaagtaggaggagaaatagtcaacacactgcgaccggcgacattacttgatgggatcagccgtgaaatttggcgggagagtttagcactcgcagagcagttttatactttgcttactcattgtcatgctctttctgacaatttttctccctgccttaacgcgttacgcaatcatctggatgaagcgagttcgcgtatctctcgtctagagtaa

SEQ ID NO: 293883 - DNA, 213 bp, Proteus mirabilis
atgaaaaaagatattcatcctaaatacgaagaaattactgcaacttgttcttgcggtaacgttatgaaaatcaactccacagcaggccacaacctgaatctggacgtttgtgataaatgccacccattctatactggtaaacaacgtgatgttgcaaccggtggtcgtgttgatctgttcaacaaacgtttcaaaatcccaggcagcaaataa

SEQ ID NO: 293884 - DNA, 2202 bp, Proteus mirabilis
atgactatagttcaggtaatattacctgtaccactgttttcttcctttgactacctgcttccagaaggttgtgccatgccaacaataggttgtcgcgtggtcgttccctttggcaaacagcgtcgctctatcggtattgttaaaggttttagttcacacagtgagtttcccattgaaaaactgaaacctattgaagaagtacttgatacagagacactgtttccggggatcttatgggatatgcttaattgggcaagtgcttattatcattatcctttaggtgaagttctctttcatgcgatgccaattctactacgacaagggaaaccggctgaatttacgcccttatggcaatggtatgccactcaagagggagaagcgcttgatcttaacagtctaaaaagcgctaaaaagcaacaacaagctttggcggcactacgccgtgcccctttgtatcgccaccagttagatgaatatgaaattacaacagcgacactaaataacttaaaaaagaaagcattagcggatttacgtcctattcaacccgcccctatacagtggcaaagcacttttgccgtacaaggcgaacgatttaaacttaatgccgaacaggcggttgctgttggtgctatcacggcacaagcagaccaattttcgccttggttattattggggatcacaggctctggtaaaacagaagtgtatctcagtgtacttgaaactattctcgctcaaggtaaacaggcactgatcttagtccctgaaataggtttgaccccacaaaccattcgccgttttaaagcacgttttaatgcccccgtcgatgttcttcactccggactcaacgatacggaacgccttgcggtatggctacgagcgaaacggggagataatgccattattatcggtacgcgctcggcattgctcaccccttttcagcaattagggattattattattgatgaggagcatgatggctcttataagcaacaagatggctggcgttaccatgcacgggatttagcggtctttcgcgccaagcaagaaaatattcctatcgtgatgggcactgccaccccatcgattgaaaccagctataacgttgcacaaaaaaaatatcaacaactgacgttaacgcaacgggcgggaaatgctaaacctgccacagagcatttaatcgacctaaaagggcaaccgctcacaaccggactctctccaacactcattaaagccataaaagagcatcttaatgccggtaaccaagtgatgttgtttttaaatcgccgtggctttgcgcctgcgttactctgccatgagtgtggttggattgccgaatgccctcgctgtgatcactattataccttacatcaaaaacacggcatgctacgttgccaccaatgtgatagccaacgtcgtattccatcacaatgccctcaatgtggttcaactaatttaatgccagtaggattgggcacagaacaacttgaacaaggcattggcgagttatttcctaatacccccataacccgtattgataaagataccaccagtcgtaaaggagcattagagcaacaactagaagacatctatcaaggtggatcacgtattctaattggcacacagatgttggctaaaggtcaccacttcccagacgttacgctggtggcgctacttgatgttgatggtgctttattttctagtgactttcgtgctgctgaacgttttgctcagctttatactcaagtatcaggtcgtgcaggaagagccgggaaacaaggtgccgtctatttacaaactcaccaacccgatcacccgctattattaacgctgttagaaaaaggctatgatgcttttactaaagaggcgttacaagagcgacaagcaacctttttacccccttattccagccatattatgatccgctctgaagatcataataaccaaaaagccccccagtttttacgccagcttaaacagttcttcgagcaacacccgatgagggatagtcatttatgggtgatgggccccattccggccattcaggcaaaacgagggggaaatttccgttggcaactattattgcaacatccttcaaggggttatttacaaaagttaatgtctgttacttatcctcagatagtggcgcttcctgagagtaaaaaagtgaaatggaatattgatgttgatccaactgattgctga

SEQ ID NO: 293885 - DNA, 1032 bp, Proteus mirabilis
ttgcaacagaataataaagagagcgcacaagcaacaatgaaagatgttgcttttgctgctggcgtgtcaacagccacggtgtcacgcacattaatgaatccagaaaaagtatcctcacaaacccgtcaaaaagttgagcaagctgttcttgacgtgggttattacccacataatttgtcaaaaaacctgaaacgtaacgagtcaaaaacgatcctcgtgatcgtccctaacatcagtgatcccttttttacagatgttgtatgtggcattgaagaaaccgcagctcaacacggctatcttgtgttaattggtgactgtaaacaccaacaaaaacatgaaaatgcctttattaatttaattattactaagcagattgacggcatgttactgcttggctctcatattccttttgatgtttctaaagaagagcaaaaaaatcttcctcctatgatcatggcaaatgaatttgcgccagagcttgaattgccaaccgttcatattgataatttgactgcttcttttagagccacccactatctacaacagatgggacataagcgtattgcctgtattactggccctgaagatatgccactatgtcgttatcgcttacaaggttatattcaagctatgcgtagaaccggtgtccctctacgcgaagattatattattagaggtgattttacccacgaaagcggtgcagaaagtctgaaaaagttaatttcgttacctgaaccaccgacagcggtattttgtcatagcgatattatggcgattggtgtgatgtggcaggctaaaaaacttggcttacaattacctgacgatctctctgtgattggcttcgataaccttgatattacgcgctatagcgagcctgcattaaccaccatggaacagccacgttaccaaattggtcgtcaatccatgttgttactgcttgatcagttacaaggtagacctgttgcacccggctctcgcctattagattgtgagttaatagtaagagaaagtgtctgtcggcttaaaagctag

SEQ ID NO: 293886 - DNA, 777 bp, Proteus mirabilis
gtgggacgaggacagtcatctgctcgtcgtaaaaagacaacgaaaggcaaaggtaaaaaggcggccagtgggttgcctttaaccacacttattgtagcaattgcgcttgtggcgctatttgttggcggcctctattttattacccataataaaaaagaggttgtcgaaccaacgtcatcaagtgcagggcaacaaccaactaacaacttaccacctaaaccgcaagagcgttggcaatatatcaaagagctcgagaatcgacaggtggggaacccattacagccaccagcgacctcttcagggagccagattaatccgaaagcgacactttcaccggagcaattacgttttttacaacaaattgaagcggataaacgtcaaccggcggtagagttaccagaagtgccttataacggtgaagtaccacgttcacaggttgtcattaccccaccgacaaccaccgcaccttcggtacaaccttcgcaaccttcagcaccggtaaaacaggagcctgcacccgcgataacgacaccaaaacctgcgacgactgaagcgcgctttttagtccaatgcggttcatttaaaaccaatgaacaagccgaatctgtacgcgcaaccttagcattttccggtatcgaaagccgtgtgaccaaaggaaatgacggctggatccgcgttttatctggcccatttaataaagagcaagccaatacgctaagccgtcaagctgcaggcgcaggtgtatcaggttgtattcttcgtactgcggggggttga

SEQ ID NO: 293887 - DNA, 531 bp, Proteus mirabilis
atgactacaatcgtaagtgttcgccgtaatggccaagtcgtaatcggtggtgatggacaggcgacgatgggtaataccgtcatgaaaggcaatgttcgcaaagtacgccgtctttataacgacaaagtgattgcgggatttgccggcggcactgctgatgctttcacgctttttgaactttttgagcgtaaattagagctccatcaaggccatttaactaaagccgctgttgaacttgcgaaagattggcgtacagacagaatgttacgcaaactagaagcattactggctgtggcagacgaaacaacatctttgattatcactggtaacggtgatgttgtgcagccagaaaacgatctgattgctattggttctggtggcccttatgcacaagcagcggcgagagcgatgttagaaaacaccgatctaagtgcacgcgaaattgcggaaaaagcactgaatattgccggtgatatctgcatctacaccaaccataatgtcaactttgaagaaatctcttcaaaagagtaa

SEQ ID NO: 293888 - DNA, 1341 bp, Proteus mirabilis
atgtccgaaatgactcctcgcgaaattgccagcgaactcgacagatttattattggtcaagataaggccaaacgtgcggttgctattgcactgcgtaaccgctggcgtcgcatgcagcttgatgaagcgctgcgtcatgaagtaaccccaaaaaatattttgatgattggacctacaggggtaggtaaaactgaaattgcacgtcgtttagcaaaattagccaatgcaccttttatcaaagtcgaagccacaaaattcactgaagtgggttatgtaggtaaagaagtcgattctattatccgcgatttaactgattctgctgttaaaatggtacgtagccaagcgattgaaaaaaatcgttaccgtgctgaagaaatggcagaagagcgtattcttgatgtactgatcccaccagcaaaaaataactggggagtcacagaatcagcatcatcctcagagccttcagcagcgcgccaagcgttccgtaagaaactccgtgaaggccaattagacgacaaagagattgaaattgaattagcggccaccccaatgggtgttgaaattatggcacctccaggcatggaagagatgactaatcaattacaatccatgttccaaaatttagcgggacaaaagcaaaaagcgcgtaagatgaaaatcaaagaagcgtttaaactgattgtcgaagaagaagccgctaaactggttaatcctgaagagttaaaacaacaagccatcgatgcagttgagcaacatggtatcgtgtttattgatgaagtagataaaatctgtaaacgtggtggtcaaagctctggccctgatgtttctcgtgaaggtgtacaacgtgacctattaccactggtagaaggttgcaccgtatccactaagcacggtatggtgaaaacagatcatattctgtttattgcctcaggcgcattccaagtctctagtccttctgacttaattcctgagttacaaggccgtctgcctattcgtgttgaactacaagcactgactgcagaagattttgagcgtatccttactgagccaaatgcatcattaacaaaacagtatcaagctttaatggctaccgaaggggtaagcattaactttagccaagacggtattcgcaaaattgccgaatctgcatggcgtgtaaatgaaaccactgaaaacattggtgcacgtcgtctacatacggtattagagcgtttaatggaagaaatttcctatgatgcgagtgaacgtcaaggcgaaactattcttattgatgcagaatatgtgaaacagcatctggatgagcttgtagcagatgaagatctgagtcgatttattttataa

SEQ ID NO: 293889 - DNA, 918 bp, Proteus mirabilis
atgagcgctcaacattccattagccggacacaagcctggcttgaaagtttacgacccaaaaccctacctttagggttaattgctattgtgacaggctccgccttagcgtattggacgggtcattttgagctacctattgcattactggcgattttaactgctggcacactacaaattctctctaacttagcgaatgactatggtgatgccgttaaagggacagatactgaagagcgattagggccactgcgtggaatgcaaaaaggggtgatcacccctgttcaaatgaaaaaagccttaattatcaatgtaattatctcctgtgtttcaggtatcgccttgataattgtcgcctgtaaaaaacccgaagatgctattggctttttagtgatgggcttattggctatcgtggctgccattacctataccgtagggaaacgcccttatggctatatgggattgggcgatatttcggtattaattttctttggctggctaagtgtgattggcacttattatttgcaagctaatgcttttaatattgtgacactactgcctgccaccgcctgcggactgctctcggtcgcagtacttaacattaacaatatgcgtgatcttgaaaacgacattcaagccggtaaaaataccttggcggtgcgtttgggggcttctggctcacggatttaccacacctgcgtgattgccatagccattatctgtttgattgtgttcaccctgatttatatgcaccattggacggcgtggctatttttattagccgttcccatgctattactgcatattaaacgcgttaatgccgatcttagtggcgaagccatgcgaccactgcttgaacatatggtcaaagcggcgctgttaaccaatattcttttttctttaggtttagttttagagtaa

SEQ ID NO: 293890 - DNA, 519 bp, Proteus mirabilis
atgaaatatgatacttctgaactctgtgatatctatcaagaagatatcaatgtcgtagaaccgcttttctcaaactttggtggtcgtagctcttttggtggacaaattaccactgtcaaatgttttgaagataatggtctgctttatgacttactagaagaaaacggtaaagatcgtattctattagttgatggcggaggctctgtccgcaaagcgctagtcgacgctgaattggcgcaactggcggtactcaacgaatgggaaggtattgttgtttatggtgcagtacgccaagtggacgctttatctgagcttgatttaggcattcaagcgatggctgccattcctgcaggttgcccaagtgaaggcatcggcgacagtgatatccgcgtaaactttggtggtgttactttcttctccggtgattatctttatgctgataatactggcattatcttatctgaagagcctttaggcttagatgatgacgatttagatgatgatttattagaagaataa

SEQ ID NO: 293891 - DNA, 258 bp, Proteus mirabilis
atgggggattacagtatgtcatttgaagtttttgaaaaattagagtcaaaagtacaacaagcactagataccatcacattattacagatggaaattgaagagctaaaagagaaaaatgatgcactgaatcaagaagtgcagggcgcaagagaatcaagagaagctttggttcgtgaaaacgaagagctgaaacaagagcaatcaagctggcaagagcgtttacgtgctctgctaggaaaaatggaagacgtacaataa

SEQ ID NO: 293892 - DNA, 816 bp, Proteus mirabilis
atgagccagacgaaaacctctcttatgggtcaatgcatttccgagtttatcggtactgcattgctagtcttctttggtcttggttgtgttgcagcagcacgtatcgcaggcgctcaactcggtctttgggagataagtattatctggggcttaggtgttgccttagccgtttaccttactgcgggtacctctggtgctcacctcaacccagcggtcacagtcgcattctggttgtttgcgtgctttgaacgtaaaaaagttatcccttatattgttgcacaaatgttaggtggtttttttgccgccgctgttgtgtactttatgtattacaatttatttatcgactacgaacaggtcaacggaattgtacgaggatcacaagaaagcctctttactgcgggcgtcttctctacttacccagcagcccaaatctctgtgatccacgcattttttatcgaagtaattattgccgttatcctcgttggcttaattttagccttaacagatgatggtaacggtgtacctcgtgggcctttagcaccattacttatcggtattctgattgcggttatcggtggtgcatttggtccattaactggattcgccttaaaccctgcccgtgattttgggccaaaattagtcgcattctttgccggatggggtgatattgctttaacaggtggacgcgatattccttatttcttagtcccactcattgctccaatgattgggggtattttaggcgcacttgcttatcgtaaacttattggccgtcacttaccttgtgatacctgcaaaattgaaaacgacaaataa

SEQ ID NO: 293893 - DNA, 1533 bp, Proteus mirabilis
atgacaacagaaacaaacaaatcgaatagtgaaaaaaaatatatcgttgctctggatcagggaacaaccagttcacgcgctgtcgtaatcgatcatgacgccaacattgttagcatctcacaacgcgaatttacccaaatttatcctaagcccggctgggttgagcacgatccaatggaaatctgggcaactcaaagtgcaacgctaattgaagtattggccaaagaagacatcccttctgatcatgttgccggtatcggtattaccaaccaacgtgaaacgactatcgtctgggaaaaagagaccggtaaacctatctataatgctatcgtgtggcaatgtcgccgtactgcagacttttgtactcgcttaaaagatcaagaaggggttgaagagtacattcgtcaaaatactgggcttatggttgacccctatttttcaggcaccaaattaaaatggatcctcgataatgttgaaggcgctcgtgaacgagcagaaaaaggagagttactctttggtaccgttgatacttggttagtctggaaaatgacacaaggtcgtgttcacgtaacagattataccaacgcttcacgtactatgttgtttaatattcactctttagattgggatcaaaaaatcctcgatctgctaaatattccccgcaatatgttacctaaagtggtgccttcttctgaagtttatggtcaaaccaacattggtggtaaaggtggtacacgtattcctatcgccggtatggctggtgaccaacaagcggcactctatggtcagctctgtgtacaaagcggtatggcaaaaaacacctacggaacaggctgcttcttgctgatgaatacgggtaaagaagccgtgcgctctaaccacggtctattaaccactatctgctgtggcccacgtggtgaagtaaactatgccttagaaggtgcagtcttcgtcggtggtgcttccattcagtggctacgtgatgagctaaaattaattgatgaagcaactgactcagaatactttgccactaaagttaatgacaccaacggtgtttatgtcgtacctgcatttactggcttaggtgcaccttattgggatccgtatgcccgtggcgctatcttcggtttaacccgtggcgctaaccgtaatcatattattcgagctactttagaatctatcgcttatcaaactcgcgatgtccttgatgcgatgcaagcagactccggagcacgcttacaagcactacgtgtagatggtggtgccgttgccaataacttcttaatgcagttccaatctgacatcttaggtacccgtgttgaacgtcctgtggtacgtgaaagtactgcgttaggggctgcgttccttgcagggcttgcggtaggtttctggtctgatctggaagaggtaaaaaataaagccgagattgataaagaattccgcccaggtattgaaaccacagagcgtaattatcgttataacggctggaaaaaagcggttgcccgtgcacaagaatgggaagatcgcggttaa

SEQ ID NO: 293894 - DNA, 1185 bp, Proteus mirabilis
atgagaaagttagaacatgcaaatctgttattactgattattgcactggttgctgtcggtcaaatgacacagacgatttatgttcctgtgattgctgatatggctgtctattttggtgagccaacaggtgctgtacagcaagtaatgggcgcatatctgttttcttatggtttttcacaattaatttatggccctatttctgaccgagtagggcgtcgtccggttattttagtggggatgagtattttctgtttagcgacgatcgtggctattttttcacagaacttaactaccttagtgatcgccagtaccttacaaggaatggggactggggtagcaggggtaatgacccgtactcagcctcgtgatctctataccggtactgcgttacgctatgctaatagcttattaaatatgggggtgttagtcagcccactcttagcgccgatgatcggtggggtagtggcacacttctttggctggcatgcctgttatatcttcctattattattaggaggaagtgtactctttagtatgtatcactggatgccagaaacccgacctgtacaggcagaaagacgcagtatgttgtcatctttttatttattgctgtccaacagtacttttagcgcctttttgatcatgttgatttgtgcgttatcaggtattgccgtatttgaagcttccagcggtgtgttgatgggaggcgtgttgggtttaaatagtattactatcagtattctatttattttacctattcccgcggccttctttggtgcgtggtacgcagggcgtgaaggtaaaacctttgtgcaattgatgtggcactccgtattttgctgtgtagcggcaggtattttaatgtggcttcccggctggctgaatattattaatatttggactttattggtgcccgctgccctgtttttctttggcgctgggatgctatttccgctggcaacgacaggggcgatggaaccattcccttatttagccggagcggctggtgcgttggtgggcggattgcaaaatgttggctcagggatagcaacctggttctctgcactattaccacaacataatcaatttagcttaggaatgattatgtttattatgtcagtggctattatgttgtgttggatcccgttatcacaccgttttagtcatcagcagaatacggtttaa

SEQ ID NO: 293895 - DNA, 747 bp, Proteus mirabilis
atggcaaattgggttactggaaaagtcattcaagttaggcattggacagatacattaatcagtttggttgtacacgcccctatcgataagtttacagcaggtcaatttgccaaactggcactcgaaattgacggtgaacgtatacaacgcgcctactcttatgttaactccccgcaagatcccaacttagagttctatctagtcactgtacctgaaggtaaactcagcccacgcttagcggcgttaaccgttggtgatgaactcttagtgacagaacaagccagtggcttttttgttctagaagaggtgcctagcgcgaataccttatggatgttatcaacaggtacggcgatcgggccatttctctctattttacaacttggtgatgatctcgaccgtttcgaaaatattgttttagtccatgctgtacgctacgcccgtgatttaagctatctaccattaatggagcagttagctgaacgctaccaagggaaactgcgtatccaaactattgtcagccgtgaaaaccatataggctcactaaccggacgcattccagcattaattgaaagtggtgcattagaaaaaaccgtaggattaaccatttccccagaagaaagccatattatgctatgtggtaatccagaaatggtaagagacacgcaacagttactgaaaacacagcgtgatatgagaaaacatttacgccgtaaaccgggacatatcaccagtgaacagtattggtaa

SEQ ID NO: 293896 - DNA, 429 bp, Proteus mirabilis
atgaccttacaacattgggccttttcattcaaagggcgaattggacgccgtgacttttgggcgggttttgcactctgttttgtgctgttttgcggattatatacagttaatcagcactattcattgcctgctgtgctggtggggataatttcactggctattttatatccgttatgtgccatttttactaagcgacttcacgatagaaataaacgtggtgcatggctgttattattgttgctggcggtgatgctaggattgactgataccagtagtttagagcccttttggcagtgggcgataggtcgttttctcccttcatttattatgatgatcatgttgttagattgtggggtgtttattggcacccaaggagaaaactattttggtgccacgactgaaaaggtcgactactcaagttttcgttaa

SEQ ID NO: 293897 - DNA, 636 bp, Proteus mirabilis
atgataaaaaaaagcacgcttactcagttagcgcttatcataataagcattgctttatctttgccaaccctttctatggcagcgtcgccctctattgctcatcaacccccaactaaagatgatattctttaccttaaacaggatgcccctgtttttgaaaccaccattccggagataagagctaaattcaatcaaaataatgcgtcgttatttctcaatgaatataaaattatcaccaacaacgatattactattccgttagtcagggccgcgacacgaataaccccttatttatactcatcagccgtattagagcgtggcagtgaaaaaattaagagtctacagctcaccctgatccatacacttgatacgccacaaatcgaaaaagagcatcaagatactgcaatgcgctatatcactgcattagtgacacagtttgatccctccattaatgcagcgcaaattcaagaggtgctcaatttatttgctgttaaacaagatgtgcctgcttatattagccataatgtcggtgctattcgctatattattgcccacgaggacaatcaactaacgacctttgccattgaaccgattaagctttcactcaatagcaatatcgattcagctattccgtga

SEQ ID NO: 293898 - DNA, 771 bp, Proteus mirabilis
atgcgccatccattagtcatgggtaactggaaacttaacggcagcattcatatggttcatgaattaatcgctgcattacgtaaagaaatcagcggtgttgctggatgtgatgttgctattgcaccaccaacagtttatctgtgccaagctcgtcatgaaatcggtggaagccgtattgcgttaggtgcccaagataccggtgttaacttatctggtgctttcactggcgaaacttccccagaaatgctgaaaaacgttgatgttaaatacgtgatcatcggtcactctgaacgtcgcacttaccataaagaatctgatgaatttatcgcacaaaaatttggtgtgttaaaagaattaggcttaacacctgtgttatgtatcggtgaaacagaagcagaaaacgaagctggtaaaacacaagaagtgtgcgcacgtcaaatcgacgcgattttaaatgcacatggtgcacaagcattcaaagatgcagtgatcgcttatgaacctatttgggcgatcggtacaggtaaatcagcaacgcctgcacaagcacaagcggtacataaatttattcgtgatcatatcgctaaacaagatgcggctatcgctgagcaagtcattattcaatacggcggttcagtcaacgataaaaacgcagcagagctatttagccaacctgatatcgacggtgcattagttggtggcgcgtcactgaaagcggatgcctttgctgttatcgtgaaagcggcagcagaagcaaaagcgaaaaaataa

SEQ ID NO: 293899 - DNA, 1005 bp, Proteus mirabilis
atgttaaaacgatggggattattgacgacgctagcgctgacggcactgtttacacaaagcatctgggcgaaggatattcagttattaaatgtttcttacgatccgactcgagagctttatcaacaatataaccacgcatttagtcaatattggcaacaaaaaaccggcgatcatgtgactattcgtcaatctcatggtggctctggtaaacaggcaaccgccgtaattaatggtattgaagcggatattgtcaccctcgcattagcttatgatattgatgccattgcacaaagagggcgtatagataagcagtggatcacccgcttacctgataactcagcaccttacacctcaaccattgtttttttagtgagaaaaggtaatcccaaacagataaccgactgggattctttaattaaacccggtgtatcgattatcacacctaatcctaaaacctccggtggagcaagatggaattatctggctgcatggggatatggattaaaggccaatcagcaagacagtgaaaaagcgaaagcctttgtaaagtcactgtatcaacaggttgaagtcttagactccggcgcgagaggcgcgacaaatacttttgttgagcgtggtattggtgatgtgttaattgcatgggaaaatgaagcgttattggcgattaatgagttaggtacagataagtttgaaatagtcaccccttccgtctctattttggcagagccaaccgtctctgtggtggataaagtggttgataagcgaggtacgcaggaagtggcaaccgcttatttagagtatctttattcacctcaagggcaagaaattgctgctaaaaactattatcgtccaagagataaaagcattgctgagaaatatcaaaaacgttttccaaccctgcaattattcactattgatgagctttttggcgattggcaatcagcacaacaaactcattttgccaccgggggaatatttgatgaaatcagccgacgtgattag

SEQ ID NO: 293900 - DNA, 978 bp, Proteus mirabilis
atggttaatgggatcaaaagaattggggttttaacaagtggtggtgatgcaccgggtatgaatgccgcgatccgtggtgttgtccgtgcagcactcagcgaaggtttagaagtgtacggtatttttgatggctatatgggcttatatgaaaaccgtatgaaaaaactcgatcgctttagtgtgtcagacatgatcaaccgtggtggtacctttttaggttcagcgcgtttccctgaattccgcgaagataatgtgcgtgccgttgctattgaaaatatgaagcaaaatgagctagatgcactggtggttatcgggggtgatggttcttatctgggggcgaaaaaattaactgaagcgggtttcccatgtattggtttaccgggcaccattgataatgacgttgcgggtactgattacactattggttatttcacggcgttagaaacggcggtagaagcgattgaccgcttacgtgatacctcaacatcgcataaacgtatctctatcgttgaagtgatgggacgttattgtggtgatttaaccttatccgctgctattgcggggggttgtgagttcgtagtgttgcctgaatccgaattaccttttgatcgtgatgaattattagcagaaattaaagcgggtattgagcgtggtaaacgtcatgctatcgtggcaattactgaacatgtgtgtgatgtacatgagctggcacgttttattgaagcagaaaccaaacatgaaacacgtgccactgtattaggccatattcaacgtggcggctctccggttgcttacgatcgtattttagcctctcgtatgggtgcttactctgtacaactgctacttgaaggttatggtggtcgttgtgtagggatccaaaatgaaaaactggttcaccatgatattattgatgcggttatgaatatgaaacgtgtctttaaagccgattggtatgaaactgcgaaaaaactgtattaa

SEQ ID NO: 293901 - DNA, 756 bp, Proteus mirabilis
atgtttgatttaacgggtaaaattgctttagtttccggcggagcaaaaggtattggtaaaggcattgttagtgcattaaaaaacagcggtgcacaggttattattgctgatattgatgatgtagcaggtaacgcaaccaaagaagcacttggtgttgattttatgcaccttgatgtcacctctcaagcagcctgtgaacaagtagtcaatgatattgttaaacagtatggcaaactcgatattctttgctctaatactggtattttcccccaagcgacaattaaagagatgagcgaagctgattgggataaaatgcataccgtcaatttaaaagggatgtttttcttagtaaaagcggctcttgcggtaatggaaaaacaacaatatggccgtgtgatcatcacctcttctattacaggcgccattactggctaccccggctggagccattatggagcaagcaaagcaggtcagttaggctttatgcgcagtgctgcactagaatatgcacgccacggtattaccattaatgccgttatgcccggcaatattttaaccgaaggcttacaagcccaaggagagacctatcttaatcaaatgaaggcctctatcccaacccataccttaggggagcctgaagatatcggctatgccgccgcattctttgcctctaatgaagcaaaatatattaccggtcaaaccattattgtcgatggcggccagattttacctgaatctccagaggcgttgttgtag

SEQ ID NO: 293902 - DNA, 333 bp, Proteus mirabilis
atgattaaaaaaggggggatcatgactaaacgtgatattttttctgagcttcaagaaggaatgaatgcgtggagtgaatttaatgaaggggaaaaaacactaaagactcaccgtattaatgttaagcctctttctatgacgccagcagaagtaaaagcagtacgtgaaaaattgaatttatctcaagctgtttttgctcagtatttacatacgggggttacaacattacaaaactgggagcaagggatagtaaaaccgaataaacaagcggttttactacttaaaatggttgaaaaaagaccggatacgttgattgagctagcaggactttga

SEQ ID NO: 293903 - DNA, 567 bp, Proteus mirabilis
atgcgtaaagtagcaatggttgcactagcatcaatgtttttagtagctccgacggtagtaatggctgaaacatcaaatacaaataatcagcctgcagggcaacaacagtataatgataattaccattgtggatacggttacggtatgcatgatggacgtgataaccgaggtcatcgtggacaacgtggccatatgatgggtaacaataatttcggtgagtcgcgtatgtttaatggtattacattaacagagcaacaacgtactcaaatgcgcgatttaatgcgccagcatcatcaagatcgttttaataacagtgattttcgtcagcgtcacgaaaatatgcataagctaattaccgcggataagtttgatgaagcagcggtaagagcgcaaatacaagatatggacaaacaagcaatagagcgccgagttgaaatggcgaaagttcataatcaaatgtatcagctattaacccctgagcaaaaagcgcagctagaaaagaattatcaacagcgtgtctcttctgttagtcagcaaaaccagcaaactcaagagaaagctaattag

SEQ ID NO: 293904 - DNA, 699 bp, Proteus mirabilis
atgcataaaatcttattagtggatgacgatcgcgaattaacctcgctattgaaagaactacttgaaatggaaggctttaatgttgtgctcgccactgacggcgaacaggctttaaaacttctggatgcgtctattgacttgttattactggatatcatgatgccacgtaagaacgggatcgagacacttaaagagttacgccaaaatttccaaacacctgtcattatgttaacggcaagaggcagcgatcttgatcgtgtacttggcctagagctgggagcagatgactatttacctaagccatttaacgatagagagctagttgcacgcattagggctattttacgtcgttacaactggagtgaacagaaacagaccgatggcaacacctcacccatattgcaagttgataagttacaacttaatccgggtagacaagaggccagctttgataatgaaccattagagctaacaggtactgagtttacgttactttatctacttgctcagcatttaggacaagtggtatcgcgcgagcatctcagccaagaagtgttaggtaaacgcttaacaccttttgatagagcgattgatatgcatatttccaacttacgtcgtaagttaccggaaagaacagacgggcagccttggtttaaaacattacgtggccgtggttatcttatggtttcaataacttaa

SEQ ID NO: 293905 - DNA, 1368 bp, Proteus mirabilis
atgataaacagtttgtcagcgcgtatattcgccatattctggctgacactagcattagttctagtgctagttatgatggtacccaagctggactcgcgccagcttaccactttacttgaaagtgaataccgtcaaggtgttatgctagagcaacatatagaagccgaactagcgcaagatccggctaacgatctgctatggtggaggcgattaatccgcgccattgataaatgggcgccacctggtcaacgtcttattattgtcaccagtgaaggtcgtattattggtgctcaacgtaatgagatacaagttgtcagaaactttatggggcagtctgataacgcagaccatccgaaaaagaaaaaatacggtcgctctgagatgttaggtcccttttccattagagatggtgaagatcactaccaactttacttagtgcgcccatcaagtagcccgcaatctgattttatcaatttattatttgataaaccgcttttattactgatattcactatgcttatcagtacaccgctactggtttggctctcttggagcttggcaaaaccggcccgaaaactcaaaaatgcggcggatgatgtggcaaaaggcaatctgcgccctcaccctgagttggaaactggcccacaagaatttttagcggcaggcaccagttttaatcagatgatcagcgcattagagcgtatggttgaagcgcaacagcgattgatttctgatatctcccatgaattgcgcaccccattaactcgtttacagcttgccagtgcattactacgccgtcgtagcggtgaaagtaaagagctagagcgtattgaaacagaaacacagcggctagatggcatgatcaatgacttattagtgctttcccgcaaccagtataaaaatgagttattacgtgaaaccgtaaaagcgaatgagctttggaacgatattttagataatgcgaaatttgaggcagaacaaagcaataaaaccctaacagtaaccgccccaccaggcccatggacgatttattgcaatccttattcattagcgagtgcctttgaaaatatcgttcgcaatgccttgcgttattcacattctcgtattgaagtggcctttaccgaacaaaatcagggtatcactattatcgttgatgatgatggcccaggggttagcccagaagatcgcgagcatattttccgacctttttatcgtacggacgaagcacgtgatagagaatccggcggtacagggctgggactggcaatagttgaaaccgcgattagtcaacatcgaggccatgtaaaagctgacgatagcccattagggggattaagagtggagatttggttgccgaaaacaaaataa

SEQ ID NO: 293906 - DNA, 837 bp, Proteus mirabilis
atgaaaactagctttaaccatatcgagcgagataatagtgatatcacccataaccataaaaatactcatagttcctgcaactgcacccaagaaataataacttctttaaatcattatattaataaacatccagaatgtactatctaccaaaattctttaatgagtagtcttattgctggtgtttatgatagtgatgttactattgctgatttattaaagcatggtgattttggtttaggtacttttaatcatcttgatggcgaattggtcgcctttgatagtaacgtttttcaattacgttcagatggcagtgcgcgagaagcccgtccagatcaaggctcgccttttgctgtaatgacattctttaaacctgatattacacatcagttttcggctcctgtctcccaacaacaggttcacaatattattaaccaatatgtcccttccgataatctattttgtgccatcaaaattgaaggcgaatttgaattagttaaaacacgtacagtgccacgtcaagagcctccttatgtgcccatgctagaagccattgaaaatcagcctatttttacctttcacgatgaaatgggtattattgccggctttcgttccccgcaatttactcaaggccttaatgttgctggatttcatgagcattatattaatcaccaacgtgaaggtggtggccatgtacttgattatcaattaaaaaaaggcaccctacaaatcggtgttatctctcgttttactattgacttacctcatcaatcaacattcttagaagctaatttaatgcccgatgaccttcatcaggcaatagaacaagccgaaaactga

SEQ ID NO: 293907 - DNA, 1680 bp, Proteus mirabilis
atgaactctcatcattggaattgcggtgctgacttggtggttaagcaattagaacaacatggtgttaaacaagtttttgggatccccggagccaaaattgaccgtgtttttgattctttggttgattcaacaattaaaactattgttgtgcgtcacgaagccaatgcagcttttatggcgggtgcggtaggacgtttaaccggtaaagcgggtgtggcgatagccacttctggtcccggttgttctaatctagcaacgggcattgcgacagctacatcagaaggtgatcctctagttgccttaggaggctcagttaaatctacggatagacttaaactggttcatcaaagtatggacacagtaacaatgtttaacccaatcactaagttttgcgctgaagttgattcttcacaatcaatttcagagacgttagccaatgcttttcgtcatgcggagtcaggtcgtcccggctcggcttttttaacctttccaatggatatactcaataatgaggtagatagcccgttattaacacctaaatccaaacctaatttaggtgccgcgagtgatagtgcaattcaagaagcgatcagcttattattacaagcgaaaaaccctgtgatattaatagggcttcaagccagcgatccagaaaatgctcttgccttacagaattttcttgatatttttcctgttcctattgtaggtacttatcaatctgccggggctattgctcatcgccattttccactctttgccggacgaattggcttatttaataatcagccaggggatgaattactggcacacgctgatttagttatcactttaggttatagcccgattgagtatgaaccttccttatggaacagtcataatgccaatattatccatattgatgagatccaagctgaaatcgatttagcttactgccctgccttagaattaacaggcaatattaaattaacactggataagttaacgcaacaattaactcaccagcctaattcaaaattacaattatctaatcagagccaaggaatactagagaaaatacgtcagcaaagggaaattttgcaacaaaatagttattttagacaaggcacacctattcatcctttaactatcatacatgaaatgcaagatatcattgataacgatgtcactctttgtattgatatggggagttttcatatttggcttgcacgttacctttatagttttagagcgagacaaatgctaatttctaatggccaacaaaccatgggagttgcattaccttggggaataggcgcttcttttgtacgtccttgcgataaaattatctctgtttctggtgatgggggatttatgcaatcttcaatggagctagaaaccgcagttcgtcttaataccaatatattgcatattatctgggttgataatgcttataatatggtggagatgcaagaagaggtaaaatatggccgtccttctggcgtaaaatttggtcccattgattttaaacgctatgcagaatcttttggtgctaaaggattttctgttgagtgcgcatctcaacttcgtgaaaccttacgtaaagcgatagctgttgatggtcctgctgtgttagccattcctgttgattatcgtgataacgataaattaatgaagcacattaattataatttaattatttag

SEQ ID NO: 293908 - DNA, 513 bp, Proteus mirabilis
atggagatactccattcaatgcttgacacattaagtcatgtttctcctatcgctttattttttactattaccctactcactgcgggaaaatctactattggtatttcatcctttttacctcccgcatcgttaatgctgatcttaatatttggggtttgcttgcccttccattcgcctattttactttggttagcaactagtttaggtgccttattaggatctatagcgagttatcagttaggacgttccatttattatttccctcgcttaaataaatgggttacccgctatcaaacaaagatcttacgtatacaacaactgttaaaaaataaagcattctttattctttttatttcacgctttttagctgtgtttcgctaccttacgccttttagcgcaggtttattaaaactccccatttatggtatttatctaacaagtgctgtttcagccttagtgtggtcaggagtatttattttaatagccaatggcgtaatctccatctcattataa

SEQ ID NO: 293909 - DNA, 1035 bp, Proteus mirabilis
atgagaataagaaaaacaaagcttgccatcggtattgttgctgttattgctgttgtatcactagcaatgatcggcaaaaaagagaatgccaataagcaatttctctctgtagcaacggcctcaacaggaggaacttattacccgatgggagtcggtttagccaatgtttggagcacccacctcaaggatagaggaatacaagtcacagggcagtcctctgctggctcaattgaaaatatctatttaatgcaacaaaacgaagctcagctttctattctacaaagtctattagctgtggaagcttacgaaggtgtacgtaattttgaaggcaaacctgaaaaaaatctacgttctatatcaatgctttggccaaatgtagagcactttgtcttaatgaatgacaaagtaaaaacaggaacattggatgatattcgtgccaccagcttctctgtcgggccacaagccagtggcactgaacaatcgaccattatcattcttaaaggtgtgaatttaactaaaaaagagatcactcctgaatatcttggttatggagatactgtttcagcaatgcgtgatggacgccttgatgggggggcattacctgcgggtgttcccgcctctgcggttaccgatatgtatgccagtggtgttaatgccaaattacttgaagtgactgataagcaacttgatgatattaatcatattgctaactcttggtttcgctttgaaataccagcaaatacctaccctcgccaagcagaaaaagtaaacaccattgcacaacctaatatcttaatgacaaccacaagtattgatgaccagttagtttatgaattgactaaaaccatgtttgaaaacttaccagaagttcatcaagtacatagtgctgcaaaatacatcaccaccgaaaatgcgttaaaaggtgtttctgtgccattacaccttggagcttatcgttattacaaagaaattggattagatatccctgactatttaattccacctgaagctcaaacgcaaactaataataaataa

SEQ ID NO: 293910 - DNA, 1968 bp, Proteus mirabilis
atgactaataatgaccacctaactccggtagagccaccagcattagataaagaagctagctcaggcactcgtcaccttaccggtatctatttaaaaatcaccaccacgctggcgatattcatttcgttgtatgctatttactctaatgccttatccaacacccaagagttttatcgtaatactatttttcttagtggtattttgatccttggttttattttatttccattctctaaacgattttctaccgcaaaatttaatggctgggattatctttttatcgctttaacattaatcagctatggctattttttctttaactatgttgatctccatgtggtaagaaaaagtattcccaacacaatggattatgcgatggcaattcttggcattattgttctttttgaagcagcaagaagaacaacgggctattttattcctagcctagccacattcgccattatctatgccctatttggccaatactttatgggtatttttggtcatgcaggattttctgtagagagactgttatatcgtttatttatgaccagtgaaggtatttttggtattacactctctactgcctctaccgctatcgtggtatttattttattcggttcgtttttaagtgttagtggtgccacagcactatttaatgatttagcgctagccatggcgggacgtcgccgtggggggcctgctcaagttgccgtcatttcatcagcattaacaggttcattaagtggtagcgcggtcgccaacgtagccactacgggaacctttaccattccattaatgaaaaacattggcttaacatcacgttttgcgggtgccgttgaagctactgcatctacaggtggaatgatcatgccaccaattatgggtgcggcagcttttattatggcgggctttttgggaatttcttataccacgattgttattgccgcgattattcctgcgttgctctattacgcggccttgatcatggcaattgatattgaagcgaaaaaacaaggtttaaaaggacttagcaaagagaatattccacaagttaaagcggtattaaaagcacgcggtttattactattacctttaattattgtaattggcacgctattaatgggtaaaactcctatttatgcgggttttcttggtattttaaccattattgttgccagctggctaacacctgataaaacggtacgaatgacattaactaaagtggctgatgctttagcagaagcggctcgtggctcggtacaagtgactatcgcttgtgctgccattggtgtgattatttgtgttgttaccatgaccggtatcggtgcgaccttagcatttaatattgtctctatgactgacaatacattatggatgatcttactggttgtgatgttagtctgtattgtattaagtatgggcttaccatcaactgctctatatatcgtggttgccgttacagtgtcacctattttaattaaagccggtgtgatgcctttagcggctcatttctttgtcttctggtttggcgcgttatccaatattactcctccggtcgccctagcaagctatacggcagcaagtattgcgagagccgatccgatgcaaacttcatgggatgcggtacgtttagcactccctggttttattattccttttattttagtttataaccctgcattactgatgcaaggtgataatttaagtgttatctctatcgggttaatggtcattagtgcattagtgggaatttatgcactaagtattgccactgcgaatttttggataatcaaaacaacatggtttgaacgtatcgcctttgcagcggccgctattttaatgattaagcccggactatataccgatttattaggtatggcgttgatcttacttactggcgctttccatctgttgcgctctaaaaaacagctggtcaatgtagggcaagtatctggagaaaactag

SEQ ID NO: 293911 - DNA, 714 bp, Proteus mirabilis
atgataaaaaagatctcacgccaaaaagcgtcgcaacaaattcttgatcaaattaagcaaaatatttatgacgggacctatcctattggtgaaaaactaccgtctgaaaatgtactcgctgacgcctttggcgttagcagagttcccatcagagaagcattaggggtattagaagcgagtggcattattacgtcacgccaaggaggcggtagacgcgttattgaccactctatcttgagtaaatacgaacctattgtgatggaaattgcttgtcctcaagaaattgaatcactgcttgaaatgcgtgaggtcattgaacatgaagcggcagccattgccgctttacgtcgaacaccagaagaattgctgacgatagagcaagcacatcaggcctttatcttagccacgcagaaaaacaacaacattggtcatcaagaagattatcaatttcatcgtgccattatggttgcttcacataatccttttttcgtgcgcatcctcgataacttacatgagctttatcttggcgtattgatgtattccttaagccaaaataaaggacgtattgccgaaactgagcgtgttattgcagagcatgaagctattgttgaagcaataagacaacaagatagtgatgaaactagccacaaaatgcgtcttcatttagccaatgtacgtggaaagttaaagcgcttacaacaagaaaaaaattaa

SEQ ID NO: 293912 - DNA, 1203 bp, Proteus mirabilis
atgggtagtattatgacttatgacgtaattatcatcggtgcaggattagtaggattaggggttgccagtgcattacaagaaagccaacctgagcttaaagtactggtgattgataaggaatctggccccgccgttcatcaaagtggccataacagcaatgttgttcattcggggatttactatacaccaggaagcctaaaggcaagactcgctaagcaaggtaacatcacgacttacaatttttgtaaacagcatcatctctattacgatcgttgtggcaaggtgattgtggcaactgatgaaaaagagctaccagcattagaaaatatctatcaacgtggaatacaaaatggccttgaagtgattaaaatgaccgagagcgagctaaaagccagagagccttatgttaatggtattgctgctttgcttgttcctgatgccggtattgtcaactatccggaaattgccgccaaacacgttgaaatcattcaagctcgaggtggagtatttgcctttaaccaagcagtaaatgcgattaatgaaacggacgaaacggtaacagtcaccacatctacaacacaatttaccgcaaagtggctgattaattgtgctggattatttagtgatcgggtagcaaaaatggcgggctacgataccggcatgaagatagttccctttcgcggcgaatattttatgctcaactcaaataaaaattatttagttaatcatcttatttatcctgtgccgaatcctgatttcccatttttaggtgtccattttacacgtatgtataacgggcatcgtgacgtaggccctaatgccgtattagcctttaaacgtgaaggctacaagaaaagtgatattgacttaaaagatctcactgaagtactaacctataaaggattttggaaaatagccggaaattatttaggtgaagggatggccgaattacgtcgttcctattcacataagctgtttgcccaaaatgcacaaaagcttattcctgctctacgtgaagcagatattcacccaggcccggcaggtgtacgcgcccaagctttaactcgcgaaggaaaattagtcgatgattttcactttgttaaaggtaaacgttcattacatgtatgtaatgccccttctccggccgcaacagcatcaattgaaattggtcgtgaaattgtaagagagcattttttattataa

SEQ ID NO: 293913 - DNA, 369 bp, Proteus mirabilis
atggctgaaaatgtcgttaatgatattctgaaatggttagaaactcagttacaacgtaatgagggtataaagattgatacgattgcaaataaaagtggctactcgaagtggcatttgcaacgtatttttaaagattttaaaggttgcacattaggcgaatatgtacgtaaacgtcgcttattggaagcagcaaagtctttacaagaaaaagacatgtccattttagatattgctttgatgtatggctttagttcccaagcaacatttactcgtatctttaaaaaacacttcaacactacaccagctaaatttagagaacatggtgagttaccagatacacgtcgttttatgtcatgtgaaaatagctaa

SEQ ID NO: 293914 - DNA, 1020 bp, Proteus mirabilis
atgtcaggcaaattgcgtctacttctttctgagtcttatgatccatggtttaacctcgcggttgaagagtgcatttttaaacagatgccagctgatcaacgagtcctttttttatggcgtaatgataatactgtggtgattggtcgagcacaaaacccatggaaagagtgtaatacccgaaaaatggaagaagatggtgtgaaattggcgcgtcgctcaagtggtggcggtgcagtatttcatgatctaggtaatacctgttttacttttatggcaggcaaacccgaatataataaaaccatttcgacgcaaattattttagatgggttatcgaaagccggcatacaagcaacggcatcaggacgaaatgatttagtcgtaccattggctgatggtgaaagaaaaatttctggctcagcctataaagagacaaaagatcgtggttttcatcatggtactttattaattaatgctgatttatctcgtttagctaactatttaaatccagatccgaaaaaactacaggcgaaagggatcacctcggtgcgctctcgtgtcactaatttagtggaattaaaacccgatataactcatgaaaagttatgccaagcgattactgacagtttttttgactattatggtgagcgtgttgaagctgaaattatttcaccacaaaaattacctgatttaccgggttttgcagaaacatttgcaaaacaaagtagttgggagtggaattttggtcaagcgcctgcgttttcacatctattagataatcgctttaaatggggtggtgttgagctgcactttgatattgaacgcggtacgattattagaagccaaatttataccgacagtttagatcccgcaccattagaaaagctatcgcagatgttagttggacagcgttatgcttctagttcgatgaaaagactattagcgcaattaatagagcagtacccaaataaccaatcagagcttgaagagctgcaacagtggcttgttcatgcgctttcttaa

SEQ ID NO: 293915 - DNA, 492 bp, Proteus mirabilis
atgagaaagcctactttttattctttcttactctgtattattctgctagctggatgctcatcgagtccctctaagcgtctcctacccgcgcccccgttaaaaacgcaactttctgatcctattatggtcattgtgcaattaaaatctcagctagagcaatggtatggtacgccttatcgctatggtggcatgagcccatcaggtattgattgctcagggtttgtgtataggacttatagtgatcgttttgatatacaactaccaagaatgactatcgatcaaactaaatatggtacacaaattagtaaaagtgatttgatgcctggtgatttagtatttttcaaaacaggaggaggggataacgggcttcatgttggtatttatgatactgacaatacctttattcatgcttctaccagtaaaggcgttattcgttcatcattagataatgcctattggaaaaaaactttctggcaggctcgtcgattgtaa

SEQ ID NO: 293916 - DNA, 402 bp, Proteus mirabilis
atgaaaaccggttacttatgggccatcgccagcgcattattagtcacagttgcacaactactgttaaaactaggtatgtcagaattacctgatctgcaattagaaaaacagtggtttgatcttcattggttatgggcaaacataatacctatcagcgttgttttcgtgggactgattggctacgtactgtcaatggtttgttggttattgactttacgtacaatccccctaaacaaagcttatccactcatcagccttagctatgtctttgtttatattcttgcggtggttttaccttggtttcaagaaacactgtcgtggtctaaaacaataggtatcatttttattatgctaggtgtttggttaataagccaaaaaacggagcaaacaacatcgcattag

SEQ ID NO: 293917 - DNA, 342 bp, Proteus mirabilis
atggccttttttttattacttattgttagtttgctaacctgtattggccaagtttgtcagaaacaagcagtggtgagttggcaaaataattcaaccactaaagccagaaagacgattttctggcttattactgccatcgctatgctaggctttggcatgttattttggttacgtttactgcaaatcctcccacttagtattgcttatccgatgttgagtattaactttattgtcgtcactttgataggccaatttatctataaagagacggttaatgtgaaacattgggttggtattgcctcgattatgttaggtattgtgttaatgagtatgcagtcatga

SEQ ID NO: 293918 - DNA, 1662 bp, Proteus mirabilis
atgttgaataaccgggcgagtaaaatcggggccatcctcttggctcttttttttgttcttacctacttatttccattgaacagccggttattatggcaacctgatgaaacacgttatgcggaaattagccgtgaaatggtggtgagcgggaactggattgttccccatatgcttgatatccgctattttgaaaaaccagtagcaggttactggattaataatattagccagttaatatttggccacaccaattttgccgtacgctttggttcagttatttctatcctattaagtgcgctacttatttatttattagcacggatgatgtggcgtaatcgtcaagtcgcttttgtggctagcttaatttatttatccatgtttttggtgtttagcgtcggaacttatagcgtacttgatccgatgttagcgctttgggttactgcaagtatggtgtgttgtttttgggcgttgaaagcaaccacggtaaaaacgcgtatactggcatggataacgctaggtttagcttgtggtatggcctttatgaccaaaggctttttggcattagctatccctgttatcgtgatgatccctgtaaccctttaccaaaaacagttcactcggatgttactctatggtgtgcttgctgttttaagtgcggcgttaattagcttgccgtgggttttagcggtggcgaaggctgagcctgattattggcactatttcttttgggttgagcatatccagcgtttttctggtgatgatgctcagcatagttctcctttctggtattacatccctataattttactgggtgttattccttggcttggattattaccaggggcactaactagtgcatggaagaagcgccgtaagcgtcctgaactctttttcttactatgttggtttgtagtacctttcctattttttagtatcgcgaaaggtaaattacctacttacatgttgccatttatgggaccgttggcgatgctaatggccaaatacggtgtagactgtgctagaaaatttaaaatgaaagcactgcgcattaatggctatattaatatttttattggtgttgctgctgttgttgcgatattaattattcaattggtttcttctaaacctatctatatgccttatgaatggtccaaatgggtattagcgattgtcgctttctcattatggggcatcattggttatctctgctctacattaaatggtaaacattggctatgggcagcctcttgctctttaggggtaagcttatgtattgggcaagccattcccaatagctctattgatggcaaattaccacaagagtttattcgccaaaatatcgataccctcaatgcgagcaaatatatagtcagtaacagcgttggtgtgggggctggattagcttgggaattgcaacgtagcgatatctacctttatgagagaacaggggaattaacctatggaatcgaatatccagattctcaacatagattactaaaacctgaaagttttgagcaatggttagaaaatgccagaaaagaaggtaatgtctctgtggtgatcacttataaagatccgaagaaactggcacagatgccacgacctgaagagttagtgacgaatcgtcgtatggctattttgacctatgagaaacgtaagtaa

SEQ ID NO: 293919 - DNA, 894 bp, Proteus mirabilis
atgaagaaagttggcttgagagtcgatgtggatacttatcggggtacaaaagaaggtattccacaattgctggatgtctttaacaagcataacattcaggccagctttttcttcagtgtcggtccagataatatggggcgccatttatggcgccttttaaaaccgaaatttctgtggaaaatgctaaggtcgaatgccgcttcattatatggactggatattctattagccggtacggcgtggccgggtaaaaaaattgccaaaaatttaggctatttgatgaaacaaacccaagatgcggggcatgaagtcggattacactcatgggatcatcaaggttggcaagctaaagtaggccgttggtcaacagaagaattaatgcaacaggttcgtttaggtgtagaagcactggaaaaagcacttgaaaaacctgtaaaatgttctgcggttgctgggtggcgtgctgatgaacgtgttctaatggttaaagaagctttccaatttgactacaatagtgattgtcggggaacgcatccatttaggccagttctagaaaatggttctatcggtacagtgcaaattccagtaacattaccaacttatgatgaagtggtcggtactaaggtaaaggacgaagattttaatcaatttattattgatgaaatcaaaaaagatcagggtatacctgtttatactattcataccgaagttgagggaatgtcaaaagcggctcaatttgagcagttattggcaatgattgcaaacgaaggcatcgaattctgtccattaagccatctactaccacaagatatagacatgcttccgatgggtaaagttgtccgatctgactttccaggtcgagaaggctggttagggtgccaacaagaggtctaa

SEQ ID NO: 293920 - DNA, 1983 bp, Proteus mirabilis
atgaaagcaatagtatttgcctatcatgatattggctgtgttggtttaaaagcacttgaaaaagcgggtttcgatattcaagctgtatttacccatactgacgatcctaacgaaaatcatttcttctcatccgtagcgcgtgttagcgcagaaatgggattaaccgtgtttgctccagaaaacgttaatcatccattatggattgagcgtattcgtgagatgaagccagatgtcattttctctttctattatcgccatatgctaagcgatgagatcctgaatttagcacctaaaggtgcatttaatttacatggctctttattacctaaatatcgcggtcgtgcacctatcaattgggccattgtcaatggtgaaactgaaacaggtgtcactttacataaaatgacggctaaagcagatgctggtgatatcgttgcacaagaaaaagtaacgattgaagatactgatacttcattaattttacatgaaaaagtcagagaagctgcggcgaaattaatggctcatacgttaccgcatatcgcctcaggtaactattcaacaacagcgcaagatgaaagccaagcaacttattatggtcgtcgttgtgctgatgatggtttaattgactggaatgcagatgctaaaacggttcataatttagttcgtgccgttactgaaccatacccaggtgctttcactttcttaggtgagcgcaaaatgattatctggcgcgcacgtccagtggcagataaccaaggtaaacgtccgggtactgttatttcaactgagcctttagttatcgcatgtgcgaaaggtgcaattgaagttatcacaggtcaaagtgaaaatggtctttatgttcaaggcagccgtttagccactgaaatggggatcgtgacagatgtacgcgttggaccaaaagcaacagcacaagtgaaacgtcgtcaacgtgtactgattttaggtgtcaatggctttattggtaaccacctaactgagcgtttattaaaagatggtaactatgatatctacggtatggatatcggttcatcagcaattgaacgctttattggtaaccctcgtttccactttattgaaggtgatgtcagcattcatacagaatggattgaatatcacatcaagaaatgtgatgtgatcttgccattagtagcgattgcaacaccgattgaatatacccgtaatccattacgtgtatttgaattagattttgaagagaacttaaaaattgttcgttattgtgttaaatacaataaacgtattattttcccatccacatcagaagtatacggtatgtgcgatgataaagagttcgatgaagataattcacgcttaatcgtcggtcctattaataaacaacgttggatttactctgtttctaaacagttattagaccgagttatttgggcttatggtgctaaagaagggctgaaattcactttattccgtccatttaactggatggggccacgtcttgataacttaaattcagcgcgtattggtagctctcgtgcaattactcagttaattttgaacttagtggaaggttcaccgattaaactggttgatggtggtgagcaaaaacgttgtttcactgatattaatgatggtattgaagcattattccgcattattgaaaatcgtgataacaaatgtgatggtcagatcatcaatatcggtaacccaactaacgaagcaagtattcgtgagctagcagaaatgctgttagattgctttgaaaaacatgagttacgcggtcacttccctccatttgctggcttcaagaaaatcgaaagtagcagttactacggtaaaggctatcaagatgttgaacaccgcaaaccaagcatcaaaaatgctgagcgtctattagattggaaaccaactatcgaaacacgccaaacggtagaagagacattagacttcttcttacgtggtgcagttgaagagttaggtaataagtaa

SEQ ID NO: 293921 - DNA, 981 bp, Proteus mirabilis
gtgtcaacatttgaaaaaatcaataaagtatcagtcgttattcccgtttataacgaggaagagagtctcccacagcttttagagcgaacaatcaaaagctgtaaacagttagaacaagagtatgagctgatccttgttgatgacggaagcagcgataattcagcaaaaatgctagaagaagctgccaacattgaagataaccatgttattgcgattattttaaatcgcaactatggtcaacactccgctattatggcgggttttaaccaagctgatggggatttagtcattaccttagatgctgatttacaaaacccaccagaggagatcccccgtttagtggcaaccgcagaagaggggtatgatgttgtcggaactcgacgccgtaaccgtcaagattcgtggtttcgtaaaacggcctctaaaatgattaatgccatgataaccaaggcaacaggtcgttcaatgggggattatggttgtatgttaagagcatatcgtcgtcatattattgatgcgatgttgcaatgccatgagcgtagtacttttatcccaattttagcgaataccttcgctcgtcgtacgattgaaattgaagtcgctcacgctgagcgtgaatatggtgattcaaaatacagtttcttaaaactcatcaatttgatgtacgacttattaacctgtctgacaactgcaccattacgtttattaagtgtcgtaggtagtgtgattgctgttgccggctttttacttgccgtattactgattgtactacgacttattttcggtgcaatttgggcggcagacggagtgtttacactctttgctatcttattcatgtttatcggtgcgcagttcgttgcaatgggtctattaggtgaatatataggccgaatttataatgatgtaagagcgcgtcctcggtattttatccaaaaagtggttggcgttaaaaaacccaacaaaaatcaggaagaagactaa

SEQ ID NO: 293922 - DNA, 1146 bp, Proteus mirabilis
atgagtcactttcttccattctcccgtcctgctatcggggatgaagagattaaagcagttgaaagcgttttacgctccggctggatcacaacaggtccccaaaatcatcagctagaacaagatttttgtgaaaaatttggtagcaaacatgctattgcggtttgttctgcaacagcgggtatgcatgttgttttgatggcgatgggaatagggcctggtgatgaagttattacaccttcccaaacttgggtatcaactatcaatatcattacgttattaggcgcagagccagtaatggtcgatattgatcgtgacacattaatggttagcgctgaatcggtaaaaaaagcgattaccccaagaaccaaagcaattatccctgtgcattatgccggagcgccttgtgatcttgatgcactcagagcgattgctgatgaggctggcattcctctaattgaagatgcagcacatgcgataggtactcgatataaagatgaatggataggtgagaagggaacttctattttttcttttcatgccattaaaaatgtcacttgtgccgaaggtggattagttgttacggacgatgatgaattagccaatcgagtccgttgcttaaaatttcatggtttgggtgttgatgcttttgatcgtcaaattcaaggacgtaaacctcaagcggaagtcgttgagcctggttataaatataatctctcggatattcatgctgctatcgcggtagtgcaattaagtcgcttagaagaaatgaatgctaaacgtgctgagttagttgccctttatcgtgaaaaacttcaagattcaccattggaaatgttaagtgtgccggaatatccacacttacatgctaaccatctctttatggtcagagttgataaaaatgcctgtggtatcgatcgtgatacatttatggaaaaactcaaacaaaaagagattggtacagggcttcatttccgtgctgcgcatacacaaaaatactatcgtgagcgctacccttcgttatcccttcctcaatcagaatggaactctgcaacgttatgctcgctgccgctgtttcctgatatgagcaataaagatgttattcgcgttgtcgatgcgatcaatgaaattctttcggagcatatctag

SEQ ID NO: 293923 - DNA, 750 bp, Proteus mirabilis
atggcacaattaaaactatataaattagctgtcaataaaagactatatggtattactgaacaagttaatgatggcgaacgcattcatttaattggcgcgaatggggcgggtaaaagtacgttgttaatggccattgctggtgaagtttcatacgttggaaatatatttttaaacgaaacttcaatgagggattataaaattgccgaactttctagaatacaaagcgttgttagacaacaatcgttagctttgccatttatgccagtgtttcattatctttctttatcctatcagttatcaaaaatggatattcaagaattgaatgcactattaagcgattttcaaatcaataaattattgtcaaaaaatattcatcatttatctggtggggaatggcaacgcgttcggattgttgccacttttatacaattatggtcaagcgatgatttaacaggaaaattaatgatgcttgatgagccgacaaataatttagatattgtacaacttactttattggataaatggctagataaattttgtctacaaggtggcagtattattatgagtactcatgatttgaatcattcttatctaaaagcagataagttatggtttatgttagagggaaaaataatcaactctggtgactcagcacttttgttggatgaaaatttattatctactacatttaatactaagattagatgtaatagatcagcaaatagtgtaatttggcaagtaatagagtga

SEQ ID NO: 293924 - DNA, 1035 bp, Proteus mirabilis
atgggctatttactaaacaatatgaataatcaatatgatgatccgcttaatcaattacgacacaaacagcaaattagtgataagctaaaactcactttgctggtgttagttttatttgttcttattgttatctcactttcagccggtgaaatttggttattccccaataaatggctcactgaagaagctagtttatttatttggcaaattaggcttccaagaatattggctgtgatgatggttggcgcaagcttagcgattgctggtgccattatgcaggcaatctttgaaaatccgttagcagagccgggacttttaggtgtaagcagtggtgcgggtgtttgtgttgtgttactgattgttttccaattaggaactgcatactggttaataagcagtgccgcgatattaggggctttggggatcacctgcttattaatgtttttctcacaaataaaaaaactatctaatgctcaattattattaataggcgtagcattaggggtattagcaagtgctgttatgacttggctggtctattttagctctgcgttagatttaagacaattaatgtactggcttatggggagctttagtggcattgactggcgtcaccaaatattattttgggcattacttccaatcatcacacttcttatttggcaagccgatattttaaattacctttctctggggagttttgaagccaaaaaactcggcatttctgtgattatatggcgtaattggtttattttaaccgttggtttattaattggttttagcgttgctctagccggcgcaattagttttgtcgggttgattgtaccgcatttattacgattgtctggtatcacacattataaaaccttgttaccgggctgtgctttaacgggagcgagtttactgatattcgctgatttaatatcaaggctgatgttaaatggcgcagaagtccctattggcgtgataactgccaccttaggcgcacctctttttatttggttattagccactaaacagatggagcgcttataa

SEQ ID NO: 293925 - DNA, 297 bp, Proteus mirabilis
atggcgcttacaaaagctgaaatggcagaaaatctgtttgaaaaacttggcgttagcaaacgcgatgcaaaagaccttgtagaagccttttttgaggaagtgcgtcgttctctggaaaatggagaacaggtgaagctgtctggattcggaaactttgacctacgtgataaaaatcagcgcccaggtcgtaacccgaaaacaggggaagatattcctattacagcccgccgtgttgtaactttccgcccgggacaaaagttaaaaagccgggttgaaaatgcgacaccaaaagagtaa

SEQ ID NO: 293926 - DNA, 2388 bp, Proteus mirabilis
atgaaattcagtgaactttggttacgtgagtgggtaaacccagcaattagtagcgaagagctttctgaacagctaaccatggctggccttgaagttgatggtgtagagcctgttgccggtgattttcacggtgttgttgtgggtgaagtggttgaatgtggacaacacccaaatgcagataaactacgagtgacaaaagtcaatgtcggtggtgagcgtttattggacatcgtgtgtggtgcgccaaattgtcgccaaggcttaaaagttgctgtagcaacggttggggcggtattaccgggtaactttaaaattaaagcagccaaactacgtggtgagccttcagaaggtatgctgtgctctttttctgaattagctatctcagaaaaccatgaaggcattatcgaattacctgctgatgcacctatcggtaccgatattcgcgaatacttaaaattaaatgataatgcgattgaaatcagcattacaccaaaccgagcagattgcttaggtattatgggtgttgctcgcgatatcgctgtcattaataaaatgacatgccaaatccctgatatgtcaccaattgcagccacttcttcagcgacatttcctgtgcgagttgaagcaccacaagcttgtcctcgctatttaggtcgtgttttcactaatgtgaatgtgaaagcgaacacaccattatggatgcaagaaaaattacgtcgtggtggtattcgctctatcgatccaatcgttgatatcactaactttgtcttacttgaaatgggacaaccattacatgcgtttgatcttgaccatgtcgatggggctgtggttgttcgtatgggcaaagagggtgaaaaactaactttacttgatggtaatgaaatcaccttaaaagatgatgtactggttattgctgatgaaaaacaagcattaggaatggcaggtattttcggtggtgaatcttctggtgttaatgaagcaactaaaaacgtatttttagagtgcgcattcttctctccattagcgatcaccggccgtgcacgtcgttatggtttacataccgatgcatctcatcgttttgagcgtggtgttgattcagcgctgcaatatcaggccattgagcgagcaacgaaattattactcgaaatttgtggtggtgaagtgggggaaattattgatgtcaccaatgacagctatttaccccatgtcgctcctatcaaattaacacgtgcaaaactagaccgtttattaggtcatgttattgatgatgaacaagttgttgattcgttaacacgtttaggttttggcgtcaccgttgaaaatgacgggtggttagccactgtaccttcatggcgttttgatgttgaaattgaagaagacttaattgaagaagttgcacgtatttacgggtataacaatattccagatgtacctttacgtgccgatctgattatgacagaccaccgtgaagcggatctgccattaaaacgtgtaaaaaccatgctggttgataatggattccaagaagctatcacttatagctttgttgatccgaagatccaaagcttactacatcctaatgaagaagcgttgatcttacctaacccaatttctgccgatatgtcagccatgcgtttgtcattgttgaccggattattaaccacagtggtttacaatcagaaccgtcaacaggctagagttaggttatttgaagcaggtctgcgttttgttcctgataatcaagcagaatatggaatacgtcaggaacttatgctagctggtgtgatcgcgggcaaccgttatgaagaacattggactttagagaagcaaactgttgatttctttgatttgaaaggtaatattgaatcaattctggaattgacaggccagttagatgaaattacatttaaaccagccaatcattcagcgctccatccgggacaaagtgctgagatttatctgagaaatgaatatattggctgtattggtgttgttcacccagagcttgaacgtaaacttgatttaaacggccgtacggtagtattcgaaatacgttgggacgcaatcgcaaaccgcaatttaccgcaagcgaaagctgtttcacgtttcccttcgaatcgtagagatatcgctgtagttgttccaaatgatgtggctgcagaagatattttagctgaatgtaagaaagttggcggaaatcaaatagttggcataaacttatttgacgtgtattgtggtaagggagtagcggagggttataagagcctcgctattagcttaatcttgcaggatatcgagcatactctggaagaagatgagattgctgccacagtcaatacctgtgttgcagcattgaaacagcgattccaagcatccttgagggactag

SEQ ID NO: 293927 - DNA, 984 bp, Proteus mirabilis
atgccacatctcgctgaactcgttgctcaagctaaagcagctatcgaagaggcacaggatgttgctgcgctggattcggttcgtgttgaatacttggggaaaaaaggtcatttaacgctccagatgtccacgctgcgcgacttacccgctgaagagcgtccagctgctggagcggtcattaatcaggcaaaacaagaggttcagcaagcactgaacgctcgtaaagaacaaatggaatcagcgctattaaacgaacgtttagcggctgagaaaattgatgtctctttgcctggacgtcgtattgaaaatggtggtctgcaccctgttactcgcacaattgaacgtattgaaactttctttggcgaattagggttctctgtggaatcaggccctgaaattgaagatgactatcataactttgatgcgttaaatattcctgctcatcaccctgcaagagctgatcatgacactttctggtttgatgctaaacgtttattgcgtactcaaacctctggtgtacaaattcgcactatgcaaaataaacagccaccgatccgcattattgcacctggccgtgtttatcgtaatgactatgaccaaactcatactccaatgttccatcaagttgaaggcttaattgttgataaagacattagcttcactaatttaaaaggaacactgcacgattttctgaaaaacttctttgaagaagatatggaaattcgcttccgcccatcctattttccatttacagagccttcagctgaagttgatgtaatgggtaaaaatggcaaatggttagaagtcttgggctgcggtatggtgcatccaaatgtgttgcgtaatgtaggtatcgatcctgaagtttattctggttttgctttcgggatgggtatggaacgcttaactatgttacgttacggtgtcaccgatttacgttcattcttcgaaaatgatcttcgtttcctcaaacagtttaaataa

SEQ ID NO: 293928 - DNA, 357 bp, Proteus mirabilis
atggctcgcgctaaacgtggtgttatcgcccgtgctcgtcacaagaaaattttaaagcaagctaaaggttattacggtgcacgttctcgtgtatatcgtgtagctttccaggctgttatcaaagctggtcaatatgcgtaccgtgaccgtcgtcagaaaaaacgtcagttccgtcagctgtggattgcgcgtatcaacgcagcagctcgtcagaacggcatgtcttacagccgtttcatcaatggattaagaaaagcatctattgaaatcgaccgtaagatcctggcggatatcgctgtattcgacaaagctgcatttgctgctttagttgaaaaagcgaaaggtgctctggcttaa

SEQ ID NO: 293929 - DNA, 198 bp, Proteus mirabilis
atgccaaagattaaaacagtacgcggtgcagctaaacgctttaaaaagactgcaggtggtggttttaagcgtaagcacgctaacctccgtcacattctgactaaaaaatcaactaagcgtaaacgtcatttacgtccaaaaggtatgatctctaaaggagatttaggcctggtcgtagcttgcctaccatacgcataa

SEQ ID NO: 293930 - DNA, 339 bp, Proteus mirabilis
atggactacggcaaattcctctatgagaaaagtaagactctcaaagaacagaaaaagaaacaaaaggttattcaggtcaaggaagttaaattccgtcctggtacagatgaaggcgactatcaggtcaaactacgcaacctgattcgttttcttgaagatggcgataaagccaaagtcacactacgttttcgtggtcgtgaaatggcacaccaacaaatcggtatggaaatgcttaatcgcatccgtgaagatttggatgaactggcttctgttgaatctttccctaataagattgaaggtcgtcagatgatcatggtgctagcgccgaagaagaaatag

SEQ ID NO: 293931 - DNA, 1929 bp, Proteus mirabilis
atgccaattattactcttcctgacgggagccaacgtcaatttgaaaatgcagtctctgtcatggatgtcgctgcagatatcggtcctggacttgccaaagcctgcattgcagggcgcgttaatggtgagctggtggacgcttgcgaattaatcgagcaagattcacaactggcgattattaccgcaaaagacgatgaaggtcttgaaattattcgtcactcttgtgcccacttattaggacacgcaattaaacagttatggccacaaaccaaaatggcgattggtcctgttatcgaaaatggtttctactatgatgtggatttagatcattctctgacgcaggaagatttagaaacgttagaaaaacgtatgctagagttggcgaaaacagattacgatgttattaaaaaacgcgtaacttgggcacaagcacgggaaacttttgttgctcgtggtgaagattataaagtcgctatccttgatgaaaatatcagtcaagatgcacacccagcactttatcatcatcaagaatatattgatatgtgccgtggcccccatgtgccaaacatgcgtttctgccatcactttaaattacagaaaatcgcaggtgcatactggcgcggtaatagcgataacaaaatgctacaacgcatttacggtaccgcttgggctgataagaaacagttaaaagcttatttagaacgtttagaagaagccgctaaacgtgatcaccgtaaaataggtaaacaacttgatttatatcatatgcaagaagaagcgccgggtatggctttctggcataatgatggttggactattttccgtgagttagaaacatttgtacgttgcaaattaaaagaatatgattatcaggaagtaaaaggtccatttatgatggatcgtgttctttgggaaaaaacaggtcactgggaaaactacaaagagaatatgttcactacttcttcggaaaaccgtgaatattgtatcaaacctatgaactgcccaggccacgtgcagatttttaaacaaggtctacgttcttaccgtgatttaccattacgtatggctgaatttggtagctgtcatcgtaatgaaccctctggtgcattacacggtttaatgcgtgttcgtggctttacacaagatgacgcacatatcttctgtacagaagaacaaattttaagtgaagtaaataactgcatcaaattgatttatgatgtatattctactttcggatttgaaaaaatcgttgttaagctgtctactcgtccagaaaaacgcatcggtgaagatgctttatgggatattgcagaaacagacttagcaaaagccttgactgataacaatattgaatttgaatatcagccgggtgaaggggcgttttatggccctaaaattgaatttacactttacgactgtttagatcgtgcatggcagtgtggtacagtacagctggacttctcattgccaggtcgattaggcgcttcttatgttgctgaaaataatgagcgtaaagtacctgttatgcttcaccgagcggtgttaggatcattagaacgttttatcggtattctaactgaagaatacgcaggattcttcccgacttggttagcaccacagcaggttgtcgtgatgaatatcacggatggacaggctgattatgtacaaaaactcgtcaaagaattgcaagatgccggaattcgtgcaaaagcagacttgagaaatgagaagattggctttaaaattcgtgaacatactttacgtcgtgttccgtacatgcttgtttgcggtgataaagaagtcgaatcaggcaaagtagcggttcgtactcgtcgaggtaaagaccttggcagtatcgacgttaacgattttaaagaaaaacttctgcaagaaatcagaagcagaagtcttcatcagttggaggaataa

SEQ ID NO: 293932 - DNA, 912 bp, Proteus mirabilis
atgaatttaataataaaggggcttctttatcctttttttgttttcttttcagcatatgcattatcttttgggtgcagtgttgataatggatatgatattgagtctggtaattataatatttatgtgcaattagaggctgaagtgcaaccttatcagaatttaattgttgatctctctaggcatttaaaatgttggaatagttatggtggatggcaagatgttgaccatatcaatttagaaccagggacgggcttatctgggccactatttaattttagtggttcagtatattggtatggaaatacatattcattacctttaaatagtgcgactaaagttttacatatcggtgatcttacccctatgccgatgccaatgatgttgtatttaacgcctataaataactcacctgcaggaggagtactcattagatcgggtgaaactattgcaactattaatatgtataaaatagcggattgggatggtggtaatcctaaatattttacgtgggaaatagtgtctaaatatgatgttacaatgccaattagtggatgcgacgttagtagccgaaatgtcaatgttaatttacctccttacccaggcgaagctccggtcaatttaaatatccactgcgcgcaaccacaaaatatatcattttatctttccggacaaaccactaatgatgatacaacctttattaatttagcaggctcggcaggggaagtctctaaaggtatgggagttcaattaatgcgtaatggatatgtaatccctgctaataaagcaatatctttaggtagagttaattcgtcgacttcattaggtttaaaggcaaggtatggtatgactggcgagcgtgtaactgctagaaaagtaaaatcaattatagatgttaactttatatatgagtga

SEQ ID NO: 293933 - DNA, 687 bp, Proteus mirabilis
ttgttattacctgaattacatttgcgatgttatacacaagatacagtatcacatcagcatgagaatatctggcagatcatctttggcttaaccggaacgatggaagttaatttcaatcggcaagattttcttatttctcaacaaaactatttaattatcccacctaccatcgatcatgcttttgccggtcatctcaataataaaaatcttattttagaacttcctgtcacatcacagtggcgactgaatgaaagagggggaatgtttgccttatcacccgcagcaataggattattagcgtgggtacatcaataccctcaagcgccagaacatcattccactctcgcacgtctgctattagcccaaatgaaagtacaaccaagctggggggataaattagatctctggctagaagataaactgcatatgccattaacagcttctgatattgctggtgcattaaacatatcaatcagtacgctacagcgcaaagtaaaagcggaattaggcatatctattatgcagtatgtgatgcaaaagcgactcgctaaatccgcagagttgctcaaatacacatcattaacgattgaaaatattgctttagcggtagggtatgattcacattcggcttttagccaagcttttcgtcaatactttcataaaacccccagtgaatatcgacagtaa

SEQ ID NO: 293934 - DNA, 348 bp, Proteus mirabilis
atgacagacaccaccaacaccatcgaatgggatgactttttacgggtagaaatgcgggttggcacaattataagtgctgaaataaataaaaaagcgaagaaacccgcttatgtaatggaagtcagcttgggagagctggggactaaacgctctagtgcgcaaatcaccgtgaattatactcctgaagagctaattggtcgccgagttttatgtgtttgcaattttcctattaagcggattgcagggatcaagtctgaggtgttgattaccggggctgctgatgaaaacggtgctatcgttctcgcagaatttaatttacctgtgcctgatggggctcgtttagcatga

SEQ ID NO: 293935 - DNA, 597 bp, Proteus mirabilis
atgagaaagataacagactggactaccttagaaggtaatttagtacgtttagtaccattaagcatggagcatgcatcaccattacgtgaactgattgctaaagataggcctgatgaactttggtttaccacagttccttctgtcactacattaaaacaagatattgagcataaaagacaattacaaaaacaaggagtaatgcttccttttgccgttattgataaacgccgtgagcgtgtggtgggagtgacgacctatatgaacgtagataaccatacacctcgagtagagattggttcaacatggtatgcaaaagaggtacaaagaacgggtattaataccgaggctaaatatctattacttaaatatgcattagaagatctgcaatgtattgctgttgaattccgcactcatatcttaaatcaaaccagtcgtagagcaattgagcgtttaggtgcaaaactcgatggcatattacgtaatcatcgtttaaccaccaacggtcaacgcagagatacctgtatctatagtattaccgattatgattggcaagcggtgaaaacacatcttgagtggttaatgaaaaaatacctataa

SEQ ID NO: 293936 - DNA, 735 bp, Proteus mirabilis
atgtactctgtttaccagttttttcaggctatcggtcttggtcttattttacttctaccgctgactaacccactcaccacggtcgcgctttggcttggtctgtcggggaatatgaccaaggaacagcgtaatcaacaatcctttatggcatgtgtctatatttttattattatgaccatcgctttttatgcgggtcgtgtaataatgacgacctttggtatctctattccaggccttcgtattgctggggggatgatcgttgcttttattggttttagtatgttatttccccatactcccaatgtggacgatccgctttcagaagaaaaaaatccgcatcgaaatcctcaggcgcccaatattgcttttgtgcccttagccatgccaagtaccgcagggccgggaacaattgcgatgatcatcagtacagcagcatcaattccttcacgtacagatattgcgcagtgggtattatacgtagcacctattaccactttctttttaattagcctgattgtttggctttcactgcgcggttcaaccggtattatgcgctatctcggtcacagtggtattgatgccatttctcgtgttatgggatttttattaatttgcatgggagttcagtttatgattaatggtgtacttgaaatcattgctgatctccccgctttattacaacaagctcaatcagcggctgctgccagcttatcagaaaagttatccgctaaatga

SEQ ID NO: 293937 - DNA, 702 bp, Proteus mirabilis
gtgaagaccaacataatatttcctttggcaattttactgctggcagggtgtgcagatcccaatcaccaaacggcgaaaaaagagacaccgcgatttttaaatagccagcctgtagagcacagagttaataatgcctcaatttctactgctcaatggaaaaacaccccttttgatgagcatattaaacaagcttcagcccgttatggtgttgatgaaaccttaattaaagccattattcaggtagaatctaattttaggccagaagtgataagtaaatcgaatgcggttggattaatgcaaataaaggcatccacagcggggagagatatttatcaaaatagaggaaaagcagggcaaccaaccaccgctcagctaaaagatccggctactaatattgatttaggaactgcttatattcaattattaagagagcgccatttatctgggatctccaatcctgaaacactctattacgcgactattttggcttatgtgaatggggcgggtgcattactcagaacttttgataaaaatagagatgcggcgattgccaaaattaatgccatgagcgcggatgatttttatcgttacgttgaaaaaaatcatcctgcatctcaagcaccacgctatttagcgaaggtcaaagcagcctatcatttagcggataacttttctgataagctggcagcagccgctgattga

SEQ ID NO: 293938 - DNA, 909 bp, Proteus mirabilis
atggatatgttccgctctgtaaataaaatttcgcttacggcattatgcttagttgcctcaatcttctttataacccctgcacaggcaaaagataagctaaaagttgtcacgacttttactattatccaagatatcgcacaaaatgttgctggcgatgctgccgttgttgaatctatcaccaaacccggtgcagaaattcatgattatcaaccaacgccaaaagatattgtcaaagcgcaaaaagctgatcttattttatggaatgggttaaatcttgagcgttggttcgaacgttttttcaatgaattacgtaatgtgcctgcggtcgttgtcactgaaggtattacccctatgcctattcgtgaaggagcttacaaaaacaacccaaacccacatgcatggatgtcgcctaataatgcattaatttatatcgaaaatattcgtaaagcgctcgttgaacacgatccagataatgccgcaatttataaccaaaatgccgcgcgttacgctgaacaaattaaacaacttgatgcaccattaagagcaagattagcgcgtattcctgaagaaaaacgctggttagtaacgagtgaaggtgcctttagctatttaaccaatgattatggttttaaagaagtgtatttatggccaattaatgcagaagagcaaggcacccctcaacaagtaaaatacgtgattgataccgtaagagaacaccatattcctgtcgtgtttagtgaaagtacgatttccgataaacctgctaaacaagtgagtaaagagactggtgcaaaatatggtggcgttctttatgtagactcactttctgccccgggtggagaagtccctacttatattgatctacttaatattactgtcgataccattgcgaaaggatttggacaatga

SEQ ID NO: 293939 - DNA, 888 bp, Proteus mirabilis
atgaatgataaaaaaataaatcctactcttactgttgataatgcaacggtaacctataacaacggtcacactgctatttatgatgcaagtttctctatcactggtggcacaatttgtgccctagtgggcatcaacggtagtggtaaatccacactttttaaaaccattatgggattagtcaaaccttcaaaaggtaccgtaacattaaataatcaacctattcagcaagcacttaaacagaatatgattgcttatgtgccacaaacagaggaagttgactggaactttcctgtactggtttctgatgtggtgatgatgggacgttatggaaaaatgggtttttttcgtattccatcgaaacaagatcatgaagtggttgaagcttgtttagagcgtgtcggcttatcaggccttggacatcgccaaattggtgagctatctggtgggcagaaaaaacgggtattcttagcacgagcaatggcacaagaaggcaccgtactgttattagatgaaccttttactggcgtggacgtaaaaacagaaaatgccattattgaattattacgtaacttgcgtaaagaaggtcacctagtattagtatcaactcataacttaggtagtgtacccgaattttgtgatcacgttattttaattaatagaacagtgcttgatagcgggccaacagaaaccacctttacccaaaagaatttagagcatgcttttggtggcgtattgcgtcatatcagcttatcaggccctgatcttcacgacgacgacgatccacgttcacttaccgttattactgatgatgaacgcgctgccgttttctatggtcaccatgaacaacatactcccgctcatcaaagtaagcgtaaacaaggagattag

SEQ ID NO: 293940 - DNA, 912 bp, Proteus mirabilis
atgctagaattactcctacaaccttttgagtataactatatggtaaaggctatctgggtaagtgccttagttggtgctgtctgtgcctttttatcttcttaccttattcttaaaggttggtcattaatgggagatgccctctcccactccgtcgttcccggcgttgccggtgcttatattttagggttgccgtacgcagtgggtgctttttttacgggtctacttgctgctttatcaatgacttttattcgtcacatcacacgattacgtgaagatgcggtgattggctttattttttctactttttttgcttttggtctgttgctggtttcattaaaccctactgccgtcaacgttcagaccattattttagggaatattctcggcattgctgacgaagatgtctggcaagtcgttatcattactggtgtctcttttcttattctattttgtatgtggaaagatttattagttgtattttttgatgaagtacatgctcgctctattggtttatcccctttaaaactaaaaatcatcttctttaccttgctcagtgcatgtaccgttgctgcgctacaaacggtcggcgctatcttagttattgctatggtggttactcccggcgctaccgcttatttactcactgaccaatttaaacgactcgctattatcgctatttgtattggtacagtaaccagtgctgttggtgcttatctaagttatttctttaatggtgctacggggggcgttatcgtcacaatgcaaaccgcccttttcttattagccttcttatttgcgcctaaacatggcatgttggcagcccgtcgccgcgcacgtcaaagttcacaagcacttatttcacaatcccagcatccaaaagacgttactcaacaagaagaggtgcaactatga

SEQ ID NO: 293941 - DNA, 858 bp, Proteus mirabilis
atgaatgaattaatggaatttttcattgaaccttttcaatatccttttatgcaacgtgcaattattgccgcggttatcattggtatcgcctgcgctattttatcttgctatatggtgttaaaaggttggtcactaatgggagatgctatttctcacgctgttttacctggcgtggtattagcttatgtcactgcaattcctttaacgataggggcttttctttcgggcctattttgctcatttgcaacaggttatttaaaagagcatagccgaataaaagaagatacggtaatgggaattgtcttttctggtatgtttgctgtcggtttggtgatcttcgctagtgtagatactgaccaacatttaatgcatatattatttggtaatatcttaggtatcaccccagatgtgcttatacagattagtgctatttgtttaattactattactattatgctggttaaacaaaaagactttatgttgtattgtttcgaccctaatcaagcaagaattgtcggtctcccggtcgctttattacattatggcttactctctattttggcgttaacgattgtcgcctcgatgcaagccgttgggattattttagtggtcgccatgctgatttctccggggatcaccgcttatctattaacgcgaagcttctctcgaatgatcactctcgctatccttttttctgttatatcgagtgttattggtacatttatcagttttcatattgacggtgccacaggcccttctattgtactcacgcaagcggtgttctttattattgcattactctgtaatcagattaaattggcaaaaataaaacggcaaactaaacccgccaatgcctaa

SEQ ID NO: 293942 - DNA, 873 bp, Proteus mirabilis
atgtggcagaatattggtcgtttgcttgaatcaaatttaggattttcagcaaagatcagcgaaaaacaccacctttcaagcggtgatatacaccacacttggaaaattcaatatggtgagatccctgtctttgtaaaatctaacctacgggaatttttgcccacctttaaaaatgaagcagaacagcttgaaatgttggcaaaaagccaaacgatccgtattcctcgcgtattaggcattggcaatagtaaagatactagcttcttactgttagaatttctgcctgtgcaaccttttacacctcacagcgcgtattgttttggtcaacagttagctaaattgcatcaatgggaagaacaaccccgttatggttttgatttcgatacccatatagataccacacctcaagcaaatggttgggagaagcgctggaattacttctattcggaaaagcgtatcggtatccagttgcaactcgcttcagagaaagggatggttttcggtgatatagaagaaatcattcaaatcattaatcaccgtttagccgatcatcatccacaaccctcactattacatggcaacttatggcctaaaaattgtgctgctataggtcaatctgaaggaacgatgttcgatcctgcttgttattggggtgatcgcgaatgtgatattgccatgttaccgctatgctcttctgtgccagccaatatttttgatggttaccaaagcatctggcctttatctgaaaaattcctatcacgccagcctatctaccaactctactatttccttaatcgctgtcatttattcggtgaagaaaaagattacctagcagccagaaaaatcattgatgatttgctcggcacacactaa

SEQ ID NO: 293943 - DNA, 540 bp, Proteus mirabilis
atgagttatcaacatgcaggaatatatgccatcgtaaaacgtgttattggttggcttatttttattcctgcctttatttcaacgacagtttcgttgattgagttagctgcgatgccaagagcaaatggcgagggtgttaatgctgtaattaatgatttttttcgagtattagcagaaatggtacaatttaacaccccgtggctagactttttttggcgtcattctccagtacctaacactcaaataggttttagccaacagaatattatcttctttgtgatcttctttttaatgtttattggcttagcactgagtgcatcagggttaagaatgtatcgccaagtgaaatatttaaaggaaaatattcaagatcaactaattattgaacgagcactaaaaagtggtattacagcgcaagagctagagcagaatataaaattgccaagacatacactatttactcaagtcatggtgctgtatatttcacctattattgtgatcgcaattggttattttctgctgaaatttttaggctggtag

SEQ ID NO: 293944 - DNA, 669 bp, Proteus mirabilis
atgtcttttaaattgcccatcgaagccgctatttttgatatggatggtttgctaatcgactcagagccgttttgggcacaagcagaacatgaggtctttgcacaattaggtgtcgatttatcacttgctgacagcatgcccgacaccgtcggcttaagaatagatcaagttatcgaactttggtatcaagtatcaccttggcaaggcgtaacacaacaagaagctaaagaaagaatgattgctcgcgttgtacaacttattgaagataaaaaaccgctgctccctggtgttgaacatgccctatctttatgtcaatcattaggtttaaagatagccttagcctcagcatcaccgcattttatgctagagcgtgtacttgagttatttaatattcgtcattacttctctgctgttgtctctgcagctgatttagcgcacagtaaacctcacccagaagtctatctcaatgctgctaaggcacttaatgtcgcacccattaattgtgtctctttagaggactcacgcaatggtatgattgcttgcaaagctgcaagaatgcgctcaattgttgtgcctgcagcggagcagtttaatgacaaatgttggggattagccgatgttaaaattgcctctctcaacgaattaaccaaatctcaattattaggctaa

SEQ ID NO: 293945 - DNA, 567 bp, Proteus mirabilis
atgacagccgaaggacatttacttttttctgttgcaacactcgtcttagcacagaaattagaaataacccccgttcttgctcaaggtgattggtttcacatgatccctgctgtcttattaggttcactactaccagatttagatcatccaggctctatattaggacgcctctttcggataatctcattaccgctatcaaaactctgtggtcatcgtggcttcacacatagcctactcgccttttgtggtttagccattttatgggaaacacaagttgcgccttatatcacgatttcggctgatttttttcacgcccttttgctaggttacttaagtcacctactggcagatatgctaacaccatcaggtgtaccttttttatggccactaaaaatgcgttttgccttaccgattttagcgaaaaaaaatagcaaaaaaggagaacgatttatttctgtcatcatcttagttggtgcactatttctgcccccacacctaactttttctcttcccacacaaataaatcactggttacaaatgtaccacgataaacgtacacctttttaa

SEQ ID NO: 293946 - DNA, 1392 bp, Proteus mirabilis
atgaattttccgttaattattaacgtactcgtctttgttgtgctattactcatcttggctaaattaagccaacgtcagtggagcctgtcaaagaaagttcttgtcggtttggtctttggggtggtgtttgggctggcgttacatgcattctatgacgcacacgatcctattattaaagaatctatcctttggtttaacatcgttggtaacggttacgtgcaactgttacaaatgattattatgccattggtatttgcttctattttaagtgcagtatcacgtttacaccaagcatcatcattgggaaaaattagtgcactaaccattggtacacttctatttacaacggcaattgctgctcttattggtattgttatagccaatatctttggtttaacagcggaaggtcttgttcaaggggaacaggaagcgcagcgtttagccgctattcaacataattatataggtaaagtgtctgacttaactgtacctcaattaattttatcttttattcctaaaaatccatttgccgatttaactggtgcaagctcaacctcgattattagtgtagttatctttgcggtattcctaggaatggctgcaataaaactgcttaaagaagataaacctcgcggtgaaaaagtattagcagcgattgatagcttacaagcgtggatcatgaagttagtccgtatcgttatggcattaacaccttacggtgtaatggcactgatgactaaagttgtggcaagctccaatctgcatgacattattcaactcggtagcttcgttgttgcctcttatgttgcgctgggcttaatgtttgtcgttcatggtttattagttggatttactggcttaagcccaattaaattcttcaaaaaagcaggaccattattagcatttgcatttacaagtcgttcgagtgcagccagtattccattaaatatcgaaacacaaactcgtcgcattggtgttcctgaatcgattgccagtttctcatcgtcttttggtgcgacaattggtcagaatggttgtgccggtatttatcctgctatgttagccgttatggtggcaccaacagtcggtattaatcctttcgatcctctttggattgccactttggtgggtatcgtaaccattagctcagcaggtgttgcgggtgtcggtggtggtgcaacctttgcagccctgatcgttttaccagcaatgggattacccgttacactggttgccctactaatttctgtggagccccttatcgatatgggtcgtactgcattaaatgtcagtggctctatgaccgcaggtactattactagccaaatgatgcgccaaacagataaagagatctttaatcaggaagaagaagctgaacttaatgtgaagtaa

SEQ ID NO: 293947 - DNA, 879 bp, Proteus mirabilis
atgatgaggattgccttattcctgttaacaaacttagctgtcatgtttgtgttcgggatcatcttatctttaacaggtattcaaggccgcagtgttcagggtttaatgatcatggctggcctatttggttttggtggtgcatttgtttctttacttatgtcaaaatggatggcattacgatccgttggtggtcaagtgattgaaaatccaacctctgaagtagaacgttggttacttgatactgtaagacgtcagtctgagcaagtggggattaaaatgcctcaagttgcaatctacgatgcaccagatattaatgcgtttgcaacaggagctcgtcgtgatgcttcgctggtggcggtgagtaccggattattagccagtatgagccgtgacgaagcggaagctgttattgcacacgaaattagccatgttgccaacggtgatatggtaacgatgaccttgttacaaggtgttgtgaatactttcgtgatctttatctcccgtatcattgctcaatttgtggcgaattttatttcgagcgatgaagagagtgaaaacagtaacggaaacccatgggtatacatgggcgtttctatggtgcttgaaattgtctttggcattttggcaagtatcattacgatgtggttctctcgctaccgtgaattccatgcggatgcaggctctgcaaaactggttggccgtgagaagatgatagcggcattacaacgcttaaaaaccagctatgagccacaagaagagagcagtatgatggctttctgtattaatggccgtaataagtcatttagtgagttatttttatcacacccaccattagataaacgtattgaagcactacgtagtggcgaatatctcaagtaa

SEQ ID NO: 293948 - DNA, 1353 bp, Proteus mirabilis
atgaaactaaaaagaatggtgttgtttatgttttccccttgttttttagctgtgagcgctgctaatgctgggaattgggaaaatacaattaaagaaagctcatttatttctgattctgaacttgagctgactaccattaatatgtggaaatacctaaaaacagaaaaccgttttgataaacaagagcaacgttatagaaaacaagttgctaatgcttggggtcaaaacttccaagctgatttcagatctggctatttaggtggcattctaggattcgatgtttcttattatggtggtattaaattaggagcaagtaaagacttcgcttctcgtgccatattatataatgatgatggtgaagcaaaaggctataacaaaattggtcaacgttttgcaaaagtgagattcgatttagatcctgttttaattaatggtaaagcgggttggtttaccttgaagaatacaggtatttttactaactcacagcgcttatcattaaacagttataacggttattacactaatacggcgatgggtgattggagtttagatttgctgtatctcgacggaaaagttatgcgtcgtgatagcccaaatatcgatagaatgtatttcagtgatggtaatggtgttagacataatattgaccatgttattactggtggagttaactataattccaaaccattaaaagtctattatttctatggtcaggcggatgatgtattccgtcaacacggtttagaaacaaaatataagttaacatcagacgttactctaggtggtgttgtttattaccacgattatggcagtgaaggaaaacgcacattaaccaatgctaatgcaggtaaacgtaactttgataaggatgcatggcactttgctggtactatggaatggcgtattcctgaatcagcgtggaccattcgtacgggtgtgacttataccgatgcgaaaaaagccaatggtgttggtcaatttgcgcgtaacccaattgggaatactcgtggacgctttaactcaccagcttatgcagatattgactatgtgcgtgatggtgaagtgatgggtgcattagaagctgcatacaaagttaacaatgagttgtctgttggtgcacggactaactatagtgaatttagttactccggcgaaagattaaaacaagggcagtttggcttatttagctactggaagccaacggctaatctttctatttctttaagtggcggtattggttggcaccatcaacaagaaaatgattacaccacaccaaaactgtatgatggtcactcacgacgtgctcactcattatcaggctctatgacaacgacatatcgttttaaaatgtaa

SEQ ID NO: 293949 - DNA, 2061 bp, Proteus mirabilis
atgaacaaacttttaaatgtggcttttgctatcggattagcgttaacaggcacttctgctgtcatggctgataaaccagccacgccagccatggtgactattaatcaattaccgacattaaagcaagagccacaacattccactgtgagtgaacgtgtcaccgctcgttttgaacgttcccactatcgtcaattctcgttagacgcgagtttttccgaaaagatttttaatcgctatcttaatttattggattatagccataacgtattattagcgtcagatattgcccagtttgataaagataaaactaaagtgggtgaatatttaaaaacaggtgaattaggtcctttatatgatctgtttaaccttgcgcaaaaaagacgttttgagcgctttcaatatgctttaaatcgattaaatcaacctatcgatctcactggacaagataaatttcagttagatagaaccaaagcgccatggccgaaaacgcaagctgaattagataagctttgggatgaaaaagtaaaatacgactggctaacacttaaactctctgacaaaacagacagtgaaatcaaagaaacactgacaaaacgttataaagctgcattacgtcgccaaacacaaagccaaagtgaagacgtattccaaattatcatgacggcttttgcgcgtgaaattgatccccataccagttatttatcaccaagaaatacggaagcctttgattcagaaatgagcctttcattagaagggattggtgccgtattacaaatggatgatgattatccaatgattaattccatggtaacgggcggaccggctgctaaaagtaaagcgctaaaagtaggtgataaaattatcgctgtcggtcaacataataaacccatggttgatgtggttggttggcgcttagatgatgttgtcgcgttaatcaaaggccctaaaggtagccaagttaaactagaagttatctctgatgaaaaaggggcgaagccaagaactatcactttaacaagagaacagatccgcctagaagatagagcggtcaagttaaccgaaaaagtgattaatggtgataaaatcgctattttagatattcctagtttctatgtcggtttaactaatgatgtgaaaacccaactacaaaaagtggctaaagacaatgtatctgctttagttattgatttacgtggaaatgggggcggtgcattaacggaagctattgcattatcgggtttatttattccaagtggtcccgtcgttcaagtccgtgataataatggtcgagtacgccaagattatgatcgtgatgatgttgtctattataaagggccactagtggttatcgttaaccgctttagtgcttctgcttctgaaatttttgctgctgcaatgcaagattatgggcgcgcattaattgttggtgagcaaacctttggtaaaggaacggtgcaacaatatcgttcattgacacgagtttatgatcagatgttaagtcctgattggcctagtttaggttcagttcagtacactatccaaaaattctatcgtattaatggtggaagtacccaattaaaaggggtgacaccagacttgttattaccaagctttgataattcagaaatgggggaaagcaatgaagataatgctttaccttgggacagtattccaccggctaattataagctgtctgagtattcagagaaaataaaacaagcactacctacattggcggatcaacatgctaaacgtatcgcgaatgatagagagttttcatatatctttgacgacatcaagcgctacaatgaagctaaagccaaaggtgaagataagtttattattcttaattttgcagagcgcgaaaaagagaataaagagctagaagccataaaattacagcgtattaaccaacgtcttaagttagagggtaagccaccactaaaatcacttgatgatttgccgaaggattatgaaggccctgatccttacttagatgaaacggctaatattgcggatgatcttgcaaaggtattaaaacctaagaagttattaaattaa

SEQ ID NO: 293950 - DNA, 693 bp, Proteus mirabilis
atggaaaatcaacctaagttgaacagtagtaaagaaatcatcgcttttttagcggaacgtttccctaagtgttttatcgctgagggtgaagcacgccctttgaaagtcggtatttttcaagatctcgttgagcatctaaaagatgaaactcagctgagtaagacacagttacgttctgccttacgcttgtatacctcaagttggcgctacctttatggtgtaaaagaaggggctaaacgtgtcgacttgaatggtaacgactgcggagagctggaagcagagcatattgcacatgctcgtacacaattagccgaagcgaaagcgcgcgttcaagctcaacgagctgagcaacgtgctaaaaagcgcgaagctgaaggtgataaggagaccagtaaacgtccggcagcgaaaaagccaaatcctcgtcgtcaagcacctaaagacggtgaaaaacgacagcctcgccctcaaaagcaagctaatcaagcgcctcgcaaagcgccacgccaaaatactgaaaagttaaccccagtcaaagacatctcagtgcttactgtaggtcaatcgctgaaagttaacgttggaagtagcgtgatggatgcgacagtgctagaaatagcgaaagagggtgtacgtgtacaattgcctaacggtttggcaatgaatgtacgcacggaacatttaaagttctga

SEQ ID NO: 293951 - DNA, 498 bp, Proteus mirabilis
atgccacaattaaatttttatcaggaactcactgataatttgtcagccttgttgtctggtgaaaatgactttatcgcatcacttgctaataccagtgcattgatttacgagaagttagacaagataaattgggtcgggttttatcttaatgatggtaactcattagttcttggtcctttccaaggtaaagtggcttgtgtcaggattggttttggaaaaggagtctgcggaacggcattctcagaaaacaaaattctaagagttaatgatgtgcaccaatttagtggacacattgcatgtgatagtgcaagtcagtctgaaattgttctacctttagaggtaaatggacaaattatcggcgttctcgatatcgatagccctatttttggtcgttttgataaaaaagatgaaaatgggcttaaagcgttgtgtgacgtgctctgcgagcatttaaaaacgtgtcataccgcaaaatattgtgaattttgtgtaagataa

SEQ ID NO: 293952 - DNA, 1257 bp, Proteus mirabilis
atgagcgatttagtcaccaaagaaagcaaatcaatacattgtcaggagtgtgaccacctcgtatcacttcctacagacctcaagcgcggcgaagacgcctattgcccacaatgtcaagccaagttagcgacctatcgtgattggtcattaacccgactattaattctttctatcaccatgctgatattcgcgtctatcgcttttactcaacctcttatcaagatccatttattagggaccatgatatcagccaatgttcttgacggtattcgcttaatgtcacaacaaggctctccattaacggcaacaatggttgccttttgtgccgttgccgctcctcttagtctacccattgccattttatatctccatttaggggctcgtttacatctaaatttacgtcccgtgctattaatgttaggtaagctaaaagaatgggtaatgctggatgtttatttaattggccttggtgttgccaccataaaactaggcgattatgccacaatctatattggtcatggcttagttgctttttcagctttaatggttttaagtctattaatgcttattaacattaatatggatcaactatggcaacagttttatccgcaaaaagagataaaaacgagtccagcaacctgtcatgcatgtcattaccattttaaaaagccaccttcgagccattgcccaagatgtaaatcttgctatagtgctcgtcaaccaatgagtttgcaaaaaacctgggcagcactcatcacagcgatgatcttgctattaccggcaaatttattacctatctcaatcttttatttaaatggccagcgtaatgaagacactattttttctggtgttctctctttaattaattcaggtaatacacctattgcaattattgtgtttattgccagtatctttgtgcctttctttaagataatcattatgctggggttactattgagcattcattttaactcacgtattcaccctctattgcgcatgaaactttatcgatttgtctcttggatcggccgatggtcaatgctcgacctgtttgtgattgcgctgatgatgtcattaattaatcgagatcagttaatgacattcactatgggacctgcagctttttattttggtacagctgtcattctcactatccttgccgttgaatggtttgatagtcgtttattatgggatacttatgcaacaagaagaaaacaacacacaggcaacccaagccgaaatacgtcgcaaacgtaa

SEQ ID NO: 293953 - DNA, 2319 bp, Proteus mirabilis
atgcaacaagaagaaaacaacacacaggcaacccaagccgaaatacgtcgcaaacgtaaaatttcgactttttggttactccctgttatcgctatttttattgcgagttggttgcttttccaacactggcaagaaaaaggcgtacaaatcaccatcgattttcaatcagcctctggtattgtttcagggagaacacctatccgttaccaaggtgttgatgtaggtattgtacaggacgtgacgctcagtaatgatttacgccgagtcattgttaccgctgatattcgaaaaaaccttgctaatgcattacgtaaaaatacgcaattttggcttgttaccccaaaagccagtctttctggtgtttcgggattagatgccttagtgggaggcaactatatcagtatgcttcctggagatggggaaaagcagtttcaatttgttgctcaagaggttcgtcctaaagccaacattgataaaaaccaacaaattatcaccttaacggcggataatttaggctctcttaatgtcgactctcaagtttattatcgtaaagttccggtcggtaaagtttacagctatgccatacgtccagataatcaaggtatttttatcgagctgagtattgataaacaatatgctcacctgatccgtcaagatagtcatttttggaatgtatccggctttcagggcaactttaatctaaaaagtggtgcttctattaaaatggaaagtgtttctgctttaattaatggtgctattgcctttgattctccggaaaatagtcccccagcccaagaaaatcaacaatttgtgctacagtctgccacttccgtggatgcaggcaaagccttatatggtgaagatggattaattatctcattaaccagtgaagagagctggggtgtagatgccgggcaacctattctatttagaggcattacgataggacaaattattcagcgcaacatcagtgatgatggggttattttcgatgccatcattgcacctgaatataaacactatatttacgaaaacagcaaatttgtcgctaatagccgaattaacgtcaatatgggcttaaatggtattgagatccaaggagccacacctcaagagtggcttgaaggcggtatccaccttattccgggtagccaaggcgcccctaaagaacaatatcgcctttatcgcaatgatttttatgctaaagcaagtattgagggcaatgagttacctgtcactttgacacttaaagcagctagtctaccgggtattcaaaaaggttccgtggtgctttaccaccaattccaagttggagaaatcgtcgatgtacggcctttaatggatgaatttgatattgatgtccatatttctaaacaatatcgtcacctgcttactgaaaagagtgtgttctggactgaaggtgctgcgaaggtttcattaaatggtgcgggattaacggtagaagcaacgccgctaaaccgtgccttaaaaggcgcgataagctttgataactttgaaaatattaataacaatgtttcaagatataaactttatcctagcgaaacgagtgctagagccattggtgctcaaattactttaaaaacctacgatgccagtaaactttctgaaggaatgcctattcgttatctaggtattgatatcggtcaggtggaaacgctaaccctttctgcggataaaaaagcggtgagtgtatcagcggtactctaccctgaatatgtgaaaacttttgcacgttcaggaagccgatttgcggtagtcacccctgagttaaccgcttcaggcctcgataatttagattctcttattcagccttatatcaaggcagagccaggcaatggtggcgtataccgcatatttgaattacaaacggcaaatattaccgactctcggtatctagacggccttaaccttgtattgaatgcgactgaagcaggatctgtacaaattggcacacctatctattatcgtggtttagaagtaggtgcggtaaccggactagaattaggtaatatgtctgacagagtattgatccacattagaattagtcagaaatatcaatatctggtacgtaataacacagagttttggctttcatcaggttataacttctcatttggtttaactggtggagtattccgcagcggtacatttaagcagtttatacgtggtggcattacatttgctacaccgccatcaaccccactccaagctaaagcaaaacaagagcagaatttcattctcaatgctaaagagccaaaagagtggaatgaatggggtactgcgatacctaagccataa

SEQ ID NO: 293954 - DNA, 243 bp, Proteus mirabilis
atgaataaaacaaccttaaaaattgcttgttatgaaattgaagatgttactttgaaacactcttccgataatcaactcacttatgttcatattccatgtgattatgataaagagttttgtatgcaattagatggatgggatgaaaacaccagcattcctgcgcaactgaaagataaaaatattctgctttatcgtcatgcctatgacaaagaaaaccaccattggattttaaaagtagcctaa

SEQ ID NO: 293955 - DNA, 342 bp, Proteus mirabilis
atgaaacgttttttatttgcgggcatattgatgcttttttcttttcaaactttcagtgcaccaatatcaacagtcagtaagcttcagtttggtgatgcttggccattcacccgtgaagaagtcatgctaaattgtcgtgcagatggtgcttggtttgtgattaatcccgcaactttagctcaatatccacttaataatattgccatggaacaaatgaaaagtggcaaagttaatgctcaactgattgatagtattctacttcctgatcccaatacacctgataagaaaaaatcactggaagctatagaaagtgcatttttgtctctttgtgaaaaaaactaa

SEQ ID NO: 293956 - DNA, 900 bp, Proteus mirabilis
atgactcctgaagacgtttatattttatgccgaatttttcattttgtggcagtcatgttcatgttcggactgagctgttcggctgccattctcgctaaagaaaagtttgttcctcttattcaagtacgcttacgtccagcattggcgattagcactatcactatatttgtttccacttatttatggatgatagtgcaatcaggcattatgggagatggctggcaagatgcttggtcgctaacgatatggcaagctgtattgggaacctcttttggccaaatttggcaatggcaattagttttatcctctctcgcattaatcgctctctttattcatcaacgtagcattagaaatattagtctgttacttatctcaacattgatgcttgtgctgcatgcttttattggccatagtgccatgtttacaggtagtgaagccgtaatttataaactaaatcagagtatccatcttattagtggagcgtattggtttggtggtttatggccttttgttgtgtgcttacagtttttgcgtaataaagatgaattagctgatggcatgatcaagcctattattgccaccatgaaacgcttttcattattcggtcacttcgctgttttattggttatagctagtgggattgtgagtgccattatgttactccccggttggcctgcgacaacacaactttcctcagagtaccaaagtatgttatggctaaaaatagcctttgttgccttgatgttaggattggcattagtgaataggtatgtattagtgcctcatatccgtaagaagaataactttcaatggttgcttattaatagttggtttgagttattacttggtagcatggttattttgacagtggccatttttgcgattaactcacctgtatag

SEQ ID NO: 293957 - DNA, 393 bp, Proteus mirabilis
atgtcattaaacacacttaagacatcatggggcaaattatccgccatcgctgttttatttttaggcatgtcatgccaacaagccttagcacacgcacatctaaaatcacaattacctgcagagggtgcggctattgaacaagcgcaagcaccaaaagtgattacactcgatttctctgaagggattgagttggcctttagtaaagtaaaagtcactgataaagagggtaaagaaattactgtcggtaaattaagtcttgatcccgttaacaatacaaaattgttattgccattagaaggtgaattagcagaagggaactactctgtagattggagtgttgtttctgtcgatgggcacaaaacaaaaggttcttatcaatttagtgtaaaataa

SEQ ID NO: 293958 - DNA, 504 bp, Proteus mirabilis
atgttacatcaagatatgatcaataaactcaatgaacagctgaatcttgagttttattcagctaacctttacctgcagatgagcgcttggtgcgatgataaaggatttgatggcgctgccaaatttttaaaagcacattcccgtgaagaaatggagcatatgcaacgcttatttgattatttaagtgatacaggtgctatgcctttgttagggactattgaagcaccacccgctgaatttttatctttatctgatttatttactaaaacttatgagcacgagaagtttattacagctgaaattaataaacttgctcacctagcaatgacaacacaagattactcaacatttaacttcttacaatggtatgttgctgaacaacatgaagaagagaagttatttaaatctattctggataaacttgctatggtcggtgatggtggtaaggcattgttcttgttagataaagacttaagtgctctttctacatccgcgcatatttaa

SEQ ID NO: 293959 - DNA, 1050 bp, Proteus mirabilis
atgcaggtcacaaggaaacaagagcgtgttattcgtcaagcacttgatcattggcaacaatctggcgagctatcagcacaacagcatcaacaactagaaagtacattacaacgccttccctttgattggaaaagattgagtcgctatgctttttggatagctattgtctgcttaattattgctgccattaacctttttagtgatactgcgttaattcattatcttatcgaattatttagtgtctctgagattatgcgtgtggtatttcctgcacttattgctggtatgttttatttttggggctttaaacgccaacgcaaagaaatactatggcattacagtactgagtttattctctttttagggatattatttacggcggtttttctttggcaactcggtgagttgttagatgatggtagtggtaatattgcgccacttcttttaatgggttgcattatttatgctgtgattggttttatcagtcgctcttcattagtgtggttatttttcttattaatgttgggcaattggtttggtgcaaaaacgggttatatgtccggttggggcgcttattggctaggcatgaattatcctattcgcttcgtgttatttggctctgcattattagcgggatgctattttttgcaaaatattttaatgcgccgtcgcttattttttatgacaaagataatgggactgtcttatctctttattgcgttgtggatcatgtctatttttggtaattacgatccggatacgtggtattacatttcaagtgtgcagttattaccttgggctttattatttgctgttgttgctgtcatttgtatttatatcagtttaaaaaccgatgatggcatgttgagaggctttggactaacattccttggtatcaatctttatacccgcttttttgaatatttctggaatagcttacatagtgcaattttcttttttatcttggctatttcactgatttttattggacgtaaagcagaaaaaatttggcatgccattgaaaatagccgcatggtaaataagcaataa

SEQ ID NO: 293960 - DNA, 1071 bp, Proteus mirabilis
atgttaagcaagctactgcgatctaccttgattggtgttttaacagctgccattcttttggttgcggtaccttctatccgccctatctttattgaacacctgattaatggtgattttcttaatgccccatttagctataacaaagccgtgcgccgtgcggcacctgcggtagttaatgtctacagcagcacaatgggaagcttttctcaagaagggcgcgagcttacctcgctaggtgcgggggtgattatggatccgcggggctatattcttaccaatcagcacgttattaataatgcagatcaaattattgtggctttgcaaaatggtgatctctatgaagggttattgattggctcagatcccttaaccgatcttgcagtattaaaagttgatgcagaaaaattacctaccatccccatcaatagtaagcgtatttctcatgtgggtgacgtcgttttagccattggtaacccatttaatattgggcaaactatcacacaaggtattattagtgccacaggacgtgtcggcttaagcccaacacgttaccaaaacttccttcaaaccgatgcgtcaattaatgaaggtaattcagggggggcactgattaatactgaaggtgagttagtgggtattaataccatgacctttgattcaggcacctacaatggctatcgccccagtgcggaaggacttggttttgctattccaacacaattagccgtaaaaattatgaataagcttatccgtgatgggcgagttattcgtggttttattggtattaccgcgaaagagctacctaaaattcgctcttcaaataccgatattaaacagatccaaggattacgtatcttccgcattacgcccaatagtcctgctgataaagcgggaatgaaaattggcgatatcattttaagtatcgaccatgctccggctaaatcagctatggagatgatggactatattgcagaaacacgtcctggtaccgttttaccggtaaccttattacgtgatggtaatgaaataaatgttgatgtcacaatttcagaatatcagccagagtcatag

SEQ ID NO: 293961 - DNA, 1392 bp, Proteus mirabilis
atgttgactaaaaaaagaaaattactacttagcgcattagcgatgagtgttggtttatcactctctattctcccggcaaccagtatggctgccctgccttcggtaatgccatctggagaacaactacctagcttggctccgatgctagaaaaagtcttgcccgctgtggtcagtgtgcatgtttctggaactcgagtgcaaagccagcaggttccagaagagtttaaatttttctttggtccaaatttcccttcacaacaacaaagcatccgcccttttgaaggcttaggttcaggggtgattattgatgctgaaaaaggttatgtattaaccaataatcacgttgttgatggagccgataaaattcaactccaaattaatgatggccgtgaatttgacgccaaattaattggtagcgatccacaaacagatatcgccctactacaaattgagaaacccaataacttaaccgccattaaaatgactgactcggataaattacgtgttggtgactttgcggttgctgtgggtaatccatttggtttaggtcaaaccgcgacttccggtattatttcagccttaggtcgtagtggtttaaatctggaagggttagaaaactttattcaaactgatgcgtcaattaaccgtggtaactctggtggtgctttagttaatctcaatggtgaacttatcggtattaataccgcaattttagcaccaggtggtggcaatattggtattggtttcgcgatcccaagtaatatggcgcgtgatctcagccaacaactgattacacatggtgaagtaaaacgcggtattttaggtattcgcggtactgaaatgaatgctgatttagcgaaatcctttaaaattgatgcccaacgcggtgcttttgtcagtgaagtattggcggactcttccgcagctaaagccggtataaaaccaggtgatgtccttatttctattgatggtaaacgcattaatagctttgctgaattaagagcaaaagttggtacaacaccaccaggtaaagagatcctgattggtttgatccgccaaggaaaaccaatggatgtcaaagttacactagagaaacaatcagcagatgcaacgcgagcagataacttctctcccgcacttcaaggggcaacgctcagtaactatgttaacaaacaagttaaagcggttgctgtagattctgtggagaaaggctcagcggcagcagcatcggggttacaaaaaggcgaccttattattggtatcaacaatatgccaattggctccttaggtgacttacgtaaaaccatcgatgctaaaccaccggttcttgcattaaacattaaacgtggcaacgaagaaatttatcttctgttacgtaacagctcgcgttaa

SEQ ID NO: 293962 - DNA, 405 bp, Proteus mirabilis
atggtttgggtttatgcactgattggattagttgttggtcttattatcggcgcactggcaatgcgttatggtaataaaaccatgcgccaacaagatgctataaaagcagaattagatactaaaaaagaagaacttgatacatatcgcaacgagcttgtcagccactttgctcgaagtgctgaactactggacaatatggcgaaagactaccgccaactttatcaacacatggcaaaaagctccaatgagttaatgccagacatgcctgttcaagataacccatttaattatcggttaagtgaatcagaggcagccaatgatcaatccccgatcaaaatgccgccacgggattattccgaaggggcatctggattatttagacctaccgataaaaaagatgattaa

SEQ ID NO: 293963 - DNA, 1119 bp, Proteus mirabilis
atgaccgttagcacgccattatcactttatgaaaccgcgttacagcagggggattatcaacctgatgaggttcagcgacaaaccgttctccatctgcaacagttataccatgcattattaaaccggacatcaccagaaaaaagttctattactcagcggttgttaggaaagtttcgtgcgaaaaaaagcgcaattgtccctgagcgtggcgtttatatgtggggaggggttgggcgaggtaaaacctggttgatggatatgttctatcaaagcttacccacagaacgaaaactgcgtctgcactttcaccgctttatgttacgggtgcaagatgaattaaaaggcttacaagggcaagaaaatccactggatatcattgctgacggctttaaagcgcaaaccgatgtactctgttttgatgagttctttgtttcagatattactgatgcgatgattttaggaacattacttgaagcgttatttgccagaggtattactttagtggcgacatctaatattccccctgatgatctctatcgcaatggactacaacgcgcacgttttttacctgctatagaacaaataaaaaaccattgtgaaattttgaatgttgatgcggggattgattatcgcttaagaacattaactcaagcccatctatttttatctccattaacagagcataaccgccagcaaatggataaaatttttactcagcttgccagcagtagtgaagttgtattcgcgcccacattaaccattaatcatcgtccaatggtaatgagaaaagtggctaatggtgtactggcggttaactttgatacgttatgtgtacaagcgcgtagtcaacttgattatattgaattatcaaagcactatcacactgtgttgctttatgaaatggtacagatggggagtagaaatgaagatgttgcccgtcgtttcttagcattggttgatgagttctatgagcgtaaggtgaaactaattattaatgctgatgttgagatgagcgagatttatcaagggcaatttttacgttttgaataccaacgttgtttatcgcgtttgcaagaaatgcaaagtgaagagtatctttcacagcctcatctcgcttaa

SEQ ID NO: 293964 - DNA, 429 bp, Proteus mirabilis
atgaaaacttttacagctaaaccagaaaccgtaaaacgcgactggtatgttgttgatgcagacggcaaaactttaggtcgtttagcaactgaaatcgcacgccgtttacgcggtaaacataaagcggaatacactccgcacgttgatactggtgactacatcatcgttttaaacgctgagaaagtagcggtaactggtcataaacgtactgacaaagtttactaccgtcatactggtcacgtaggtggtatcaagcaagcgactttcgaagagatgatcgcccgtagtcctgagcgtgtaatcgaaatcgcggtaaaaggcatgctgccaaaagggcctctgggtcgtgctatgtaccgtaaactgaaagtttacgcaggcgctgagcacaaccacgcggcacaacaaccgcaagttctggacatttaa

SEQ ID NO: 293965 - DNA, 393 bp, Proteus mirabilis
atggctgataatcaatactacggcacaggtcgccgcaaaagttcttccgcacgtgtcttcattaagccaggtagcggtaatatcgtaatcaacaaacgtagccttgaagtttacttcggccgcgaaacagcacgtatggttgttcgtcaaccgctggaattagttgatatgcttggtaaactggatttatatatcactgttaaaggtggtggtatctctggtcaagcaggtgcgattcgtcacggtatcactcgtgcactgatggagtacgatgagactctacgttctgatctgcgtaaagctggtttcgttacccgtgatgcgcgttctgttgaacgtaaaaaagtgggtctgcgcaaagcacgtcgtcgtccacagttctcaaaacgttaa

SEQ ID NO: 293966 - DNA, 642 bp, Proteus mirabilis
atggctgtcgctgccaacaaacgttcggtaatgactttgttttccggtccgactgatattttcagccatcaggtcagaattgtccttgcggagaaaggtgtcagtgttgaaattgaacaggttgaagctggtaatcttccacaagatcttatcgatcttaacccgtaccagagtgtgccgactttggtcgatcgtgaactgactttatatgattcacgtattattatggaatatcttgatgaacgcttccctcatcctcctttgatgccagtgtatcctgttgctcgtggtagtagccgtttaatgatgcatcgcattgaacaagattggtactctttaatgaatgttattgaaaagggtaacgatcaacaagctaatgcagcacgtaaacaactcgccgaagagctattggcggtatctccggtatttaaagaatacccttattttatgagtgaagagtttagcttagtggattgctacctagctcctctcttatggcgtttacctgtattaggcgtggatttaagcggtgcaggtgcgaaagatgtacaaatttatatgcaacgtgtttttgagcgggattctttccttgcgtcattaaccgaagcagagcgcgaaatgcgtttaccttcaagaggataa

SEQ ID NO: 293967 - DNA, 510 bp, Proteus mirabilis
atggagattaaggatatgtctccgcgccgtccgcatttattgcgtgcgcattatgattggatccttgaaaacgagttaaccccccacttagtggtagatgttaatgttgtgggtgttcaagtccctatggaatatgcgcacgatggtcaaatcgtactaaatatttctccttttgcggtaagtcatcttgaattgatgccgcatcaggtactatttagtgcaagctttggtggtgtacctcgtaaagtgcgcgtacctatggcggctgtaatagcaatatatgcgcgagaaaatggtgcgggtatgatgtttgagccagagccagcctatgaggaaggttatacaccatcattggtggatgatgagcagcaagacggcagttcagcttcggccactgaaggactgtctttagtgaaagatgagacacaggctgaaaacccatcttctccagatgatgatcctgagcctcctcgcccaacaggtcgcccatcattgcgtgtagtgaaataa

SEQ ID NO: 293968 - DNA, 1026 bp, Proteus mirabilis
atgctatttcaagtaggagagatcgctaaaaagacgggattaacggtccgtactctccatcattatgaagagataggtttattgcaaccgactgcaagaaccgatgcaggttatcgactctatgatatgaaaagcatagagcgattaacgcaaattcaaatgctacgtcaaattggcgtcaaactgaaagacatcggtcatattcttaatggtcatagtgcagagatagcttgtttaattgaagaacgcattagccaattaaccacgcaaatgcaacaaattgccaaattgcgttatcagctagagcatgttcaacaacaaatacaaacaggcactccatttacgcaacatgactggttttctttattggagatgatgtctatgtacgataaatattttacttattctgaattagcgcagttacccctctatactgcgcacacattaaaaagccaagcatggcaacagcgtatttcaatcgtcaataatttgattaaacaaggtaaatctgccgattcaaatgaagcgatgcaagtttcaagagagtggatgatagctttagagaaagatactgggggaaatcccgacttttttgtccgtttaaataaaatgcatatttctgatgataagtttgcgacggctaccggtattactaaacagatgatagattttgttgctaaaggctttagcgaatatcaattatctgtttttaaacctcatctgactccggaacaatttgccgtagtacatcagcactattttgatgctggcagtgtctggcctgagcttatttctggattatataatgcactcacttgcggagaaaaagcagattcagagcaggtgcaaaacctcgctaagatgtggctaaatatgttcaatcagtttacacagggtgatagtgatattcaggccaagatccgtaccatttatcaaactgatcatgaaatcgctaaaggtacatggatgacacctgagattggtcaatatttatttacggctattagtttgctagtgcaaaaatag

SEQ ID NO: 293969 - DNA, 1266 bp, Proteus mirabilis
atgtcagtttcactagaacaattaattaaatggcgtcgcgaatttcaccaataccctgaaattggctggtctgaatttttaaccactgccaaaatcgtcaaagtgctacgtggcttaggattagaagttaaagtcggccctgaagttattaaccaagactttgcttttggacgccgtcgtcaggtggttgaaaaaggattggcggtagcaagaaaacaccatgttgacgaagcactgcttgatgaaatgcaagagcttacgggttgtgtcgctattttcgatagtggcaaaccagggcctactgttgcactgcgttttgatattgactgtgttggggtaacagaaacaacagagactcaacatcgtccacaagtagaaaatttcgcctcttgtcatcctggcgaaatgcatgcttgtggtcatgatggtcatattactattggtttaggggttgctcactggttagtcgacaataaagataaagtgagcggtaaagtaaaaattttattccaacccgcagaagaaggcgttcgtggtgcaagagcaatggcggaaagtggcattgctgatgatgcaaattacttcttaggctcacacttaggctttatcgccaatagtggtgaaatcgttcttaacccaacacattttttatgtaccactaaatatgatttccgttttaaaggtacgccttctcatgcgggggcagagccagagctaggtcgtaacgcattagcaggcgcttgccatgccgcaacacaaatgctggggatctctcgccatggtaaggggatgtctcgtattaatattggggtattaaaagccggtgaaggtcgtaacgtcactcctgccaatgccgaaatgcaaatcgaagtgcgtggtgaaaatgaagagatcaatagctttatggctgccaatgctgtacgtatggcagaaggtgccgcacatagcttccaattagaaatggaaagcgaagtgatgggggaagcggttgatttaaccaatgaccaagaactgattgatgtgatggccaaagtggtgggtaaacacccagaactcactgcgatcccaacccgtccattcggcggaagtgaagatgcaacggtgttagcaaaacgagtacaacgctgtggtggtaaatctctttactttattgttggtgccgatagaactgccggacatcaccaagcaggctttgattttgatgaacaacaactgatgactgcggtaaatctttacacgggttgtttagaagaattactgaaataa

SEQ ID NO: 293970 - DNA, 1275 bp, Proteus mirabilis
atggtgatgcaacttatagccgtagccgttattatcgtaacggtctatttgctaataaaaaaatatgaaacccgtatggtattgatcggtgccggcttattgttatgtattttaagtctgacaccgctcgatgctttcactgcatttagtgatcgcatggtttcatcatcattaattcaagctatctgttcaagtatgggttttgcctacgtgatgaaatacaccaagtgcgatatgcacttagtccatgttttatcaaaagtcctgactcgtcttggtttctttcttattccagcaaccgtgatcgtcacttattttattaatattgcgatcccatcagcagccggatgtgcagcggccgttggtgcaacacttattccgttattaatcgcggcacgtattcaccccgcaatcgcaggtggtgcggtgttatgtggtactatcggttccatgttaagccctggtatgtcacataacgcttttgtggcgaatatggccaatatggaagtcgtcgatttaatcgctcgccatagcccatatagtttaatggcaggagcaatagcagctgtttcactcgctgttgtcgctttagtgaaaaaagagtttaaagtctcttctgtagccacagatgtcgccaactcatcttctcaagcaacaccagaagcagtacgccctaattatttatatgcaactgcgccttttatcccattaattctattaatactgcctttcttcgaaacatttagtacttttaaactatctgtgccagcagcaatgttaattggtgctatttatgcactgatcatcacattaaccaatccggctcaaattactaaagagttctttaaagggatgggtaatgcttatggggatgtgctggggatcattatcgcagcagccgtatttgcagccggtctaaaagcatcaggtctgattgatgcctttatcaacttcttaactcactcacctgaatttgcccgttggggtggtacattagggccattcttaatggggattattactggctctggtgatgctgcagcatttgctttcaacgaaaccgtcacaccacacgctgcacaatttggttatgaaattcctgacatgggtatggcagcagcattatcaggcgcattaggtcgtacaatgtcaccattagcaggggcagccattgtttgtgctggtcttgccaatatcaaccctatggaaatcgcaaaacgtactgcaccgggtatgattatcggcgtcatcgctgttgcgttattcatgttataa

SEQ ID NO: 293971 - DNA, 1407 bp, Proteus mirabilis
atgggtcagaatgtgtatcaatttatcgacttaaatcgcgttgaaccgactaaaaagccgttagctgtgcgtaaaattgagtttgtcgaaatttatgaggcattttctgctgagcaagcctctgcacaagccgatcgctgtttagactgtggtaatccttattgtgaatggaaatgcccggtgcataactatatccctaattggctaaaattagccaatgaaggacgaataatagaagcagcagagctttctcatcaaaccaatagcttaccggaaatctgtggtcgtgtttgtccacaagaccgattatgcgaaggcgcttgtacgttaaatgatgaatttggtgcggtcactattggtaatatagaacgctatatcaatgataccgcctttgcgctgggctggcgcccttccctgtctcaagtcaccatgacagataaaaaagtcgccattattggtgcaggccctgcgggattggcttgtgctgatgtgctgatccgccaaggagtaaaacccgtagtctatgataaacaccctgaaatcggtggattactcactttcggtattccctcttttaaacttgaaaaatcgctgatggtaagacgacgcgagttatttagcgaaatgggaataaccttttgtcttaatacagaaataggcaaagatatctcactaaaaacactgacggagcaatatgatgctgttttccttggcttgggtacttatcaaagtttgagtggtcattttgcccatgagaacgcaatgggggtttataatgccttaccttatttaattggtaatactcgccatttaatgggttatgcagaagatccccaatcaccttatatcgacctcaataaaaagcacgtggtggtgttagggggtggggatacggcgatggattgtgtacgaaccgctattcgccaaggtgccactaaagtaacttgtgtttatcgtcgcgatgaaaataatatgcccggctctaaacgtgaagtaaaaaatgccaaagaagaaggtggcgaatttttatttaatcgccaaccccttgatattgaagtagatgctaataataacgtcatcggtgttcgtgtaataaaaacacaaaccaacggggaattaaaatatatagaaggcagcgaacatatattatccgcagatgcggttattcttgcatttggttttaaacctgcacactatccgtggttagatgaaaataatattcaatacgcatcatcgggtagaattattattaatgatgatccactattacctttgcaaacgaccaatcctaaggtgtttgctggaggtgatattgtaagaggctccgatctggtggtcaccgcgatagcacaaggaagagaagcagcggaagggatcttgcgttatttatcttgtcaactattttaa

SEQ ID NO: 293972 - DNA, 4458 bp, Proteus mirabilis
atgctctatcaaaaaacagcggaaaaagagaattgtggttttgggttaatagcccatattgaggggaaagccagccataaaattgtcagaaatgcgatccatggccttgcccgtatgcagcatcgtggcgcgatcctttctgatggaaaaaccggcgatggttgtgggttattattacaaaaaccaacgcgtttttttcagttaattgccgaggaaaatggctggcatttagcgaacaattacgcggtcggcatgctatttctaagccaagataatgctattgctgcacagtgccgtcaaattgttgaagaagaattgcaacgagaaacactctctatcgttggctggcgtaaagtaccaactaacacagatattttaggcagtatcgccctctcttctttaccgtcaatagaacaaatttttgtcaatgcgcctgccggatggcgtattaatgatattgagcgccgcttatttatcgctcgtcgccgaattgaaaaacgtattaccgataatgatttttatatttgtagcctctctaatttagtgactgtctataaagggctgtgcatggcaattgatttgcctcgcttttttactgacttagcggatttacggatggaatcgtccatctgtctttttcatcaacgtttttccaccaataccaccccaaaatggccgcttgcgcagccttttcgctatcttgcccataatggtgaaatcaataccattacaggaaatcgtcaatgggcaagagcaagagcctataaatttcatacgccgctgatccccgatttacaaactgcagcgccttttgtaaatgagagtggctcagactcaagctcactggataatatgctcgaactctttcttaatggggggatggatattgtccgcgctatgcgcctattagtgccgcccgcatggcaaaataatccacaaatggatgatgatctacgtgctttttttgattttaactctatgcatatggagccttgggatggacctgcggggatcgtgttatctgacggtcgctatgcagcctgtacactagatagaaatggcctgcgtccagctcgctatgttatcacgaccgataatattattacctgtgcttctgaaattggcatttgggattatcaacctgatgaagttctagaaaaagggcgtgtcggccctggcgaactaatggtaatagatacttatcaaggtcgcattttacattctgctgaaactgacgaagatttaaaaaggcgacacccgtataaactttggttggagcgtaacgttaaacgcctgatcccttttgagcaattgcctgagccacaagcgacaggagagcgcgcttttgatgatagcttactggcgacataccaaaaacagttcgcttatagccaagaagagctggaaacgattttgcatgtactggctgaaaatgggcaggaagccaccggctcgatgggagatgacacgccctttgccgtactttctcagcgtccacgcttaatttatgactattttagacaaaaatttgcgcaagtgaccaatccgccgattgatccattaagagaagcgcatgtgatgtctttagcaacctgtattggtcgcgaaatgaatgtctttagtgaagcggaaggacaagcccatcgcctcagttttaaatcacccattttgctttatagtgattttcaacaattactcaatcaagaaagcccttattattcatccatcacgctagatatcacctatcaaccgactgaaaataatttagaaaccgcactacacatcttatgtgaaacggcgcaacaagcggttaatcgtggcgcagtattactggttttatccgacagaaatatcactcaagcgcgattacctattcctgcgcctatggcagtaggcgcggtacaaaaagccttggtagataataatttacgctgtgatgccaatattattgttgaaaccgcaagcgcccgtgatccccaccactttgctgtactattaggttttggcgcaaccgctatttacccttacctggcttatgaatccttagcgcaacgagtcgataaaaaaatattgtcgggtacttatgcgcaagtcatgctcaattatcgcaatgggatcaacaaaggtctgtataagataatgtccaaaatggggatctccaccgttgcctcttaccgttgctcacagctatttgaagccgtagggttgcatgataatgtcgttaaacgttgcttcgatggggttgataatcgtattaacggtgcagattttagcgattttgaacaagacttatttaatctatccaaacgtgcttggctaactcgctatcctctagacgctggtgggttattaaaatatacccatcaaggtgaatatcacgcctataatcctgatgtggttcaagcgttgcaaaaagcggtaaatagtggtgactacgctgattaccaacattattcccaattagtgcaacaacgccctattaccaccttacgtgatctattagctctcaatgacacaacccctattgcaattgaagatgtcgaagcagaaagtgaactgtttaaacgctttgatactgcggcgatgtcaattggtgcattaagtaaagaagcccatgaagcccttgcgcaagcaatgaataccttaggcggattttcaaactctggagaaggtggtgaagatccggcacgctacaacaccaacaaagtttcacgtatcaaacagatagcttcaggtcgtttcggtgtcacgccatcttatctaatgagtgccgatgtattacaaatcaaagtggcacaaggggcaaaacccggtgaaggtggccagttacccggtgataaagtcacgccttatattgcgcaactgcgttatgccgtaccgggagtcacactgatttccccgcctccccatcatgatatctactctattgaagatttagcacaactgattttcgatttaaaacagattaatccccgtgcgcttatttctgtcaaactggtctctgagccgggcgttggtacaatcgccaccggagtcgctaaagcttatgcagacttaattactattgcaggttatgacggcggtactggtgccagcccattaacgtcagttaaatatgcaggtagcccttgggaattagggctagtagaagcgcaacaagcattagttgccaacaatctgcgtcataaagtgcgcttacaagttgatggtggattaaaaacgggggttgatattatcaaagcggccattttaggagctgaaagttttggtttcggtaccgggccaatggtggcgttaggctgtaaatatctgcgaatttgccatttaaataattgcgctatgggggttgcgacccaagatgaaaccctacgccgccaacattttcatggtttacctgagcgcgttatcaactatttccgctttattgcccaagaaacccgtgaacttatggcacaacttggcgtaaggaaaataaccgatttaatcggcagaacggatttgctttcttgcttagaggggataaccagtaagcagcaaaaattatcgctcacaggattattagaaaccgcgtcctctcctacaggtaaagcgctctattgtcaggagcacaatgatacttatgataaaggagaattaaatcaacgtattgttgcgcaaaccatcacaggcgtcgaacaaaagataagccaaacccactatttttccattcgtaacacagaccgttcagtgggagccacgttatccgggctcattgccaaaacctatggtgaaagtggtttatctgctacaccaataaaacttcactttacgggtactgctggccaaagttttggcgtttggaatgcgcaaggggtggaattaaccttagtgggtgatgccaatgattatgtcgggaaaggcatggcgggtggacgcattgttatttcaccgccagtcggttctgcctttaaagcccatcagaccacgattatgggaaatacctgtttatatggcgcaacaggtggaaaactctatgcatctggattagcgggtgaacgttttgcagtcagaaactctggcgccattgcggtgattgaaggggttggggataatggctgcgaatatatgaccggcggtattgtctgtattctgggtaaaacagggattaactttggtgcagggatgacggggggctttgcctatctgttagatgaagataccacactatcacaacggatcaataacgcctctattgagcttcttcccgtggctaattatgcgattttggcagagcatcttcgcggtatgatcgcagagcatgtacggctaactggctcccaacaaggagaaagactactttctcaatgggaatattggtcacaacactttaaattagtcaaacctaaatcgagtgatgttcatgccttattaggtcatcctcgccgttcaatcgctgaattacgcgttcaggcacaatag

SEQ ID NO: 293973 - DNA, 2337 bp, Proteus mirabilis
atgaaattgctcaaagggcttgcccaatattatgtagatttaatgatgaggctagggttaatccgcttctcattactgttagcatccgcattggttgtattagcgatggtcgtacagatggccgtgacattcctacttgccggtgatgtcactagtatcgatctggtacgctctatcttctttggtttgattattaccccttgggctgtctattttctttccgtggtggtagagcaacttgaagaatcacgacgtcgtttatcgcggatggtcgataaattaggcgtaatgcgacagcgagacttagagctgaattcacaattaaaagagaatattgagcaattaaatttagagatccaagagcgtgaaaaagtagaaaaagcccatcttgaactattggaaaaactcaaaagcgaaatgaagcgtcgtgaattgacgcaaattgaactagagcaacaatcttcattgttacgctccttcttagatgcctcgccagatctggtctactatcgcaacgaagataatgagttttctggttgtaaccgtgctacagagctattgaccggtaaaagtgaaaagcaattaattggcttaacaccactggatgtgtatgacgaagatatcgccgtcaaagtgatggaaaccgatgagaaagtctttcgccataatgtgtcactcacttatgagcagtggttggtgtatccggatgggcgtaaagcgtgttttgagttacgcaaagtgcccttttatgaccgaattggtaagcgtcacggcttaatgggctttggacgtgacattacagagcgtaagcgctatcaagacgcgttagaaaatgctagccgtgataagaccacctttatttctacaatcagccatgagctacgtacgccgcttaatgggattgtggggttaagtcgtattttattggataccgaattatcaccagaacagctcaactacttaaaaactatccatgtcagtgccataacgttaggtaatatttttaacgatgtgattgaaatggataaaattgagcgcagaaagatccagcttgataaccaacctatcgactttactgaatttatctctgatttagaaaacctatcgggattattagtccaacctaaagggttaaaattcaccttagaagcgcaagaaacgttaccgcataaaattaccaccgatgggactcgtttgcgtcaaatcttatggaacttaattggtaatgcggtgaaatttacccaagaaggggaaattaaagtacgcatttggcaagaagcgcctgataagttgttctttgaggtgaaagatagtggtattggtatccctcaaggtgaacttgagaaaatctttgccatgtactatcaggtcaacgacagtcaaggtggacgttctgcaacgggaacaggtattggtcttgctgtctcaaaacgcttagcacagcatatgggaggcgatattcatgtggagagtgagttagggcatggttctatctttacgctttccattgtcgctcctgcgattaaagagcaaagtgattttgaagaggatgatgaattattgcttcctgcccttaatatcttactggttgaggatattgagctaaatgttatcgtagcatgttcagtattagaaaaattaggcaacacggtagatgtggcgatgactgggcaagaggctttgcaaatgtttaagccgggtgaatatgacttagtgctgttagacattcaattacctgatatgaccggatttgatatttcaagaaaattacgtcaagagtttgatagcagtgaactgccgccattgattgctttaaccgccaatgtcttaaaagacaaaaaagagtatttagacgctggaatgaatgatgtgctcagtaaaccgctttctgtggatgcgttgacagccattattaataaattctggggagatgaagcggtttccgtgacatcgagtgagtcacctcaattgttgagtaaaaatgaagagttactcgatatcgacatgctgaatcaatacatcgaacttgtcggacctcaattaatcacggatggtttagatgtttttgaaaagatgatgccaagttacctgtctgtccttgaatctaatctgacggcacgagatcaaaagggcatcactgaggaaggacataaaatcaaaggcgcggcaggctctataggtttaaaacatttacagcaactggcaaaacagatccaatctccagaattacctgcatggtgggataatgttcaggaatgggtagatgagttagaaagagattggagaaaggatgtagaaagtttaagaaactggttggcagacgctagaaaaaaataa

SEQ ID NO: 293974 - DNA, 714 bp, Proteus mirabilis
atggcgattggtgtttacacctataaatgggtaactagtaatctactacaaatggagaaagatatgaaatcaattgcggtaattttaagtggttgtggtgtctttgatggcagtgaaattcacgaatcagtgctcacaatgcttgctttaagccaaaataaagctgaggttcattatttttcacctaatgattttcaacctactgtaattaatcatattactggagaagaaaaagcagaaaaaaggaatatgatggaggaggcttcacgtatttctcgtgggaaaatatcgcctttatcagatgctaaggctgaaaactttgatgcggtaattatccccggaggttttggtgcagcaaagaacttatgtaatttcgccacgaaaggtgttcagtgtgaaattaaccaacagctcttaacttttgttcaaaagatgcatcaacagaaaaaaccattaggtttaatgtgtatcgcccccgttatgttaccaaagatgttaaatgccccagtaaaattaaccattggtaatgatgcaaaaacggcagaaatgatcaccgaaatgggagggatacatattaattgtcctgtcgacgaaatagtggttgatgatgagtatcgggttgtgaccacccccgcatatatgctggcagagtcgatagcacaagctcaggtgggaattgagaagctggttaaaaaagtactagaaatggcataa

SEQ ID NO: 293975 - DNA, 702 bp, Proteus mirabilis
atggtactagtgagaaagttaaagaaactattaattattctaattgctttatggttagggatagttgtcctgttttcttttttaccggtgcctttttctgctgtaatgctacaaagacaaatttcttcgtggagtaagtttgatttttcttatgtatcccattctacatgggttaatgaaaatgaaatatctccgcagatctatttagcggtaatagcctctgaagatcaaaattttccaaaacattggggatttgatttcgatgcgattgaaaaagttttccaaaacagcctgcaaagctcaaaaacgatacgaggtgcctctactatttcacaacaaacggtcaaaaacttatttttgtgggatgggcgcagttggataagaaaaggacttgaagccggaatgacgccagtggtggagctgatttggtctaaaaaacgtattttaaccgtttatctgaatatcgtagagtttggcgacggtatttttggggttgagcaggcttctcagcactattttcgcaagcctgctaaacaactcaccgcccatgaggcggctttattagccgctgttttacctaatccacatattcttcatgttaataagccttccgcgtatttgctaaaacgacagcagtggatcttaaatcaaatgcgattaatgggaggaacttcgtttttaagcaacaatgcgttgttataa

SEQ ID NO: 293976 - DNA, 816 bp, Proteus mirabilis
atgatcgcgatggtatatggtgcaaaaggtgagatttgtattaatgggcaaactatcacagtcaccactaatctcacgttgattattcctaaatatagtcaagtttcttgtgatgtgacaaattttttcccgaccaaaccgattgaattacataccttagtactgtctgaaactgaattacaatctgtgttctctttacttaaaccattaataaaatcaggggcgccgattactcgtcatcttcctgattatcatctatcaacacctgaggtggttaaaactaattttacgttacttcagcaatgtctaccgcttgaacatggcaccccctctcaagagaccctgtttatgcaacagagcctcttttttattttgctggcggtttatcacgaaggggtcgatattcttaatatttttcgttttaattatgatgagccaaaaaatcaggcgattactcatctaataacacaagatccgcaacgtaaatggcatttagaggatgtagcaaaaacgctctatactacgccatcaacattacgtcgtcatttaagtaaagagggcgtttcgttttgtcaattactgttggatgtcagaatggggatcgcattaaattacctcaccttttctaactattctgtgtttcaaattagtcatcgctgtggttttggtagtaatgcttatttttgtgacgcatttaaacgtaaatatggtatgacaccatcgcaatttcgcacccaatctcgccaagcaaacgatccgaatgcaatagcaacaatggcgtcacaaaatgacgagtcaataaaaaaagtattttaa

SEQ ID NO: 293977 - DNA, 825 bp, Proteus mirabilis
atgcctgacttttctgagaagggttggcttgctgacatcgctttacgatatgagttaaagcgaggaaagacatgtcttactgaaaaacgtcatctcggccccttaatggttcagcgacctttttatccagaacaaggtgttgcacatacctatttgttgcatcctcctggtggggtggtcggtggtgatacgttatccattaatattaatgtgcaaccttacgcacatgccctattaacaacgccgggggcgacaaaattttatcgtagtgcaggaggcactgcatcgcaaacgcagacattgacggttgcacaagagggctttttagagtggttaccccaagagaatatcttttttcctgatgctcaagtgtgtttaaccacacatattcatttagcctcatcagcgaaatttatcggctgggaaatgcagtgttttggacgcccagttttaaatgagtggtttgaaactggcaaggtaaaagggcgcttaaatttttatgttgatgagagattaattttaacagagtcaatgcgggttgaaggcttacaaaaacaagctgccgcaatgcgtgaatttcctatgtttggctcgctttatatttatcctgcaaccgatgcattaaaagagattattcaacaccatttagagaaggtaaatcccctagttgaatatggtttaacggatgttgatggcattttagttttacgtgtattagggacgcaaaccgagccgatgatggcgtgttttgcgcaagtatggcaaatcgtcagacagcactggctaggttattgccctgagccaccgcggatctgggcgacataa

SEQ ID NO: 293978 - DNA, 303 bp, Proteus mirabilis
atggaattaacaccaagagaaaaagataaattactgctttttactgcaggccttgttgcagaaagacgtttagctaagggattaaaacttaattaccctgaagctgtcgccttgattagttgcgccattatggaaggcgcacgagaggggaaaacagttgctcaattaatgagtgaaggacgtactgttttaaccgcagagcaagtaatggaaggggtgccagagatgataaaagatgttcaagtagagtgcactttccccgatggcaccaaattggtttcaattcactcacctattgtgtag

SEQ ID NO: 293979 - DNA, 327 bp, Proteus mirabilis
atgatccccggtgaaattagagttaatgcagcattaggcgatattgaactgaatgctggtcgcgagacaaaaaccatacaggtggctaatcatggcgatagacctgtacaagtcggctctcattaccacttttatgaagtgaatgaggcactcaggtttgcacgagaagagacattaggttttcgtttaaatattcctgctggtatggctgtgcgcttcgagcccggtcaaagtcgcactgttgagttagtggcttttgcaggaaaacgtgaaatttatggttttcatggcaaagtgatgggtaaattggagagtgagaaaaaatga

SEQ ID NO: 293980 - DNA, 1704 bp, Proteus mirabilis
atgaaaactatctcacgtcaagcttatgcggatatgtttggcccaacaacaggcgatcgtttgcgattagcagataccgagctgtttcttgaaattgaaaaagatttcaccacttatggcgaagaggtcaaatttggtggtggtaaagttattcgtgatggtatggggcaaagccaagttgttagtgctgagtgtgtcgatgttctgatcaccaatgccattattttagattattggggcattgtaaaagcagatattggtattaaagatggccgtattgtcggtattggcaaggcaggtaatccagatgttcagcccaatgtggatattgtcattggccccggaacagaagttgtcgcgggagaaggtaaaattgtcactgctggtggtattgatacccatatccactttatttgtccgcaacaagcccaagaaggtctcgtttctggcgtaaccacctttattggtggaggaacaggccctgtggcaggtactaatgcaaccacagttacccccggtatttggaatatgtaccgcatgttagaggcggtggatgaattacctattaatgtggggttatttggtaaaggttgtgtcagtcagcccgaagcaatccgcgaacaaataacagcgggtgctataggtcttaaaatacatgaagactggggggcaacgccaatggcaattcacaattgccttaatgtcgccgatgaaatggatgtacaggtggctattcactctgacaccttaaatgaaggtggtttttatgaagagacagtaaaagccattgccggtcgagtgatccatgtattccataccgaaggcgcaggtggtggtcatgcccctgatgtgatcaagtcggtaggagagcccaatattttacctgcatcaaccaacccaacgatgccttataccattaataccgtggacgagcatcttgatatgttgatggtctgtcatcatctcgatccctctattcctgaagatgtggcatttgctgaatctcgtattcgtcgcgaaaccattgctgcagaagatatcttacatgatatgggggcaatttcggtgatgtcgtcagactcacaagccatgggacgagtcggagaagttatcttacgcacttggcagtgtgcacataaaatgaaattgcaacgaggcacattagcgggtgatagcgcagataatgataataatcgtattaaacgttatatcgctaaatacacgattaacccggcactggcacatggtattgctcatacggtgggatcaatagaaaaaggtaaacttgcggatatcgtgctatgggatcctgctttctttggcgtcaaaccggcacttatcataaaaggtggtatggtcgcttatgcgccaatgggggatattaatgcggctattccaaccccgcaaccggttcattatcgtccaatgtatgcctgtttaggaaaagccaaatatcaaacgtcgatgatctttatgtcaaaagcgggtattgaggcgggagtgccagaaaaattaggcttaaaaagcttaattggtcgtgtggagggctgtcgtcatatcacaaaagcttcgatgatccacaataactatgttcctcatatcgaattagatccacaaacttacattgttaaagcggatggtgtaccactggtttgtgagccagcgactgaattaccgatggctcaacgctatttcttattttaa

SEQ ID NO: 293981 - DNA, 486 bp, Proteus mirabilis
atgaaaaaatttactcagattattgatcaacaaaaagcgcttgaactaacctctacagaaaagccaaagttaaccctttgtcttaccatggatgagcgcaccaaaagtcgcttaaaagtggctttaagtgacgggcaagaagccgggctatttttgcctcgaggcaccgtacttaaagagggggatattctgctgtcagaagagggcgatgttgtcaccattgaagcggctaaagagcaagtatcaacggtttatagtgacgatccattattacttgctcgtgtttgttatcacttaggtaaccgacatgtaccattgcaaatagaagcaggttggtgtcgttattttcacgatcatgtattagatgatatggctcgcggcttaggggctacggtggtggttggcttagaaaaataccaacctgagccgggggcttatggtggatcatccggtggtcatcaccaccaccatgatcaccatcattaa

SEQ ID NO: 293982 - DNA, 666 bp, Proteus mirabilis
atgctagctgatctgcgcttatatcaattagttagcccctctcttccggtaggtgcttttacttattctcaagggttagagtgggccattgaaaaaggttgggtatgctcagcagaaaccttgtcagattggttaagcgcacaaatgaccggaacattagccacactcgagcttcctatattgcggcgattacaaacgagtttggcaaagggtgatagcgatacagtgaaatattggtgtgactttatggtcgcaagtcgcgaaaccaaagagttaaggcaggaagagcgtcaacgggggatcgcttttgcccgtttacttcctcaattaggcattgaattagacgatacgttacaacagcgggttaaacagacgcaattaatggcgtttgcgttagctgccgtgcattggcatatcgatagtgaaaagctctgttgtgcctatgtttggggctggttagaaaatacggtgatgtctggggtaaaactggtgccattagggcaaagcgcagggcaaaaaatgttgtttgctctagctgagcagatccccgctattgttgagttatcggcacattggccacaagaggatattggcagttttacgccagctcaagtgatcgccagtagtcgccatgaaactcaatatactcgactttttcgttcatga

SEQ ID NO: 293983 - DNA, 618 bp, Proteus mirabilis
atgcaagaatataatcaaccactgcgtattggtgttggtggccctgttggttcaggaaaaacagcactattagaagttctttgtaaagctatgcgcgatagttaccaaatcgccgttgttaccaatgatatatatacacaagaagatgcaaaaattttaactcgtgcgcaggctcttgatgcggatcggatcattggtgttgaaacaggaggatgtcctcatacggctattcgtgaagatgcttcaatgaatttggctgccgtagaagagttggcgatgcgccataaaaacttagatattgtttttgtcgaaagtggcggagataacttaagtgcgacctttagccctgaattggctgatcttactatttatgttattgatgttgcagaaggtgagaagatccctcgcaagggggggccggggatcacacattctgatctgctggtgatcaataagatcgatcttgcgccttatgtgggagcgtcattagaagtgatggaagcagatacagccaaaatgcgtcctgtgaaaccttatgtttttactaacttaaaagagaaagtaggtttagagacgattatcgattttattattgataaaggtatgttgagacgttaa

SEQ ID NO: 293984 - DNA, 579 bp, Proteus mirabilis
atgaaattgcttccgattaccgcagtactttgttccgcgctattgctacaaggctgtattggtgccgctgtggtgggtactgctgccgttgctggcaaaaccgcaaccgatcctcgttcattaggacaacaagttgatgatggcacattggaagcccgagtttctggtgctctaaataaaaaccaacagatcaagaacagtaatgcgcgcattgtcgctaccgcttatcaaggaaatgtgttgttaactggacaaagtccagatatgtcggttgcagagacagctaaacaagttgctagcaaagtggaaggagtaaacaatgtttataatgaagttcgccaaggtgagcctgtgacattaggcactgcttcttcagatacatggttaaccactaaagtacgttcacaaattttagctagcgatgccgtcaaatcatcttccgtaaaagtgatcaccgaaaatggcgaagtattcttattagggatattaacccgtcaagaaggggctgcagccgctaaaattgccagtgaaaccaaaggtgttgttaaagtaacaacggcatttacctatctaaactaa

SEQ ID NO: 293985 - DNA, 591 bp, Proteus mirabilis
gtgcttgatagaataaaagtctgctttacagagagtattcaaactcaaattgcagcagcagaagcgttacccgatgccatttccagagctgccatgatgatggttcaatctttgttaaacggacataaaatattaagctgtggcaacggtagctcagcagcaacggctcaacgctttgctgctagtatgatccatcgttttgaaacagagcgcccaagtttaccggcattatctttaaataccgacagtgttgtgatgaccgccattatgggaaatcagcaacatgatgaaatttatgccaaacaagtacgggcattagggcaagcaggtgatgtactgttagctatttccactcatggtaatagcagaagcattattaaagctgttgaagccgctgttactcgagatatgaccattgttgcactgactggctatgatggcggtgagcttgctggattattaggccctcaagatgtggagatcaggatcccctctcagcgtacagtcagaatacaggaagtgcagatgttaacggtcaattgtctctgcgacttaattgataatacattattcccacatcaggatgactaa

SEQ ID NO: 293986 - DNA, 378 bp, Proteus mirabilis
atgattattcctaaaagtacttatctagtcggacaatattatgagagaaaagcgttaaattacttgcgccaacaagggttaaagttaattgagcgtaatgtccgatatccctgtggagaaattgatcttattatgcagggtaatagaacatggatatttgttgaagtccgctttcggcgtagtgcacaatttggtgatgcaatcagctcagtgacctacagtaaacggcgccgcttatggtacgccgccaattgttggttagctcaacgccaacaaagtatcgagacggttaactgtcgctttgatatttgtgcatttgatcaacgccagttaatatggctaaaaaacattctcgatcatacggaatttattcgttaa

SEQ ID NO: 293987 - DNA, 1773 bp, Proteus mirabilis
atgctttcctcaatttttgtgcgttttaaaacaggtttatcctatactgcaatactttctgccttgattatgtcaggttgtaccctgacggggcaacaacaacagccactgacacctgctgaaaaagcgcaagtggaaatgaaacaatttcagaaagtcattgatgatgcgaacggacaagcctctttagatgtgatccgtgcctatattggcctagaaccccttatcactgatcctgtattacatcagcaaaatattgatgatacttggttaacactcacgaagcttacacctgaacaacgtcgtagtgtggtaatcaaagctgatgaaaatacattacaaggctggttagatttactcaacacttatgaatataaccaagatgatacggataaattatcccaagcaatacgcgaatggcaaacacgctatccacgcaatccaggagcgctaacattaccgacgctgttattgcgccaatcacaatctgccgtcagtaatagcggaaaaatcgcattattattaccgttaacaggacaagctaaagtatttggtaatgctattatgcaaggctttaccgatgctaaagaaggtttacctcaacctcaagctaacgcagcgccagaagccccccaacaagatagtttagcttccattttagcagaattaggtatttcatctccgaatgcagacacagcaacaacggaaaacgataattcaacggatgataatacagcggaaggcgctgaaaatagtgatgctacttcagcaaaagaaaccgaagcctttgcgggtaatagccgcgtgcaattagatcctattgtccaaaataatcgccaagtgattatgtatgataccaatagccaacccattgatctgttactgaaacaagtgcaacaagagggtgctgatttaattgtggggccactattaaaacccgaagtgatcaaaactattgagttaaaaagtggtttacctgttttagcactaaatgaagttgataatattcctcttgctactacagtgtgtttcttttcactttccccagaagatgaaactcgtaatgcggctcaacacttacgccagcaacaaaaatctaatccacttattatcgttcctgacaataaattcggtcaaagaatggcacaaacttttgcggatgagtggcagcgtagcgggggtggaaccgtcttacaacaaactttcggctctcttgatagtctaaaaagttcaattaatcgtggcgtgggtattcgaatgacaggaaccccggtattgccaacagacaatgcaccactgccattagataccgcttcaatgccaacaacaaacggtgctattgattctgtgtatatcattgccactagcgatgagttaacattgattaaaccaatgattgatatggcaatcagtaccaaaaaacgcccaccgatttatgtcagttcacgcagtaatcaagggggaatggggccagattttcgtatggaaatggacggtatccaatttagtgatattcctcttatgacgggagcaaatttaccgttaatgcaaaaagcatccagtaaatttgcgaacgattactcattaatgcgcctttacgctatgggtattgatgcatggtcattagcaaacaattacaatgaactcaccaaaggaaccttacagttcaatggtgtttctggctctttacgtgtggaagataattgcactatttatcgacaactcccatggatgcaatttaaacaaggtaaaattgaacctgtgggacaataa

SEQ ID NO: 293988 - DNA, 879 bp, Proteus mirabilis
atgaatcaacctaatcgagcagcggtaacgacatccacactgtacatagtacccacacccattggtaatctgggcgatatcacccagcgggcacttgatgtgctgtctcatgtcgatttaatagctgcagaagatacccgtcatacagggcttctattacagcattttgccattaacgcacgtttgtttgcgttacatgatcataatgaacagcaaaaagcagatcaattaattagcaaattacaacaagggctaagtatcgcattagtctctgatgcaggtacaccattaattaatgatcccggctatcatttagtcaatcagtgtcgcaaaaacggtataaaagtggtgccattacctggggcatgtgcggcgattaccgcgctatcagccgccggattaccttctgaccgtttttgttatgaaggttttttaccagcaaaaacaaaaagtcgtcaagattgtttgcgtgatttagcacaagagccacgtactttaatcttttatgagtccacccaccgtttattagatagtttagcggatatggtgacggtttggggggaagcgcgctatgttgtattggcaagagaattaaccaaaacgtgggaaaccattcaaggaatgcccgttggggaattacttaactgggttcgtgaagatgaaaatcgccgtaaaggagaaatggtattaattgtggaagggtatcaaaagccacaagaagaccattttgccccagaagtattacgcacattggcgattttacaaaaagagttacctttgaaaaaggcggcagcagttaccgctgagatttatggcgtgaagaaaaatgcgttgtacaaacacgtcattgcgcaaaatgaagcggaacaagatcagtaa

SEQ ID NO: 293989 - DNA, 705 bp, Proteus mirabilis
atgataaaatacagaacagcacaacagtgtggcaaagcggactatggctggctacaagctcgctacacattctcctttggccactatttcgatcctcattttttagactatggcacattaagagtactgaaccaagaagtgctcgcaccaaattctgagtttaaagcaaaaacctatcctcatgtggatgtcgtcaatctgatcttaagaggtgaagcgacttatcttgataatatggggcgaacacttaccgccaaacaaaacgagtgtttattaatttcgcctcataatacagaaacttacattgaaagaaatagtagtccagataccccattaactcgtattcaattatggctaaacgcgtgtccacaacaagagagcatcgcttcacaaaaattagctttaaatgaagatttaaaatatcaattattggcttccccatcaggggataatggcagtttgatgctaaggcaaaatatctggctctatcatattaatttagcgcaaggggatgaaataaccttgccgatacagggtcagaaaggctatttgcaatctatcaaaggcggtgtccatttccaaacctcagagcaagagcttggggaaatccgttgtggtgatggtgcttttattcaagatagcaatatgctagcgctaagatgtcaaaaggcttttcgtggtctttttattgatatcgtttcttaa

SEQ ID NO: 293990 - DNA, 903 bp, Proteus mirabilis
atgagtaaagataaagccattacattggaatctctacgagtgatggatgccattgatcgtagaggaagttttgctgccgccgctgatgagctaaatcgcgtcccatcagcactcagttataccatgcagaaattagaagaagatttggatgttgtgctatttgaccgttcaggacatcgaactaaatttactaatgtgggaagaatgttacttgaaagagggcgtattcttcttgaagctgcagataaattaacttctgatgctgaagcgctagctcgcggttgggagccacatattacgattgtgtgtgaagcattaacgcccgcatctcgcctattcccgttagttgaaaaattagctgaaaaatccaatacacaactctctttagtcaccgaagtgcttgctggagcatgggaaagcttagaaagtggtaaatgtgatattgttatttcaccggatatgcattttcgttcttcatcagaaatcaatttccgccctttatataataccaccagtgtctatgttgccagccctgatcaccctatccataatgaacctgaaccacttgcagaagaaactcgcttaaaatatcgcggtattgctatcgccgataccgcaagagaacgacctgttttaactgtactgttattagataaacagcgtcgtttaacggtgagttcgattgaagataaacgtcgagcattaattgcagggttaggggttgctactatgcctattgatttaattgaagatgatttaaaagaggggcgtttacgtgtggttggccctgaatatcatcatgaaaataatattattatggcgtggcgcagagacagtatgggagaagctaaatcctggtgtttacgcgaaattcctaaactctttgccacggataaaaaatag

SEQ ID NO: 293991 - DNA, 393 bp, Proteus mirabilis
atgaagaattttgaaaacattgccttattaatcgcacgtattctcatgccaattttatttatcagcgcagggtatggaaaaattgaagcctatgaaggtactcaacaatatatgcaatcaatgggtgtgccgggagccttattacctttaaccattttattagagttagggggtggattagccatattattcggtttcttaactcgcacaacggctatctttaccagtgtatttacgctgttaaccgcactactgttccacactaactttgcagaaggtgcaaatcagttaatgtttatgaaaaatatgactattgcgggtggctatttattactggttatcacaggtccgggtaaatggagcttagatcgcctatttaagaaaaattggtaa

SEQ ID NO: 293992 - DNA, 306 bp, Proteus mirabilis
atgagcaaacaaaatagacgcaccctagcattagcaagacgcaaaaagctgttgttggatgaaattcaacaacagcgcactcaattagcgcaagaggggcaaacatggttagaggtcaccgcgccttatgataaagcatggaatatcttaacctcgttaaaacctatcttgttaataggggcaagcgtggtatctctttatagcattaagcaccctaaaaaactggttcgttggggacgacgggcgataggcgctgttggtttaatacgcacattacagaagtctgtcaaaaaaaccgctgactaa

SEQ ID NO: 293993 - DNA, 411 bp, Proteus mirabilis
atgagtgatactcaaagaccacagggccccgcatccggggttctgaattctcttagtcgtattggcgctgttatcgttggcatggttgaaacccgcctaaaattaatcgccatcgaactagaagaagaaaaaattacacttattcagcttattttaatggcggggatcaccttattactcaccgcctttggcttaatgagtctacttattctcctcttttgggtgatcccacctgaatatcgtattcatgctttagcgattacaacggctattttgctagttggtgccttaataggtgccatcatgacattgagaaaagcccgcaattcaacgctgttaggtgatactcgccaacaactagaattagataagcgtcttttggagcaatatcgcgatgagcaaacaaaatag

SEQ ID NO: 293994 - DNA, 306 bp, Proteus mirabilis
atgtcacaccaacgttcaaatgaagatctgcgtagtgaattaaaatctctggctgatactctagaagaagttctgaactcctcggcagataaatcaaaagaggaattacaaagtttacgagaaaaagctgaatatgcgctacgtggctctcgtgcaaaactcagtgatgcaggtagagaaatcgtcgataacactaaagaaatggcgggtaaagcggacaactatgtgcgtgaaaacccatggacaggtgttggtattggcgcggcagtaggtgtcgtactcggtgttctactttcgaaacgttaa

SEQ ID NO: 293995 - DNA, 669 bp, Proteus mirabilis
atggaaatcgtaagagagctgttcttggcgctttggcatcaagattacgaaaccttagcgaatccctcactgctttggattatttacattttattattcagcatactattcctagaaaacggagtactacccgcagctttcttaccaggagacagcttattaattttagtgggtgtgttaattgctaaaggaaccatggattttccattaaccttacttattctaacggcaggtgctagcttaggttgttggctgggttatctgcaagggaagtggcttggtaacacccgacttgtacgaagttggttatcacatttaccagaacactaccaccaacgagcccatggacttttccatcgacatggcttggcagcattacttattggtcgttttctcgcttttgttagaacattattgccgactattgccggccttgctggcttacaaaacggtcgttttcaagtttttaattggctaagtggtctgttatgggttggtattttaaccaccttaggctatttattaggaaatagtccgttattccgccaatatgagcatcatttaatgaattttctgatgctactgcctgtttgtttattagtgattggcctaatcgggagtgtatgggtcgtcattaagaagaaaagtaaacagagtaatcaaccgtaa

SEQ ID NO: 293996 - DNA, 1254 bp, Proteus mirabilis
atggataaacaacaatccagagtacttaacctgctttttcagggaagtctcgttaaacaaatacttgctggtttaattgcgggtattttactggcttggttagcaccagaagtggctaaaatgatgagcttattaggtaacttatttattagtgccttaaaagccgttgcgcctgttttagtctgggtattggttatggcttcgattgccaaccaccgtcaaggacaaaaaaccagtatacgtcccatattagtgctttatctgctcgcgactttctttgctgcactgacagcagtagtggcaagctttgtgtttccctcagtattaacgctagttgtcaacgattcacagctatcgccacctgaaaatattgctgaagtcttaaaaggtgtattaattaatgtggtggctaaccctgtagatgcactgattaacggcaattatatggggattttagcttgggctattggcttaggtttagcgttacgccatgcaagtgatacgactaaagcattaacacaagattttgcagatgcggtaactaaccttgtgcgtgtggtgatccgtttagcgccaatcgggatttttggcttggtgtcatcaaccattgctacgactggctttaaagctttagctggctacttgcatgtcttacttgttttaattggttgtatgctgtttgttgcgctcgttgtcaacccattgattgtattttggaaaattcgccgtaatccttatccattagtatgggcttgcttacgtgaaagtggtgttactgccttctttacgcgtagttcagcggctaatattccggtgaatatggcaatgtgtcgtcgtatgaatttaaatgaagatacctattctgtctcgatcccattaggtgcgaccattaatatggggggagcggcaatcactattactattttaacacttgctgcggtaaataccttgggtatgcctgtggatattccaacagccttattgctaagccttgttgctgctatttgtgcttgtggtgcatcaggggttgctggtggctcgttactgttaattccgcttgcttgtagcatgttcggtattagtaatgatctggcgatgcaagtggttgcggtaggtgtgatgattggtgtcttacaagattcagcagagactgcattaaactcatcaactgatgtgctatttaccgcaacggtctgcatagccgaagatgagcgtttagttgccaacccattaactgaaaaaaataatggctaa

SEQ ID NO: 293997 - DNA, 2019 bp, Proteus mirabilis
atggcacactattcttatttatttactccccttgatttagggtttactacgcttaaaaatcgtattttgatgggctctatgcataccggactagaagaagatccacatgatgcacctaagcttgctgaattttatgctcaaagagctgcagcaggggtggcacttattgtcaccggtgggatctcccctaataagcaaggtgtattgttgccacatgcagcaacgctaatgtcagaagatcaactcgcttctcatcaattagtcactgatgcggtacataaacaggatgggaaaatcgctttacagattttacatactggtcgttatagttatcagcctaatttagtcgccccttcagcgatccaatcgcctatcaccccttttatgccccaagcaatgagtcatgagcagatagaacagactattgaagattatattcattgcgctaagttggctcagaaagcaggctatgatggtgttgagatcatgggatctgaaggctatttaattaaccagtttttagtaagtcatacgaatcaacgcgatgatcaatggggtggctctattgaaaatcgttgtcgttttgcattacgtattttagctggcataagagaagctgtaggtgaacactttatcattatctatcgtttatcaatgttagatttaattaccgagggagctaatgcctcagaggtattttatcttgctcaagcagtagaaaaggccggagcaaccctaatcaatagtggtattggttggcatgaagcccgtatccccactattgccactatggtaccaagaggacaatttgcttatgtcactcgccaattgatgggaaaaatcaacattcctcttatcacttctaatcgtatcaatacacctcaagtggctgaagctattttagcggaaggctgtgcagatatggtgtctatggcgcgtccttttcttgccgatccgcaattcgtattgaaagcgcaacttggtcgcgaggatgagataaacacctgtattgcctgcaaccaagcttgcttagatgagatattcagtggtcacccagcatcttgtcttgtaaacccttttgcctgtcgagaaacagagcttattttaaccccgactcaagcccctaaaaaaattgctgtcgttggcgcaggcccggcaggattagcatttgccattacagcagctaaacgtggtcatcatattactttatttgaaaaagaagagcgtattggtggacaactcaatattgccagtcaaattccgggtaaagaagaatttaaagagacattgcgctactttaagcggcaattgcaaatcacaggggtgatcgtaaaaaataatacggaagcgacactttcccatctgcaacattttgatgaaattattttagccagtggtgttatccctcatattccagagattgatggccatgataatccgatagtaaaaacctatcttgatgtccttaaataccatcagccaaccggcgaaaaagtggtgattattggcagtggtggtattggttttgacactggcctttatcttacccaaacaggccaatgcagtagtttaagcccttgtgcatttaataaagagtggggaattgacccaacacttacgcatcgcggagggatcacctccgccgatccttttattaaaaaagacaaacagattgttatgacgcaacgtaaaagtgggaaatttggcttaagtttaggtaaaacaacaggctggatacatcgcttaacattgcagaaaaaaggggtcaaatggctaacgggctgccattatcaaaaaattaccgagcaaggagtaataattgaacataatgaacaacagcaactgctcgcggctgatagcgtgattttatgtaccggacaacaatcttatcgtccgctactgcaagcgttacaacaagaaaataaaaccgtccatcttattggcggggcaaaagaggctaaagcattagatgccaaacgagccattaagcagggaacagaattagcacttactatttaa

SEQ ID NO: 293998 - DNA, 417 bp, Proteus mirabilis
atgattaataaatttaatcagcttacaaaccaccccgatttaggtaagtttgttttacgtgtttcgctaggtgtcttaatgttattacacggattacacaaaatggagccaggaggacttgccggtatacagggaatgttggcaaatattaatttacctgcatttattgcttatggcacattactgggtgaagttctatgtcctatcttactgattatcggtttatttactcgattttcagcatttgttgtggcggcaaccatgggggttgcggtgctgatggtacattccggtgatcttttagccttagatcccaaaacggggggatgggcacctgaaagtgctggcttctatatgtttgctgcgattgcggtgatgtttttggggagtggtcgttgggcgctcaaaaaagattaa

SEQ ID NO: 293999 - DNA, 2799 bp, Proteus mirabilis
atgtatcgtaagttactgattatctcagtcagtttatcacttctgggttgtgcaacaggcacctcgtctgagcataccaataataccctttcactgcgccccgatattcgccattttacgcttgataatggcttaaatgtctatttgctacaacgcccacaaacgggggttgaaatgcgtttactggtgaaaagtggctcggtacaagaagatgaaaaacaacttggctttgcccactttaccgagcatatggcttttaaaggcacgactcattttccgggaacaactgggtttaaacaacttgaaagcctaggaatgaagttggggagtcatgttaatgcggcaacgagcttaaactcaacaacctataaattatccctgcctaatgccaatccggcccaaataaaaacagggttgaggatcttgtccgattgggcctttggcatgacatttgatcccgttgagtttgataaagagcgtccggtgatcgtcgaggagtggcgattacgccaaggtattggttttcgtattaatcgccaacttgaagagttacgttattatggcagtcgttatctagatcgtgatcccattggggacttagatatcgttaagcatggtgatgtcaaagaagcaaaacgttattacgatacttggtatcagcctgaaagaatggcattggtgttagtgggtaattttaatcaaggtgatgcgattgctgatattacccagatgttcaatgcaaaaaatagtgaaaacaaaggcgttgactctccatcatggcaccactttatcgacaataaagatttattagtaaagacgatttttgataaagagcaaggctcacgcattgtgcaattcactctacagcgtacactgcctgcaccattaaatagtcgccaaggtcaatatgatgatttaatggactcgttgtggctctccatcttaaaccagcgcttttcaaccattgttgataatgggttagtgccttccgtcagtgccaatacacaaggtgcgatgttagatgcccgtcgctcacaacaattgatgattgcccatcctaaaggggatgattatcaaggtacattagatattctatttactgaggtacagcgtttagcctcacaaccagtatctcagcaagagttagataatgcccgcaatgcgctgttaaaacgtcttagccaacaagctgctggtgaagagcgctatgagcatggttatttagctaaccaaattactacggcacttgaattagaaatgccaatccaaagcaaaaagcaggcgttaaacttaagttatcaactaataaataacgttacacctgataccttaaaacactattttgcccaatacctaacacaagcttcaccacgagtggcaattatcggcccagatagtgatagtcaggtatttagtgccactaaagcctcgcaacgctggcaagagattagacaatctgatcccggtgcgtttacattgaaaacccatgcggtggtattagatattaaacctgagcaaaccggtactattgtcaccacacaaacacttccgattgaaaaaacacagctgtggacactgagcaataacgtaaaagttattattaaaaatgaccagtggctaaaagacaatatccaagtatcactgcgtattcccggaggtgtttctctggaaacaggacaaagtttaggcttggttcagtgggcattaaacttaccagaagtgagtggatatgggcattacaacgcaagagagttagcgttatttagtaaacagcatcaaatcagtttgcgtccatacagtgagttgttattccacggcttgcgtggcgaagcgcctattgatgagttagacaccttgttggccttattgcatttaaaagtgacagcaccacaatttaatgggcaaaaattagagcaacaaaaacaagcaacggcattagggatcgccaaaacaccagttgaacgtattttcttagatcatattaataaagagagctatcaaaacggcgagcgcttagtgatttcgccacaaggcccttggcaacagtttaccgcccaacaattacaacaaacgaatcaatcacttctaggacagcctgccgatatggtattggtgattagtgggcctattaacctaaatcaggtcaaaccgatgatcgaacgttggatagcaacgctaccgacacgttcatcgcaacgtctattttgggctgatccggcgattaatcccaaattaagctcatttaataaaacctaccctattgccagtagcgataagagtatgatcagtattcaatacgcagccaaagcccaatggtcacaacagcaactgttagcacttaacttgcttgataccgttgtcagccaacgtttaaggcttaatcttcgtgaacgagcgggcgggatctactcgctaggcttttctgagtcattaaccaagctaccaagtagtttttataccggacgtttaaactttaccgcatcaccacagcgggcagatgaattaattgcacttgcgcgtaaagtggtcaatgacgtaaaacaagcgggtattaccgataaagaattacaagaggcaaaaaatatttggttaactgaatatgggcaagccaaagagagtgctagctattggactgatgcacttgctcaagtggcaacagatgaccaacaatatcaacgactattaactgagactgcgattgtcaacggaataagtgtcagtgatgttaatcaagttgctcgtcagtggttgggtgaaaatgaaaaaatcttcaaactaacaccgccaacaaagcaataa

SEQ ID NO: 294000 - DNA, 1710 bp, Proteus mirabilis
atgaaaacaataaaacaatttttctatttggtttcacctttttgggggcggcgtgccgccctttactgctggttcctattaattctctctttaacgttaaccctctcatccgtttggtttaacgtcaaaatgaatgaatggaatggcagcttctataacgccctacaacaactcgatgggcaagccttatataaactgcttcaacagtttgtgattattattgccggattaattaccgtagtcgtgatgggtgatttcttacgccaaaaaatgatcattcgctggcgtgaaggtatgacagagcaagtgcttgagcgctggctatcaaaaaatagtaaacactatatgttgcggttaacctcgcaagagccagataaccccgaccaacgaattgctgaagatattcgtttactgattgaatcgacaatgcgcttaacggtgacctttttacattcactgttaacacttatctcttttgccactattttatggtcactctctggtgcactctctttctctttagcaggcaaagagtggaatataccaggttatatgttctgggcctgtattatttatactcttatcgggatcaccatcacccagctcattggttctccattacgtaaaatcaatatggataaacagcgtaaagaggcggattaccgtactgcgcttatcacacgtaaacaacatggtgatgctattgccggtcaacggggtgaaatgagcgatcgtcatgaactgatgggacgctttttaggggtgatccgcaactggaataaccttatccgttatgagagaaaccttgctttctttactgtgggttatcagcaagccacggcaatggcgccaattatttttgctttgccaaaattcctcgccggcgaattaatgctagggggattaatgcagttacgacaagccttctccagtgttgctggggcattaagttggtttattttctcctataaagaaattgctgaatggcaggcaacggttacccgtctttatcattttgtggtgttgttagagcatgatcaccagcctgagatcaccgagttagatgataaacaaactaagctgacagccaatttatcgctatttatgcaagacgatagattattaattaacaatattcacttttctctcaaagcgggtgaattggcggtaattgaaggtagctcaggtatcgggaaatcaacactgttacgtgcgttaagcggccactggccttattttaaaggagatattcaacgggtaaccaatatcagttggctcccacaacgtatgtatctgcctgttgcccgcttagatagcttattagcttatccttgccaagcatctcagttctcacaacaagagtaccaagaagtgcttcattgggtggggctagataaaataaaaaatcagctttcactggaaacagattggacaacacgcttatccggtggtgaacaacaacgtcttatctttgcccgtttattactcaataaacccgatcttattttattagatgaaaccacatccgctcttgatgaacaaaatgccctacatatgttgttattacttaaacagcatctaccaacctcgggcattgtcttagtcagtcatcagcgtttcactcacgctattgccgagcaagtaatttcattacaagcgccgactgcgtcctcctctcaatcagctggagttactgaatatgtatcgtaa

SEQ ID NO: 294001 - DNA, 2769 bp, Proteus mirabilis
atgaatgggattggtgaaatgagaataaataataaaaaaaggcctctaaaaaggtcgctactcacattattaataacggctaccgtggcagccccttatagttatgcggcaacgctatcagtctctttaccagagcaatctttagctgattctttaaacactatcgctaaacaaggtcaggtacaaattctgtttgatgccaacgcaataaaaaacttacgggctcctgcactctctggtcaatatgaaacccataccgcattacaaaaggtgttaatcggtagtggtatggaaattatttcacagggaaatggctttgttattcgtccattagcaacaagcagtacgattgtgatccctgaagttaaagtcacaggggtgggaagcagttatcatcctgctacagatgttgtttcagcaccacaatacatcaccgcggaagagataaagcaacgtaatactggcgatggcaatgtcaccgacttacttaaaagtaaccctgcggttcaatttgcaaataacgatagcaactcgatgaaccaaggtgaaattaagccctcacgtatttctattcatggctccagtagctatcaaaatgcctataaacttgatggcgtcagttttaataatgactttgatccggcaaattcgggcaatggtgaaaccaatacccgtattaccagtgatgagcaagggatgtatcttgatagtcgacttattgatagtgtcaccgtttacgataacaatattcccgttgaatttggcggatttactggaggcacagttgaagtacaaagtcgtcgttggtctggtgaaacccatgccaatgcctattaccgtactacccgttcaagctggaataatattttcaccgatcccaaattaaaatttgatactgcaaataatgattttagtaatccagcccgtttccagaaaaaatatgataaacaaaactatggcggttggtttgaaacaggtttaacggaaaatacaggattaattttctcagcttctcgtcgggaatcaaccattccgatgatgataagtgctgaagggggaattgttcacacccctgaaggcgaattagagcatgtattacaaagcccacattatcgtgatcaaacgcgtacttcagataactactttatcaaatattcttggaatatctctgataaacaatcttttgatctatcaagtaatattgcccgttataagagctatctgttctccagctcggtgtataactccggttatgataatgaacataatggactcagttttaccgccctttataagcatcaacttgcgctaggaaccttagagttaacagcaggttatcaaaatctggaagataaacgcaccaatgatcaagactactttatcaaagtagaagattacactgattggcaacaccctaatcaagtctccagtggtggtcaaggtgatctgcgtagtaaacaagaaacctatagcgccaagagtattatgcgttttgatcccatcgtgtggggtgtcgtcactcatcgccccaccaccggatttgaaattagccgcaccaaaggcgcttatattcgtgataaaacctattacaactatacctatcgcggcatgacggtcaatgatgaatggatgggaagcttatcacaaacgacgcgttttctagcgggtacccataatgcgtcttataccaattattcattttttattgacgataatattcaatataaacgcctcaccttacgtcccggtgtacgtttagatcgtgatgattttgtacaaaaaaacaacctctcaccgcgtttaagtgctacttacgatatttggggcacaggtaatactttaattattggtggggtaaaccgttactatggacgttcaatgctcacttacgccctttatggtgcgcaaaatgccggtttacaacactgctattttgactgtcaaacatcggaggaaaagtggactaatcgtaccgactttgatggtgttgattcactaaaaaccccttataacgatgaattcactctaggtctacaacaagagatagcctcaaccacttggcgtttacagtatgtgcatcgcaatggtcgtgatgaggtgcgtagtgatactaaatatccagactcaaccattgatgaaaaacgtgctattcgccacttcaataataatggtcgtagtacacacgatacattaacgctctccgtgagaaatagccaaccatgggagcttgctaaagccgaccacgtctttaatgcttcgattagctggcaaaaaagcaaaaccaatacgccaaaagactcaggttatgccaattttgatcccagcgttcaagggatgaactatgacaaggtgtggtatggcggaaaaattatcaatgccaaagacttaccctctgacaactttaactcgccgttaaaagtgaccgctgagctaaccagtgtttgggatgatgtaggagtgacttggtttaaccgtttgcaatggaatggagctcgttcacaagcagagaaagccaataatggtgcgcccaaaccaagtgagtacggcccgctatttgaatataaaaaacgtcattacagtagtcgttttacttgggataccaagctcagttggcagcctgaatttgcttacggtgtaggtatttccgttgaagtgaataacgtactcaataccaaaaatgtcaatgattacattacctatcaagataaagagtacaaatcttacgagccaggtcgacagttctggttacaagtcagctatgactattaa

SEQ ID NO: 294002 - DNA, 549 bp, Proteus mirabilis
atgactagcgataaatcattagcacaaaaaatcagttgtgcctaccaatcaacctatggtcagcttgtacgttttttccaaaaacgcacgggtaatcaccatgatgcggatgatttgtctcaagatgtgtttacactatggctaaatcgaaaagaacaaactcctgtccaagagcagcgtgcttttttatttaaaatagcgaaccacgttttgatcgatcattggaggaaaaaccaaaaacaaaaaaatatctatcaagaagattatcaattagaagatgcggtacagacctatacgacagagcttgatcccgggcacgtccttgagcatcaacagcgtttagatttactgacacaagctattgatactcttcctccccgccgtcgagaagcttttattctttatcgctttgatggattatcacaaagcgaaattgcagaacaaatggaaatttcgataagcatggtagagaaacatattgccgcagcactattacattgtaaaagatatgtcgatgcaggacaggagaaatgcaccaatgacgagtaa

SEQ ID NO: 294003 - DNA, 792 bp, Proteus mirabilis
atgagtagtatgtcggcgacttttccacgccgttggtccttttctattggtgggttaactgccagtattgtgtttcatgtcaccttggttgttgttgctataggttggataacgacgaaagatgagcaatatgcggttttacctccagcaatgacgatgcaagtggggctttatcaattggcaaaagcagaacctaaagaggttcctgttgggcctgaacaggtgatgtcagttccagaagctgccgagccagagccgatgaaagagcaacttgatgtgcctaaaatgcctgtagtcgaacagggaacttatgagcgagttgcggaaaagccaaaggtgaaacccgtggttaagcctaagcctgtcgtggtaaaagtacctgatgaacttcccgtttcagaagcgccagcagataccacaaccgcccctttatcaggtgaaaacgcgaccagtagtgccgattttaccagtaccgcttcatcatctcgcagtggccaaatggggtgggaaagtttagtccatagccatattgatatgtataaacgttaccctcgtgcagcattacgttttaaagcgacgggagtgacacaagttgaaatttcgctcaatgcaaaaggtgagttattagatgtgagtatacaaacctcgtctggtaatcgtatccttgataaagaagcgattaacactattaaacgggcatcgccatttccggcacctgaaagccaccgtttagttaacggctctttctcatttattgcgcccttgagctttgactatcggcaaagtagttaa

SEQ ID NO: 294004 - DNA, 1950 bp, Proteus mirabilis
atgaaactaacacctctatgctgtttattccttgttctactgccttgcagtgtaatagcccagacaacttaccagcaatcaatccctgatgtattaaccgtttggagcagtcccattgcggcaaatcccgatgtattaacacaacaacaaatgctcgaacaaaataaagtcaatgcggcacaagcacttgcaacattacctggtattgtgatgcaaaaatcaggtaatcgtaacgaatatacccttaaagtacgtggttttgatagtcgccaagttccggtgttctttgacggtattccaacctatgtgccttatgatggcaatctcgacttagcgcgttttaccactaacgatctcgccagtatcgaagttaacaaaggttatacctcattactgcaaggccctaatctgatgggaggtgcaattaatatcaccaccgcaacgcctcgcaaaccattagaaggtcatattgcttattcgcaaggttttgctcgtggtgctgattatgctcataacatgagtgctcgtttaggagcacgtactgaatatggttttatccaaattagtggcagtcaactccagcaacgttttacccccatacctaatgcagatgaaaataataacgcagtggggacacatggacgtcgtagtcattcagcaacagatgataaacgaggaatgatcaaagtgggttggacaccacgcgcttctgacgaatataccctcacctatgtaaaacaagatggtaataaaaatagtccaccgaatagtgatcctaatgccaaaggtcgatataaatattgggcatggccagattataataaagagagttactactatagtggtgtgacacaacttacggatagcataaatctacaaagtcgtgcttatcatgataagtttgaaaataccctttatatgtatcctaaaaaaggtaatagggtcgattatagccattatgatgatcacagcacaggcgctgcattacaattcggtatcgatatggaggaaagtgatctgctctcttttgcggtacattggaaagatgacgttcaccgtgcccaaaaagaaaaaaacggtgattgggtacgttttaaagatagaacttggtcattagccacagaatatcaatgggtagtgagtaacgatcttgatgtcgttggcgccataagttacgactggcgcaaaagtatcgatacagataaaaatgctgataacaacaaacaaaatgccattaactgggaaatcatggctaaatattcattagccaatgacgataatatacgttttacaatctctgatcgcagtcgcttccctacccaaaaagagcgctataccaccgaaaaacccaaagatggatcaagagggattattaaccccaatttagatccagaacgcgcattatcctttgatatgacctacgaaggttatctcaatgagaaatggggctaccaaactagcctatattacaatcgtgtaagtgatgccattatggcgcatacgctttatcgtcacggtgaagcgctatttcaaaaccaaaacagtggacgtgttgattatctaggcttggatattggtactaaagggaaaatgaccgattggctagaacttggcctaaattatagctatatccatagtgatccaaagcaagttgaccatattgaaggtttaccaaaacataaagcctatatgtggttaacctttattcctgttgaacaagtgcgctttactattatggaagaagcacaaagttggacttataaccgtatagatgagaataataaactggctggctatacaaaaaccgatctacggttagattatgatgttggatatggtatttcagttaatgcttccattaataatctttttgataaatcttatcaatatacacaaggttatatagaagatggccgtaattattggttaggcgctgaatataaattctaa

SEQ ID NO: 294005 - DNA, 849 bp, Proteus mirabilis
atgatttattatcccgatgcttttcttgataatttattgctggaagatattcaatatggcgatttgacttgtcgcgcactcaatattaaccatcaattaggcacaataacttttacatgtcgtgaagccggctgcgtcagtggaatcaccctaggctgccgtttattagcaaaattaggactgactgtcaccgcacatctacaagaaggtgattttgccaagcaaggtgattgtttaattagtgcagaaggtcgagcagatgcactacaccaaggctggaaagtggtgcaaaacgtgctggaatggagttgtggtgtgagtgactatatggcaaaaatgctcgaaatctatcatcgctaccaacctaaagggcaaattgcgtgtacacgtaaaaatatccctaataccaaattactggccactcaagcggtacttgcgggtggtggtattattcatcgccaaggctgttctgaaactattttactctttgctaaccatcgtcattttttatccgagccaaataattggttacaacaggttacacagttacgccaagcagcacctgaaaaatgcattgttgtggaagcagataacttacaacaagcaagagaagcgttaaaagcgcagccagatatcttacaactggataaattttctattgaagatattaccttactacaacaagaggctccgcagattgccccacgctgtcatctttctgtcgctgggggaattaatctaaatactattgaaaaatatgcccaaacagggatcggcttaatggtgacatcagcaccttattacgcaccacctagtgatatcaaagttcgcctttaccctaaaaattaa

SEQ ID NO: 294006 - DNA, 825 bp, Proteus mirabilis
atgaacaccattgaaaccacagattttgctgagctttataaaaaccatatgcaacaggcacaaagaaccaaaaaagagcctgaacattgggataaacgcgctgaaaaaatggcagaaaactgtgcggatcccaacgatccctatttgatcaagtttcgtgaaatgatggatttttccgatgctgaaacactattggatgtcggctgtggacctggctctattagtattcatgttgctgacaagtttaaaaaaataatcgggatagattatagtaccggcatgctaaccgttgccaaacgtagagccgcacaagcgggtattcatcatgctgattttcttcattattcatgggaagataattgggatgcgcttccaccttgtgatattgcggtcgcttcacgctccacattggtgatggatttaaaagctgcgctgttaaaactaaatcgccaagctaaattacgggtttataccactcacaccgtatcacccacttttgttgatcaacgtattcttcgcttattaggtcgcaatgttcccacattgccgacctatatttacgcagtcaatatccttaaccaaatggggatccaccctaaagtagattatatccgtagccgtaattgccaaaataattttaatagccttgagcagtttattgacagtattaacttctctgtagggcctttaaacgaaaatgaaattgcacacttaaccacttattatcatgaaagtatgaaaaatgatgtggcccttatctcgccaacgcgtgattgggcgatggtttcttgggatgtcgttcctgaaagcgagctaaccttatga

SEQ ID NO: 294007 - DNA, 795 bp, Proteus mirabilis
atgatcatcactgcagctaaacaactcacaattggctataaaacaacacccttgatccaaaacctctctttttatattaaacaagggcaaattgtctgtttattaggcgcaaatggctgtggtaaaaccacgttgatgcgtaccttacttggtttgttacccagtcttgcaggccatattatcattgaaggcaaagaaataagtaagtggtcaccaactgatttagccaaagtgattgcctatgttcctcaagcaacccacctccctttttcttttaaagtgattgatatggtgattatggggcgtggagcacatatctcttttttctcgatgcctagctcacaagataaagcaatggcaatggaaaccttagaaatgctctctctttcgcatcttgctcaccgcacttttgatacgttaagtggtggtgaaaaacagttggtattgattgcacgggctttggtgcaacaacctaaattactgattatggatgaacctgctgccagccttgattttggtaaccaaatcaagctaattaaccaaattaagacactaaaagccttgggtataagtgtgtttatgtctacacatcatccacaacatgccgctttactggcagatgaggtgattttactcacccctcatcgccacgttttacaagataaacctgagcttttgctcacccccgaacatttagctcagctttataatgtgaaacccactgatattcaggcgcacttttacgcctaccctgataataacaatccatataggcaagaatatgaacaccattga

SEQ ID NO: 294008 - DNA, 999 bp, Proteus mirabilis
atgagccaatcagcacgtatcactctgttgttgctgttattctcagtggctgtagttattgctatcactagtggtaagtattcacttacagtcaatgaactgtggacagtcgtcagtagcaaattaaccgggcatattgaagagagtcgaacagcaaccgtgttctggcaaatacgcttgcctcgagtgcttgctgccattttaattggaggtgggcttgctattgcgggggcggcttatcaaggtatgttccgtaacccactagtatcacctgatattctcggagtgtcatcaggggctggtgtcggtgctgtattgggtatttttcttggtcactccatgttgtcaattcagctttttgcttttgtcggagggcttatcactgttgctttagtctattttattgccaaattggcgaaacaacaggatccggtcctttctcttgttttagttggtattgcgattagcgccttatgtggctcagctatttcattaatgaaaattttagctgatccttatactcagctaccttccatcactttttggctgttaggggggctatcaactatcacggcgcctgatttactctctgttgcacctttaatgctactcgggtttattccactgattttattacgctggcgaatgaatattctcagcctttctgatgaagaagcgcgctccttaggccttaatgtagaaattaccagacttatctttattttatcggccacattaatcaccgcgagtgcagtttctattgcaggcattattggctggttaggtttaattgttccgcatatcgcaagattgttagttggtgctaacttcggatatcaactgcctatttccttacttgtgggcgcaacaatgttattaataacggatacactagcacgaactattgcgaatattgagttgcctttaggcattttaacctcagctattggtgcgcctttctttctgatgttattactcaaaacaaggcgggatagatga

SEQ ID NO: 294009 - DNA, 1032 bp, Proteus mirabilis
atggctatccacagacgacaatttctgagttatttaacgacgcttgcagcattatcagcactgccacgttgtgcaagagcggcaatcacttcacgtatcgctgctcaatttggtgtgcttcctacaccagaaaatattcatcgcgttattagcgcaggcccaccaaccgaccaactgttgttggctttagtaccagaaaaattattaggtttctcctcgcttaatctaggaaaaagtagcttatttgccgacaagttgcgtaaattgccccatttaggccgtctgtctggccgtggtagtacactctccttagaaacattaatggcgctagagccagatatcattattgatagtggtaatgttgatgaaacctatcgttcattagctaaacgtgttagtgcgcaaacagatgtaccttatgtgttaattgacggcagcttaaaagacagcccaactcagttacgccaaacgggggctttattaggtgtggcagaaaaagcagaaacattagcacttattgcagagcagtatcttagtgatgcgaccttgtttgcttctactctaaaaataagacctcggttttaccttgcacgtggtgcgaaaggcctacaaactggctcaacaggatctattcatactgaagctattgaactattagggttcgaaaatgtcgctgatattgcaggttttactggccttactgatgtttcccctgaacaactccttatgtggaaccctgaagttatcatcacacaagatgaaaatgcctatcagcaaatcaggcaagactctatatggaaaaatatccaagctgttaaaaataataaagtgttattatttaaaggcttaccatttggctggttagatggccctcctggtatcaaccgtttaatgggaatgcgtcgcttacagagccattttgaccatcgaatagcagaacaagccacgcaagatctgcaaaattactttgcttgtttttaccatacatcgttaagtgctgagcaatgccagctgttgatgaggtcttcatga

SEQ ID NO: 294010 - DNA, 996 bp, Proteus mirabilis
atgaaaaaaaaacgcccctcattacaggatgttgccgaccgtgttggtgtcacaaaaatgacagttagtcgttttttgcgtaatccagaacaagtttccgaagcattacgagtcaaaatcgctcgtgaattagacagcctgaattatattcctaatcgtgcacctgatattttgtcgaatgcgaccagccatgcgattggcgtattattgccttctcttactaaccaagtgtttgcacaagttattcgtggtattgaatctgtgacggataaatatggttatcaaactatgttggcgcactatggctatcaagcagaaaaagaagaagagcgtcttatttctctgctttcttataatattgatggcttgatcttagcggaaagaacacacacacccaaaacggtcaaaatgctggaaacggcgggtattccggtggtggaaattatggatagtgtttcaccttgttttgattcggcggtagggttagacaatattgaagcctcgcgaaaaatggtcagtgaaatgatccaccgtggttgtaaacgaattatctatcttggggcaagacaagatgagcgaacattaatgcgtttacaaggatatgaacaagcgatgcaagaagtaggcttacccataggtcatgtgatgacacctaaaagctcttcttattcgttaggtacagaacttttacatgaggcacgcaagcaatatcctgacttagatgggctctattgcaccaatgatgatattgcgataggggctattttcgaatgtcagcgtatggggattgcggtacctgagcaaattgctatttccggtttccacggtcatgatgtgggacaagtcatgactccacggttagccagtatttttacgccacgtgatgaaatgggacaacaagcggcggatttattactaaaaagaatgaagggtaaaattgctcgtgggcaagtgattgatgtgggattccgtatcatcaccggtgaaagtatttag

SEQ ID NO: 294011 - DNA, 555 bp, Proteus mirabilis
atgaaagatacccaatccctacaccatgtctttatcttaatgggggtatcaggcagcggtaaatcagcggttgcaaatggtgtagcacaacgtatcggtgcggcatttttagatggcgatttccttcatcctcgtgcaaacatcactaaaatggcttcaggtcatgctttaaatgatgaagatcgcaaaccttggttacacgctctcaatgatgctgcttttgcaatgcaaagaaccaataaagtgtcattaatcgtttgttccgcattaaaaaaacagtatcgcgatatgttaagagaaggtaatcactgcttacattttctctatttaaaaggggattacgcgctaattgaaagtcgtttaaaagagcgtaaaggtcacttctttaaaccacagatgttgattactcaatttgaaacattagaagagccaacgaatgacgaacctgatgtttatgaaatagatatttcgccatctcttgataacgtgattgaaaatgtcatcaacactatagaatctgttactaaacctattactgaggagagtgcggtatga

SEQ ID NO: 294012 - DNA, 1338 bp, Proteus mirabilis
atgagtacattaacactggtgctaactgcagttggctccgtcctattattgctcttctttgtaatgtatgcgcgtttacacgcctttattgcgttaatgattgttgctattggtgctggcattttctctggtatgccgttagaaaaaatcacgcaaaccatgcaaaacggaatggggggaacattgggttttctctccatcgtggtcgctttgggggcaatgtttggtaaaattctgcatgaaacgggggcattagaccaaattgcggtacggctactgaaatcctttggtgaaaaacgggctaactatgcactgggtattgcgggtttagtttgcgcattacctctgtttttcgatgtcgcggtggttttactgatcggggtggtatttgctgttgcccgtcgtacgggggggaatgttgttaaaatggcgatccctctctttgccggtgttgcaggggccgctgccttcttattaccggggccaacgcctatgttgcttgctgaccagatgaatgctgattttggttggatgatcttaattggtttatgtgcagctattccaggtatgttattagcggggcctatttttggtaactttattagccgttatgtgaccttagaattaccgaaagattttgatgagccaagcttaggacaaagtaaaatgccttcttttggcttcagtcttgcattggtcttattgccattagtcttggttggatgtaaaaccattggtgcgcgttttgttgagcctgactctcagctattcaatattcttgagtttattggtcacccctttattgccatccttgtggcgtgtttagtggctatttatggcttggctattcgccgtggtatgagcaaagaaaaagtcatggaagtatgctctgcggctatccaacctgcggggatcatcttattagtcacgggtgctggtggcgtatttaaacaggtgctggtggattcaggtgtggggccagcattagggaatgcattaattggtgcaggtatgccgattgctgtggcttgttttattcttgcaggtgctgtacgtgttattcaaggctctgcgactgtggcttgtttaactgcggttggtttagtgttaccggtgatcagtgaattaggttatagcggtgcacaaatggcggcgttatcggtttgtattgccggtggctctattattttaagccatgttaatgactccggcttctggttatacggtaaatttactggtgcgacagaagggcaaaccttaaaaacatggtcattaatggaaaccattttaggtactacaggcgcagtggttggaatgattttctttgcatttttataa

SEQ ID NO: 294013 - DNA, 927 bp, Proteus mirabilis
atgggtgattataattcactgtttaaacagcatacggagtgtaatattcatactattacacttattcgtgattccattttggcatctagtcagaaattacaagaaaagctagcattgctggaagaaatggaacatctctttaatgatatgcttatcaatgcagaatcattagtggtcttttttaatgaaattgatgagcattttactcatagtaatgaagaaattgagaattttgctaaatggctaaataaaataaaagatagcgctaataatattgataaactgtcaaatcaagccaatatattatcaattaattcagcaatagaggcaggacatataggtcatgcaggtgcaggattttctgtattagcacaagagatgaaaagcctttcacaaaagatccaaaatcaggcctcagaaatagcgtctatcaacaataatgtaagtgcccgctttacaccaataaaacaaaatactcagaaaaatcaagaacaattgaagcaaataaaaaatcttgttacggaaggtcatgctaatttatctgcgcttgctcaacaagccaatgatttaaaaaatatctttcagtttatgtcgatacaacaattttttaatactgtgaaaatagatcatgttttatggaaagaagcgatttatattcacttattaaataatgatgatgaaaattgtgttaatcagcatactgaatgtcgtttaggaaaatggtactaccaaggtgaaggacgcaaatttgctggcagtgaagcttttcgtcgtttagaagagcctcataaattggttcatcaaagtgggcgtcttgcattggcggcgaatatggccggtgatcaggatgcggtagtgaagtatattcagcaaatggaacaagcgagtgttgatgtcattaaatatattgatgctttacataattaa

SEQ ID NO: 294014 - DNA, 1233 bp, Proteus mirabilis
atgaaacaattaacgcacatccttaaacctcgaaccttagtcagtcgttctattatactggctttggtttcgctgttagtcgcttgtaaccaagagaaagataaatctcttacgctatcaacacctagcgtgttacctgcagatggttcaagacaactctacaactaccatgatcccaactttgccgcttttgcgcaaaagttaaagcaacgacgccaaagggtacatatcgtacagttgggtgattcacataccgctgcggattttttcagtggtaaactacgtgaacgttttcaagctgattatggcaatggtggtataggttttattccccctaccgctattgcgggtcaacgtattgccaatatccaatatcaaagcagtaaaaaagcgtgggatttactttctagtcgcaaagaaagcgatcctgattttcccttagggggatttatcgctgagccagtcgcgaaatggtcagcattgcaactaaatgaaaatccgacaacaggtcagcgttaccaattacaagcgttatataaggcgcctacggcttcacaaatccatttacaatccgctggcagtaaaacactttcactttcacagacacaaggtgaatggcaattttctaaacccacaacgatcaccttcccaatcaatattacgattagtaaaaaccaaccgataaaattaggcggttggttaattagcaaccaaaagccaggggtgatgttatccgcattaggtattaacggcgcaaccattaacatgatggataaatggggagcacagtggagtaaaacattaggccaattacatcccgatatggtgattttagcttatggcactaatgaagcctttaatgatacttttgatttagtggcttaccgacaactgcttgttgaaaaaattcgtcaaatccgccagcaagccccgaatagtgccattttattagttggtccgtcggattctattaagaataaagatgcatcagattgtcgctctcaacaaccccaatggttaaccgatattattcgtatccaaaaggaagtcgctcaacaagagcgtacattattctgggattggcgcgattatatgggtggagagtgctcaattaaagcatggtctatttatgatcttgcaaggccggacggtgtccacctttctcgtgaagggtatgaaagtagtgcaaatactctctatagccaattatcagcgctgattaataaaagttag

SEQ ID NO: 294015 - DNA, 1194 bp, Proteus mirabilis
atgccagcttttgatttcagttcaaatttaaaaaagaccgtaaaagtggctttaatggtgctcttcagcacactatttcttatttggctaaaccaaacatcattagagcgcttttggcaacaacaataccatcgcccagccccttggtcgggtttatcacaatattatgcttggcaagtgggaggtcagttgcgagatggcgtatttgtcgcagtaacaagctatagtgattatttgcgagttaatcacccggataatcaggctaaaccaataacgcctcgtcaagaacaaaccgcctttccagaaggatttgcagtagggctacattttatcaatggctatactcgccccgcttcgcaattaacacaacagtttccacaactcctacaacgtcaatatgcacaaggtacattagcaaatgcatcaactattgatctgacaaaagccgctgctgaagcccaaaaacctattgtgcaaaaaacagatgtcatattatctcccaaagacaaagtgctgtttgctggagattcaatgatgcaaggcgttgcccccttattaaaacgtcaattgcaaacagattataatataagcagtattgatttgagcaaacagagcacaggattagcctatcctaagttttttaattggcctcaaactattgctaatcggttagctagcgatgattccattaagttactggttgtttttttagggcctaatgatccttgggacatgcccccagatggtggcggacgttatttaaaatttgccagtgaagcgtggggcaccttatatcgcgctcgtattgccagcattattgataatgcgcgccaacataatgtgagtgtgatttggattggtcctccgaatatgcgtaagcaaaaattatctcaaggtatggcttatctaaatcaactttaccgggaagaagcagaaaaaacgggagaaatttacctttctgtcaatgatatgtttaaatatgaaaaagatatttattctgattatatcggtgatggtagcagccgcgtgaagctaagagcaggcgacggtattcactttagtttaaaagggcaacaaatcattgctcagcaggtattctcgcgtatccatctgcaaaaagttgatgatgtgccagatgatgtaacagacaaaaatatggtcacgccaaatgaaacaattaacgcacatccttaa

SEQ ID NO: 294016 - DNA, 1419 bp, Proteus mirabilis
atgaattttttttcattcgagtttctcggagcctttacgagcttttttattatctattggctcttccaaaagcaggttaagatccaaaatatcttactcatcatagtaagttatgcttttctattctatgtcgactaccgtcctgctgttatcttattaagctatacgcttttgatttactcattagccaatatactcacccgctatacatcaacgaaagtgatttattggttactggggctgttagttgccctctattttactgcctttaaatattactcatttttccaagaatcattgacacaattattctcacagtggggattaagtgttgaattgccaattattgaactactggcaccattagggttatcgttttatatcttccactctgttagctatgtcgtttcagtgtgtcgcaaagagatccctaaagccccttttcttgatgtcgtgctctacttatgctttttcccaagcattgtggcgggaccgattaatcgtgccaaacaatttttaccacaaattcaagcaccaacccgtaaaattatcgactataaaggggctatcatgctgattgtattagcaatcgctaagctcttttggttaagtggttggttgtcgacaaattatgtcgatcctatttttaatgcccctgatttagccactagcggacaagtactggtggcgacctatgcttatgcatggcatatctattttaacttctcgggttataccaatttagtgacaggtattgcgttattactgggttttgttgtccctcgtaactttaatgcaccttatttagccatcaatcttgctgatttttggcgtcgttggcatataagtttatcaacgtttattcgcgattatgtttatatccctttggggggaaatcgtaagggcgttattcgacaaaatgtgaatgcctttgccgcgatggttatctctggtttatggcatggcgcagctatgacgtttattatctggggagccattcatggtattggtgtggtgatattaaatatcaaacaccgccttttccccgccgccaaacatgacgccaatagcatgctagcatcattaaaaatgttgttatcttggataattaccttccattttgtgtgctttgcgtggatcttttttcgcagccaaaccgtcaatgatgcttggatattaattcaacaactctttagtgcaggtgcttggcagtcgctacaagccgaagggctaaccctgtttatgttctggggactgttcttactgtatccttgttttgtcactttaagggcaattattgcgcgacttgagaaaaaagtgccttggtatgtttatccactaccattagcgttgatccttacaattatatttatgttgtctcctgatggggttccgggatttatttatgccagcttttga

SEQ ID NO: 294017 - DNA, 795 bp, Proteus mirabilis
atgccctctcaattgatgaggacaagtgccgtcttcgctttcttgatttcactactctttactggtgtgagttttgcctctaccagtaccggcagttcccgaatgctgcaggcggatacattcaaaagcacgacaacctcgttgccagatttgaaaaaatatccctcgggaactcagcgtaagaaagcgtttttaaatgtcatagttcctattattgataacattaataataagatattgagagatcgtgagtggttaaccgctcaacgtaaagcccaacactggggcagcgcagatttgaaaaaactgcgtgaaatctgtcaatactatggcgtaacatgtaccagccccaaaaaagtgaattgggattcgttactgactcgcgttgatattattccgactcattttgtcgcaacgcaagctgcaacagaatcaggttggggaacatcaaaattggcacagcaaaacaataacttattcggtatgcgatgtggtaaccggtcttgcaataatgtccctgggaaaaccaaaggctatgcagcctacccagatattgaaggctcagtgattgcttatatgcgtaatctcaatacgcaccgcgcctataattcactgcgctcatcaagagcacagcaaagaatgacgcaacagcaactcgatccacgccagttaatcaccgacttgaaaggctattcagaattaggttcaagttacaatgattatctgaccgaaatgttcgactcaaataagaagctgatcacgcaagttcagttacagtcgaaacgagaaagttag

SEQ ID NO: 294018 - DNA, 1152 bp, Proteus mirabilis
atgttaacgcgtttggctatttttaatatcatcttcatattggtcatttcaggatgcactacctcatctgtgtctgaaaccattgctgctcatctggaaagtgagactcaagaagaagcctcacaagtttggcaaacgccccccgtacttgatgcgcctaatggattaaggccttgctgtgcttttggctataatttaaaagtcaaagcatggggagtacctattcctttttatcgtatcgataatattgttgaagcttctactttaggtgatcatcgctataacgataatttttggctgggaactgccgcagtattaggcataggcagtgaaaagtcgggcatagtctattcacataaagggggatttcttgatatcgcccatattcgtgataccgcagattatacttattatctctttagccatatctatcccaaattaggccaagagtggacgctaacactcagtgacgaattagcacagcgtaaaattcactttaaccgctttactcctcctagtagtgatcgacaacgttataccttaagtgcttatcttgccgcgcgtttagcttatcgccttgccgtatggcatgagattgcacagtggtacggttatcgctctgtggcgggattttcagaagggatctccgcattctcaccagaagatctctactctaacctaatgggggcgcgcttatcacttaccctgatcctcaatggtgatgccacaaaccttgagcactataaccaatcaatgcagcgtattattccctcagcactcgctcaactagaggcgcaacctcgtcaggccacccagcagtggtttgatttaattgatgggcaatggtggaatagccaagagcgggtacccgataaatttttagtattaaagcgtgattatcatcttgctgacaaacgctatccggtattgccttttggggagacaactccacctcattatctgacattacccgatgtttacgcaggctattctttaaaacaattagcagaatttcagctttggcctactaaacagatggcaaatttacccgtccctaaaacttattggaaagaagcggattttgctgatttagcagaaaaagctcgccaaatcgatcaaaaaactcgaccaaaaacaacaaaaaatgactaa

SEQ ID NO: 294019 - DNA, 1143 bp, Proteus mirabilis
atggttaaaacatcttttatttatgggctggcctttgccagcctatttatttcacacacagcgaatgcccaactctttcctgatagacaacaaatcgaccaatggttaaatcaactaggagggagcaataattttgatcgcagtaaaaccatcgactggggcgttttacccgggcctttctatacccctgaattagagttggggcttgggatcgccgttgttgggctttatcaagcagatagtcgtcccgacagtaaaatttcatcactgtcattaagtggctttggttcatcaaccggggcttttggtatgacttttagtaactatacttaccttgctgatgatacatggcgcttttaccttactggggcattaaataatgtgccgaccaacttttggggacaaggctatcatgaaggacgagttaaaaagaactttgcacaatatcgttcacaagagctacatttaacgccgacattgctacgtcaaattaccaaaaacacctatattggcttaggttgggattacgctaacttacaagcagcagcacctgatgatgagtttaaagcctatatgagcaaacgtcatttgccattacgctctaccagttcaggattaagtgtgcgctttacctacgacagtcgcgattttttgcctaacgctcgccaaggccaagcctttgatattagctatactcattattcatcggatactggtagtaataaccgttttaatgcaactcaaatgcagtacaactattattatccattaaccgaagatgcggtactcgcctttgatagctatgctcgctttacctcaggagatgtaccatggacgcaactgtctaaattaagtaacggccatcagatgcgtggctattatgaagggcgttatcaagataatcatgtcttttctagtcagatagagtatcggcaaaaacttagttggcgtcatggtattgcattatgggccggaggtggcacattgagtaatcaagcacgtgatctcggtaaaggacattggctacccagtgttggtattggttatcgttttgaatttaaaccacgcatgaatgtacgcctcgattttggtgtcggtaaagagagcaccggattttatttccaagtgggtgaggcattttga

SEQ ID NO: 294020 - DNA, 987 bp, Proteus mirabilis
atgaacttttctcattttaataaggtaatgtttgctgcctctcttcttgctactggcttttcttatgcggatagcgatcgccctctgctctctttaagtgtaagccaatccggcggcactgcgttaaatagcgaaggttcgttagatacccgtactcctgcaagccaatctcgcgtattacctatctggggtgatgaagctcgcgcccgaggttatgatttaccagagccatttggtgcaagctatagctatatgaatctacgtcaagatattgttgtggataaaattgggtttattatgccgaaaaatccagaaacagcgaatgctctaaaaatagaagcaggacatactcgtgaaaaaagtgaaacccatatgctaaaactcgatagctgggttttcccttttatgaatgtgtatggtttatatgggcgaactaaaggtaaatcaaaaacaacacttaaaggtggtagttttggtggttttccattaaattttatagaaggtatgccttttaacctcgattttaaaggtgatacttatggcgcaggttttactttagccggtggctataatcaattttttggtacttttgacttaaactacaccaaaactaatcttgatattctcgatggggatattaaagccttagtcatttcacctcgtgttggctatgaatttgtttttcaacctttaatcgccggccaaggtaataccaagctacaagtgtggacaggtgccatgtatcaagatattacccaacggtttaaaggtaatatcaataatttaaatcttcccccagcgtttgctggcatgatcgccttaatgaacgatcctgatatgaaattcgacgttgaacaacatcttgctcataaatggaaccaaacggtaggggctcgtttagaagtcacccgtaactttaatgtgatcaccgaagtgggctttaataatcgtaatagtttctttgtttctggtgagttccgtttttaa

SEQ ID NO: 294021 - DNA, 462 bp, Proteus mirabilis
atgacttatgatgaattataccaatacgctatatttatgttgtcgcgtcgtgattatggcaccactgagctaaaacgccgtttagcacgaaggatcaacgaagtcgataaagctaaacatagcacaaccgatgaaagatgtttagagcaagtgatcgagcgattattagaaggccaatatctggatgataatcgcacggtatatgctttttttcgtcgttatttaagtaaatcttatggcccgctgcgtattcgccaagagttacagcaaaaaggctttcctagtgaaattattgaacgggtactagaagaaacagaaactgattggtatgcactttgccaagatcttaaagagaaaaaatttggtacaggtaaacccaaagattttaaagagagagccaaacaaattcgctatctacaatatcgagggtttacttctgattatatcaatgcgttattttaa

SEQ ID NO: 294022 - DNA, 612 bp, Proteus mirabilis
atgaagaaaaataaacttatgctatttactgcaacattattattatcatctgcaggtattatttcaacagcatcagctgaggtgacattaaagcatggctatattgatattccacccagcagagcttttctttgttcatccaaaggggggaatttaaataaaaattgtggtccgatacagtatgaaccgcaatccattgaaggggataaaggattccctaaaggtggtcctgcagatggtgaaattgccagtggtggaaaggcaactttttctgctttaaatgcacaaagtgcagatcgctggcataaagtggcaatgaaaagtggcgaaaatacttttaagtggacattaactgcaaaacatagcactgaatcatggcgcttctttattacaaaaccagggtgggatgttaataaaccattgacccgtgctgattttgatttaacacctttttgccaacgaaatgataatgggaaaatacccacagaaaccgtaacattaaattgtaatataccagaacgttctggttatcaaattattttaggtgtttgggatattgctgatacgggtaatgctttttatcaagttattgatgctgaatttaaaaaataa

SEQ ID NO: 294023 - DNA, 663 bp, Proteus mirabilis
atggaaatctatttagataccgcagatattgaagaagtgagaaaactttcacaagtgcttcctattgctggtgtcactaccaatccttctattattgctcaatcagcgcagcccattgaaacgctattacctgaattaaaagccgctatgggcggtaaggggcgggtatttgcgcaggtaattgcccgtgatatcgataccatgattgaagaagcattgcgcattggtaatattgccgataatactgtgattaaaattcccgtcactgaagctggcttggttgctattaaacaattaaagcaaaaaaatatgttggtattggggactgctatttacagtgtgtctcaagggttgatggcggcgttagcaggggctgattatatcgctccttatgtgcatcgtatggatagacaaggctctgatggtgtgagagtagtaagagagttgcaaacgctgatttccatgcataatttacccactaaaatactggcagctagttttaaaacaccacgccaagtggttgattgtctgttgtctggcgcttcggcagtaacacttccgatagagcttgcctactctattatccgttcacccgtagtcgatgatgcgattaataaatttactgatgattggtcattagcctttaatcgccaatcattgtaa

SEQ ID NO: 294024 - DNA, 393 bp, Proteus mirabilis
atgtgtgaagaagacataaataaaccactctatttgttaattgcagactgggttcaagagcaacaacgctgggtgagtgcgaaagagatcgctaaaaattttgatatcccccaatgtaatgcgattaatatcgtttcttatattctttctgatgtaaaagagattgagtgtgaaaccaaaagtgtgcctaatcaattggaaggaagagggtgccaatgccaaaggatgatcaaagtcagtcatattgatcctgctctttacgctcgtttaaaaggtcatacgcaaagtaaaagccgtttaagcgccccagagaaattagccgctatgatccctcatgggctgaatcaccaacaaaaatggcaatggatgttgtcaaaatcacaacggcgttaa

SEQ ID NO: 294025 - DNA, 594 bp, Proteus mirabilis
atgagtatctatgcatttgaaggtgttattcctgttgttcatccaacagcttacattcacccatcagcagtactaattggcgatgtcattattggtgctggtgtttatattggccctttggcttcattacggggtgattatggccgtttaattgttgaagcaggtgcaaatcttcaagatggctgtgttatgcatggttatacggatatggataccattgtgcaagaaaatggtcatattggtcatggtgctattcttcacagttgtattatcggtcgtgatagcctagtcggcatgaatagcgtgattatggatggtgcgatcattggtgaggaaagtattgttgccgccatgagctttgtgaaagcgggctttcaagggcaggcgagacaaatgttaatgggaagcccagcaaaacatgtacgtgatattagcgaccaagatatgcagtggaaacgtatgaacactcgtgaatatcaagatctcactgttcgttgtcgtcaaagcttagtagaaacgacaccattaacagcccctgaagctaatcgtcctcgtttaaggggcacgacagaggtaaaacccaaaggtcaataa

SEQ ID NO: 294026 - DNA, 786 bp, Proteus mirabilis
atgagccaatcattacatctaacaacacgtggttcagtgcttgaaattatattagatagaccgaaagccaatgcaattgatgccaaaaccagtcatgaaatgggtgaggtatttatgcgttttcgtgatgatcctagtttacgcgttgccattattacaggtgctggtgaacgattcttttgtgccggctgggatttgaaagccgcagctgaaggagaagcccctgatgcagactttggtgctggtggctttgcgggcttaacggaattatttgatcttaataaacctgtcattgctgccattaacggctatgcttttgggggtggctttgaattagcactggcagccgacatgataatttgttcagacaatgcttcttttgccttgccagaagcacaattaggtattgtccctgacagtggcggtgttttacgtttacctaaacgcttacctcccgcaattgtcaatgaaatgctcatgactggccgtcgtatgaatgcacaagaggcgctacgctggggcattgctaaccgcgttgtcagtgcgactgaactgatggatagcgcccgtgaattagccgatcaaatcgccaacagtgcgccacttgcagtcgctgcattaaaagagatctaccgtgccactagcgagctttcgattgaagaaggctacaaattaatgcgcagtggtgttctaaaatattacccacgtgttttacattcagaagatgcactcgaaggcccgctagcctttgccgaaaaacgctcacctgaatggaaaggacgataa

SEQ ID NO: 294027 - DNA, 1557 bp, Proteus mirabilis
atggatgtgattggcagacaacacttacggcaaatgtgggatgatttagctgaagtttatgataaaaaaacagcgctaatttttgaatctgcacaagggaaagtcagacaatttagctacagtgaattaaatgaagagatcaacagagccgtaaatctttttcatgcctgtggtataaaaaaaggcgaccatgttgccttacatcttgataactgcccagaatttttcttttgctggtttggactggcaaaaattggcgctattatggtgcccattaatgcccgctttatgtatgaagagagtgcttggatcattaaccattgccaagcacactttgtggtaacaagtgataatttctctccaatttaccaaccgatgttgcacgataagcactctcctttaacgcaactgtttttaataacagaaaacagcctccctactgaacaaggagttgttgattttttaagtgaaaaagccaagcaacccgttacgcttaatcatcacaccccattaagtgtggatgacacggctgaaatcctttttacctcaggtactacttcacaacccaaaggggtggttattacacattataatttacgttttgctggctactactcctcatggcagaacgccttacgggaagatgatatctatcttacagttatgcctgcttttcatatcgattgtcagtgtaccgcatcacttcctgctttttctgtcggtgccacatttgtactactggaaaaatacagtgcgagagccttctggaagcaaattctcaaataccaagcaacggtaacagaatgcatacctatgatgatgcgcaccttaatggcacaaccagtctcaccagatgaaaagcaacataaactgcgcgaagtgatgttttacctcaatcttgcagatgaagagaaagatgcctttattgaacgctttaatgtgcgattactcacctcttacggcatgacagaaaccattgttggcttaatcggtgacagacctggcgataaacgccgctggccatctattggtagaccgggattttgttatcaagcgcaaattcgcgacaaacaaaatcagcaagttcctaacggtgtagtcggtgagatctgcgtcaaaggtgaaccgggaaaaaccttatttaaagagtattacaatcgccccgatgcaacagaaaaagcgctagagcctgatggttggttacacacaggtgactatggttatcgagatgacgaaggctttttctattttgttgatcgcagttgcaacatgatcaaacgcggtggtgaaaacgtctcttgtattgaaattgaaaatatcatcgcatcacatcctaaaatccaagatgtagcagtaattggtgtacctgatgatattcgcgatgaagccattaaagcttttgtggtactggttgacggtgaaacgttaagtgaagaagcctttttcgccttttgtgaacagaatatggcgaaatttaaagtgccttccgccgttgagtttaaacaggggttaccacgtaattgctcaggcaaagtgatcaaaaagcatttgaaatag

SEQ ID NO: 294028 - DNA, 1221 bp, Proteus mirabilis
atgacagaacatttacccatgccacaatttgggccactagctggagttcgtgtggtgttttcaggtattgagattgccgggccatttgcaggacagatgtttgcagagtggggggcggaggtcatttggattgaaaacgttgcatgggcggataccattcgtgttcaaccccattatccacagctttcccgtcgcaatctacatgcgttatcgttaaatattttcaaagacgaaggccgtgatgctttcctaaaattaatggaaaccacggatatttttatcgaagccagcaaaggtcctgcctttgcccgtcgcggtattaccgatgaggttttatgggagcataatcctaaattggttatcgcgcacttatccggctttggtcaatatggcgatccgcaatataccaaccttccagcctacaacactattgctcaagcatttagtggctatctcattcaaaacggcgataaagaccaacctatgcccgcttttccttataccgctgactatttctctggtatgacggcaaccacctcagcattagcggcactgtacaaagtgcaacaaacgggcaaaggggaaagtattgatattgcaatgtatgaagtgatgttgcgaatggggcaatacttcatgatggactattttaatggcggagaaatctgtccacgaatgaccaaaggcaaagatccatactatgccggctgtggcttataccgttgccaagatggttatatcgtgatggaagtggtcggcatcactcaaattgaagaaatttttaaagatattggtcttgctcatctattaggtactcctgaagtccccaaagggacacaactgatccaccgtattaattgccctcatggtcaactctttgaagataaattagatgaatggctagccaaccagccgattaccgccgtactaaaacgcctatctgaactcaatattgccagtgcaaaagtgttaaccattcctgaattagaaggcaatccacaatacgtggctcgagagtcaattactcaatggaaaacgatgagtggtgaaacctgtaagggaccaaatatcatgccgaaattcaaaaataatccaggaaaaatctggcgtggtatgcctgctcacggcatggataccaatgcgattttgaaaaatatcggttatagcgacgaacaaattagggagctagtcgataaagggctagctaaaatcgtagagtaa

SEQ ID NO: 294029 - DNA, 1143 bp, Proteus mirabilis
atggattttagattgaatgatgagcaggaactgtttgttgacggtgtccgcgaattaatggccagtgaaaactgggaagcttatttcgcacagtgtgatcgcgaaagtaaatacccagagcgttttgttaaggccttagcggatatggaaattgacaatctgcttatccctgaagagcacggtggcttaaatgccggatttgttactgttgccgcaatttggatggaattaggtcgtttaggtgcgccaacctatgtgctctatcaattaccggggggatttaacaccgtattgcgtgaagggactcaagaacaaatcgacaaaatcatggcgtttcgtggtacaggcaaacagatgtggaactcagcgatcactgaaccgggggccggttctgatgtgggcagcttacaaaccacttatacccgtaaaaatggcaaagtttacctcaacggtagcaaatgctttatcaccagtagtgcttataccccttatatcgtcgtgatgagtcgtgatgcggcttcccctgataaacccatctttaccgaatggtttgtcgatatgagtaaacccggcattaaagtcactaagctagaaaaactgggtttacgtatggatagctgctgtgaaatcaccttcgacaacgttgaacttgaagaaaaagatatgtttggtcgcgaaggtaacggctttaaccgtgtgaaagaagagtttgatcatgagcgtttcttagtggcactgactaactatggtaccgcaatgtgtgcgtttgaagatgcggcgcgctacgccaaccaacgggttcaatttggtgagactatcggtcgcttccaacttattcaagaaaaattcgcccatatggcgatcaaactcaattcaatgcgcaacatgttatatgaaactgcatggaaaagtgacaatggcttaattacctccggtgatgctgcaatgtgtaaatacttctgtgcgaatgcagcctttgaagtggttgatagtgcgatgcaagtgctgggtggtgtggggatcgcaggtgaacaccgtattgcacgtttttggcgtgatctacgcgttgaccgtgtatctggtggctctgatgaaatgcagatcctgacattaggacgcgctgtactgaaacagtatcgttaa

SEQ ID NO: 294030 - DNA, 1515 bp, Proteus mirabilis
atgagcaaagataataaaaaggcaggaatagaaccgaaggttttttttccgccattaatcattgttggtattttatgctggttaacggtacgcgatcttgacgcttcaaatgaagtgatcaatgccgtgttcagctatgttaccaatgtctggggttgggccttcgaatggtatatggtgatcatgttcgggggctggttctggttggtttttggacgttatgccaaaaaacgcctgggcgatgagaaaccagaatttagtacggcaagctggatctttatgatgtttgcttcttgtacatcagcggctgtgctgttttggggctcaattgaaatatactactacatttcaagtcctcctttcggtatggaaggttactccgcgccagccaaagagatagggttagcttacagcttattccactggggcccgctaccttgggcaacctatagtttcctgtctgtcgccttcgcttacttcttttttgtacgcaaaatggaagtgatccgcccaagtagcactttaacgccattagtgggtgaaaaacacgttaatggtttatttggtactgtcgtcgacaatttctatttagtcgctttgatcctagcaatgggcaccagccttgggcttgcaacgcctttggtaactgaatgtattcaatacttatttggtattcctcacactctacaattagatgccattattatttcttgctggatcttactcaacgctatttgtgtggcatttggtctacaaaaaggggtaaaaatcgccagtgatgtgcgtacttacctgagcttcttaatgttaggttgggtatttatcgtgggtggtgccagctttattgtcaattacttcacagattctgtgggtacattgctgatgtatatgccacgtatgttgttttacaccgatcctattggtaaagggggttttcctcaggcttggactgtcttctattgggcttggtgggttatttacgccattcaaatgagtatcttcttagcgcgtatttctaaaggtcgtactgttcgtgaattatgtttaggaatggtatcaggtttaaccgcaggaacttggctgatttggactattctggggggtaacactttacaactgattgaccaaaatatccttaatattccgcaactgattgatcaatatggtgtaccacgcgccattatcgaaacatgggccgccttacccctcagtacagcaaccatgtggggcttctttattctctgctttatcgccaccgtcactttaatcaatgcctgctcttacacactagcaatgtcaacttgtcgctccatgaaagaaggggctgaaccaccattattggtacgcatcggctggtctgtattagtcggtattatcggcattattttactagcattaggcggcttaaaaccgatccaaaccgccattattgccggaggatgcccactatttttcgtcaatatcatggtcaccttgtcctttataaaagatgccaaagtgcactggaaagattga

SEQ ID NO: 294031 - DNA, 774 bp, Proteus mirabilis
atgaagattattacatgttacaagagtgttcccgatgagcaggatattgtggtcaataatgccgatggttcactcgatttttcgcgcgccaataacaaaattagccaatatgatttaaatgcgattgaagcggcgaatcagttaaaaacacaacttgatggtattcaaattacggcaatgagcgtaggtggtaacgcgctgactaacgctaaagcacgtaaagatgtgttatctcgtggtgctgatgatctcgtggtggtggtcgatgagcaattggaagcttctcttccttatcaaacggcgacagtgcttgcagcagctgcaactaagcaggggtacgatcttatcttatgtggtgatggctcggcagatctaagttcccaacaagtgagtttgctggtgggggagatcttgaatattcctgccattaatggggttaataaaattgtttctattacaactgattccatcaccgttgaacgcgaattagaaaacgaaattgaaacgcttactatcaccttacctgcggtgattgccgtttctaccgatatcaactctccgcaaattccatccatgaaagccattttaggtgccgctaaaaagccggttcaacaatggagtgtggccgatcttggtttagagcccataacgccacgttcagagcaaaccgtgttagcaccgaaacaaaaagtacgtcagcgcatcattattgaaggtgatggcgatgatcaaattgctgaatttgcagaatatttacgaaaaattattaagtaa

SEQ ID NO: 294032 - DNA, 939 bp, Proteus mirabilis
atgagccagttttcaactgtttgggtgttgagtgatgtactttcccctttaccagaattaatgggaggtgcttcttcattaggtcaatcaatcaatgtctttacctttaatgatgagcaaagcatcgctgcctttaaattaggggcgacagcggttttccaattagaaggtaaacctgatgatcgcattatggaagattatgcacaaagtatcgttgaaaccattaaatcacatagcgatgccggcttggtcttactgccgaatacgcgtcgtggcaaattatttgccgctcgtttaggtcaccgtttagccgcggtagtatcaaatgatgcgcaatcattaagtacccaaaatgatgcattagtggcaaaacatatggtttacggtggacttgcctttggtgatgaaacattaacaacaccttattgtgttgttaccgcaagtactggtgcttttgacgttgcatcagaaacacaggctacgggtacggcacaaaaagtagcatggattgccccttcacaaagcattatttgccagtccattcagccaagaaaaatcaatgccgtcgatctggataaagcccgttttgtggtcagtgttggtcgtggtattggcagtaaagaaaatattgctattgcagaagagttagcaaaagagattggggctgaaatcgcctgctcccgccctgtggctgaaaatgaaaaatggatggcgcatgagcgttatgttggcatttctaacctgatgcttaagccagatctgtatttggcggtaggtatttcagggcaaatccaacatatggttggtgcaaatggatcacaaaccattatggcgatcaacaaagataaaaatgcacctatcttccaatttgctgactatggcattgtcggtgatttaatgaagattttgcctgcacttacccgtcaactatctaactga

SEQ ID NO: 294033 - DNA, 1293 bp, Proteus mirabilis
atgtccgattccgaagatattttcgatgccattattgttggcgcaggattagcgggctctgtggctgcacttgttttagccagagaaggtgcgcaggtattgctaatagaaagagggaactacgccggcggaaaaaatgtaacgggtggtcgtctatatgcccatacccttgagcgcatcattcctgaatttgcgcaacaggctccggttgagcgggtgatcacccatgaaaaactgtcatttatgacacaaacaggggctatgactatcgactatcaaaacgctgaaacgcataaccctaatcatgcctcttggtctgtattacgtggtgaatttgatcaatggctaatggcgcaagccgaagatgcaggcgcccagtgtatcacgggcattcgtgttgataagttagttgagcgtgacggtaaaattgtcggtgtagaagcagatggtgatgtattagaagccaaagcggtgattttggctgatggtgtgaactcacttttggctgaacagttaggcatgacaaaacgagttgcagctgaaaatgttgccgtgggcgtaaaagagatcatcgaactgcctgaaagtgtcattaaagatcgttttaacctaaaagataacgaaggtgtggcttggttatttgccggctctcctaccgatgggctaatggggggcggttttttatataccaataaaacgacgctttctttggggcttgtctgtgggcttcaccatattaaagatgccaaaaagtcagttccacaaatgctagaagattttaaacaacatcccgttgtagcaccgctgattgctgatggaaaaatggtggaatatagcgcccatgtggtacctgaggcaggtttgcgaatgcaacacgaacttgttcgcgatggtgttttgatagcaggagatgcggcaggcatgtgtatgaatctaggctttaccattagagggatggatttagccatggcatcaggggaagctgctgcaaaaacggtgctttcagcaatggcaaaaaatgattttagtaaacaaactcttaatgagtatctcgaccatttagcacaggggcctttgcgcgatatgaaagcatatcaacgtatgcctgatttactagataatccgcgtatgtttactgcttatcctgacatggtggttggtattgcaaaagatctctttactgtcaccgatgatgcccctgtaccgatgcgtaaaaccatcatgcgtcatagcaaaaaagtggggtggatgaatttaataaaagatgggatcaaaggagtaaaagcaatatga

SEQ ID NO: 294034 - DNA, 288 bp, Proteus mirabilis
atgagttctcctgtaaatgtcgatgtcaaattgggcatcaataaatttaatgtcgatgaagaaaatccacatatcgtcattaaacagcaacctgatatgcaagtattagacacactggtaaaagcttgtcctgcgggtctttataaaaaacaacaagatggtagcgtcagctttgattatgcagggtgcttagagtgtggaacctgtcgaattctcggtttagacagtgcgcttgaaaaatgggaatacccacgcggaacgtttggcgtggaatatcgttacggatga

SEQ ID NO: 294035 - DNA, 1323 bp, Proteus mirabilis
atgcagcccagaaactttgatgatattcgttttacctcagtacatcgtcgagtgatgttatggggaagtggcggcccttttcttgatggttatgtattagtcattattggtgtggcgctcgaacaattaacacctatattacagcttgatacgcgatggattggtttgcttggtgcggcaacattagcagggctttttattggtacctcactttttggctatatttgtgacaaagtagggcgccgtaaaatgttcctcgttgatattgtggctattgcggtgatttctattgcgaccatgtttgtttcaacaccaatagggttgttagtgatgcgcttccttattgggattgtgattggcgctgactatcctattgcaacttcgatgatcaccgaattttccaataaaaagcaacgtgcctttgccgttggatttattgctgctatgtggtatatcggtgcgacatgtgccaatttagtgggttatcttttatatgatgtccaagatggctggcgttggatgttaggcagtgcttttattccttgcgttattattctaattggtcgctttgatctccctgaatcaccgctttggttaatacgccaagggcgtattaaagagtgtaatgaaatgatgatcaaactctttggcgagcctgtggtctttgaagcagaagatgctaaaacgacccgttttatcgaattatttaataaacgccacttctcatttgtgctctttgttgccgtaatttggacctgccaagtgatcccgatgtttgccatttatacctttggccctcaaattgtcggtttattaggatgggatacaggaagaagtgcggcattaggcaatgtcgtgatcagcctattttttatgttgggttgtattcctgcgatgttttggttaaaccaaacggggcggcgcccactgttaattggtagttttgcgatgatgactttagcattattcacgctggggatattcccgaatttaccgattttattcgttatcttagcgtttgctacctacgcttttttctcgggaggacctggcattttacagtggctttatccgaatgaattatttccaaccgatatccgagcatcggcggtgggggttattatgtcgataagccgtattgggacggttatttccacctgtgcgcttcccgcttttattgccacttatgggatcaataccacaatgctggtgggggcggctatttctctgtttgggatgatggtatcagtactgtttgcaccagaaacgaagggattaacgttaaagcagacatcaacaatgcctatgcgacgtggtaaataa

SEQ ID NO: 294036 - DNA, 4935 bp, Proteus mirabilis
atgtctgatattcatgatacgaatcgcgaacaggaaatacttgatagcgctgttgcacaaggtggcgcatatgaaatattgcgtaaacgccttaccgagcaaggtcagcagttacatgtaaaagccactgaactcaatcagcatcgattagctgaatttggtcaaagccaaatggatatcattggccgtattcgtattcgaacagagaataattgccaagcaagagatattgttcgcgttggtgaatggttactatttggttataacgttttcctcggtttaaaacgagaaacgcaccttgaagatgttttttcactttatcgcttaattgataataatggcgagtttgatgttgaagcggttgcttatgaaggcacttttttaaatgataatcgctttatccaagattttaccgagctatacacttactataaaaatacgcaactactacagctagttgagcgtgatggtaaattactcgctagttttcaaattggcgatcgtattaccgatgtacgcgtcttccgttggtcgatatccagtgacaaacaacgtattgaatatattgataatcgtggcgaacgcgatatagcactcccccctgcttacgattttgattggataaaaacacaacgtgaagatacggtaaatgggcgttttcctcatatcaacattttagatacagtctttgtagaaaccaccggtggcgatttgactgtcaaatgtgaaaacaataccgaagatggtttaggaatttatcgtgaagcggtcttagataaaaaccagtcccttgatgatgcacaaattgaatatgcacaaactggcagtttaattttattaaaagtgcttccttaccgcgaagagaattggcgttatttagtctataacacactaacacaaagtgttcagcgtattgatgccattgggcaagcttgtgtgcaacttccggaagatcacggtatcatttttcccggcggctactatctacaaaatggcgattacaaaacctttgatcaaccaatggaaggtatgtattttcgtcgtttgcgtcgttcacctaacggtgaagatgtgctgtatgtcttctattcaccgacacaaggtcgtctcgcgctatttaattacaatatgattgagcgtaaattggcgacaccattggtcggtcatggctatgccatgctagaagatggcaaaatggtgctatttgaaggggaaggcgaagaagctacccgtgttcacccgatgcaagtttggcaaacgcccttctattctgaagaatttgccgataaacaaccgccacgaaacggcttttatgggcgtattggtaatgccgatttagttcgcgggatctcagaaattttacatgtcgccaaagaaattgaaggtagccaagtttccatcgctcgttatgagcaacttagccaacaaccaaaaagcttattagatctctattactggtttaatgatgaacactgtctaggtattggccccttactaaaagagatcgctcaaacaagtgaattagtgcttgatgaatatgaaaaagtcgaaagtattcgtcaacaatcagcgaaatcaatgcaagaagcgatcaaccgtcagaaatctctgttatcactgacactgcctgatagttggaccgatattcaacaatttgttgatagtttaaattcgctcaatacacaccatggacaccttatttctttgcgtgaattccgttatatggatttaacgcaattaaataaaatggaaacggaaataaccgaggcacagcaacgtgtttcgcaagccacagcccaatttcttgccagcgacaaagcgctacagccttttaaaacacagcttactacttttgaacaacagatagaaaaagcacaaaacagtgctcagcttgatgtaccaatgaatgagatggcgcagatgtcagaagatttagacatgctgtcaaatctgatggcatcactcacctttgaggatgtgacgcaacaaacacagattattgatgccatctcccaaatttatgcacaactcaatcaatcacgagctcgcttacagcaaaaaagaaaatcacaaagtagcgtagaaaccgtcgctcaatttggtgcgcaattccgcctatttagtcaggggatcaccaatgctttatcactggcaacagatccggaacgttgtgaagagcagctttcacgattgctagtacagctagaagaattagaaagccaatttagtcagcatgatgaatttcttgatgatatcttgtcaaaacgagaagagttattagagacttttgaggcgcataaacaatcgttacttgatgatcgtcaacgtcgttcacaaagcttattaactgctgctaatcgtctcttagaaaatctgcaacgtagaacaactcggttgcaatcacaagatgaattaaatgctttttttgcctctgatcctttagcattaaaaacacgtgaaatcattgaaaaactaagagaaatcaatgacaacgttaaagcagatgatattgatgcccgtcttaaatcgtctcgtgatcaagccatccgtatcttacgtgataaaacggatatctttgaagagggtggcaatgttattaaattgggccctcgtcaccgttttagtgttaatacacaagagctagatcttactattttaccgaaagaagataagctttggttatatctaaccggtaccgatttccaagagccaatcgaccatccagagcttgaaacactgcgcccttactggaatgcgacattaagttcagaatctgaaacggtgtatcgtgcggaatatctcgcctattcaattatctatgctgcatcaaaacgtcaagatggattaaccctagaaatcttaaaagaagcactgagtgtacctgaaaaattagaaaagttagtacgtgatttcgcaacacctcgctataaagaaggctatgaaaaagggatccacgatcatgatgctatcgccattctaaagaaacttctacctgtaggtgaaagtgctgatctgcttcgttataacccaacagcacgggcaattgctgctattttctgggaaaaagtacaaactaatgaatacccagcattatggccagagcgcgcacgaacggcagtgaatattcaacaactgtttcataatgatgatgcattaattgatttacaggcagaaatagaagcggatatccgcctattccttactgataatccgattaaatgtggatcttatgttccgatccaagccgctgaatatttaagttttgcactagcaagaacaccaatagaattggtttacagtaaatatgccaaagagctcgttgttgccttacaaaaccgattagaagccgctcatatgtggattgattttaatcgttcacaacaaaatttagcctcacgttatgcacaacgttgggcattgattcaaaattggctacaaggattgtgctctcaagccgattatgctcatctaaccccttatattccgggggcaattgccattattatgttagataaaatcgcctctgcacgttatagcgaggttgatttatactttaaggtaaacggattattaggtgagcatcctactattgaaaatcaaacactttcattgagtttagatgattatttcagtcgtatgcgcggacagcgtaaaacctttattcccgcctttaatcattatctgactttacgacaaaaaattgttcttgaagagcgccagcgtttaaaactggatgagtttaaagcaaaacctctcagttcatttgtgcgtaataaactgattaacgatgtctatttaccaattattggtgacaatatggcaaaacagatcggtgcattaggtgaagggaaacgcactgacttgatgggattattattaatgatctccccaccaggttacggtaaaacgaccttaatggaatatgtagccgatcgtttgggactgatctttatgaaaataaatggccctgctttaggtcataatgttttgtcattagatcccgaacaagcgccaaacgcaacagcaaaacaagagctagaaaaactcaatcttgcccttgagatgggcaataatgtgatgttgtatgtcgatgatattcagcatacacaccctgaattcctacaaaaatttatctcgctatgtgatggcacacgccgtattgaaggggtttggaaagggaaaacccgaacctatgatatgcgtggtaaaaaattctgtgtggtgatggccggtaacccttataccgagtctggtgaactatttaagatccctgatatgttagctaaccgtgctgatatctataatcttggtgaggtattaggaggaatggatgacgcctttgcactcagttatattgaaaatagcttaacctctaactcagttcttgctccccttgctttacgtgatctaaacgatctctatctttttgttgataaagccatgggtaaatcagtttcaaccaattccctcagttatccttattcggatgcggaaattaatgaaattgtgatggtattaaaacatctaattactttgcgtgatgtaattttaaaagtaaatcaacaatatatagcaagtgcggcacaatccgataaatatcgtactgagcctgcattccgcttacaaggcagttatcgcaatatgaacaaattaagcgaaaaagtctctgcggttatgaatgagaaagaaattgaacgcttactcgacgatcactatcttggcgaagcccaattactcacaacgggtgctgaagagaacttattaaaactggcggaaatacgtggcacattaaccgaacaagatgctattcgttggcagcaaatcaaaaaagattttatgcgcaacaaagcattaggtggcgataatgctgatattggcgatcgcgtagtgtcacagttggcgaatttagtagaaagtgtgcagagtttacgctaa

SEQ ID NO: 294037 - DNA, 2196 bp, Proteus mirabilis
atggatttggctttcgttatgcctttcttaacaattattggctgtgtgatcttagttattttagggctctttggtttattcaaagcgttttatattaaggttccacaaggtacagcattaattgttaacgacatgacatcacaacctaaagttcattttactggggctttagtttatccggttatctacaaaaaagagtttatgcgtatttcgcttttaaccttagaagtcgatcgccgtggtaaagatggattaatttgccaagataatttacgtgcagatattactgtcgccttctacctgcgtgttaatgaaacgacggaagatgtattaaaagtcgctaaagcgattggtgtagatagagcatcagatcatcaagccgtgagtacattatttagtgctaaattctctgaagccttaaaaaccgtcggcaaacaatttgagttatcgaaattatttgaagatagacaaaatttccgtgatcgtattgttgatgtgattggtaaagatctcaatggttatgcgttagaagatgtggccatcgactatttagagcaaacacctaaatcagcccttgatccaaataatatttttgattcagaaggtattcgcaaaattaccgaaattactgcaatacataatatcgaaacgaatcaaaaagagcgtgaccaagagttagcgattcaaaagaaaaatgttgaaactcgcgaagcaagtctggctttagagcgccaacaagcagatgcagaagctcgccaacagcgtgaaattgataatatccgtgcccgtgaaagttcagaaaccttacgagtacaagaagaagagcgtctaaaagcagagcaagctcgtattcaaactcagcaagaaattgaaatacgagaagaaaaccgtatgcgtgaagtcgaagtcgcgcaacaaaaccgcaccagagcggtagctattgagcaagagcgcgttaatcgtgcccgtgaattagaaattgtcgctcgtgagcgagaagttgaactacaacgtattgaaaaagaaaaagcgttagaagaagagcgcaaaaatatttcaaatgtgatccgcgagcgtgttgctgttgaaaaaacggtcgcacaagaagaagagcgtattaaagaagtacgtgaagtctcagaagctgagcgtatgcgccaagtgacggtgattaatgcgcaagctgaagccgaagaatctttagtacgccaagtgaaaaaagccgaagcggatgaatcaagtgcaaaacataaagctgaagaaatcagcaccatggcaaaagcagaattagaagcctctgtgaaacaagctgaagcgaaaaaacgcttagctgaagggatcgaagctgaacacgcagcattaggccttgccgaagcacgtgttcgtcaagcaactgccgaagcagaagaaaaagaaggtttagtacaagccaatatcacagcggaacagctgttggcacaagcgcgtggcttgaaagaaaaaggcttaagcgaagcgcaagtcatggaagcaaaagcacaagcgcaacaacaacaaggttttgctgaagcgaaaattcttgaagagaaattagcagctcaagctcgcggtgaagagcaacaagcgaatgctaaagaaaaactgggtcttgctgatgcgaaaattcttgaagaaaaactggccgctcaagcgcgtggtgagggtcaattaggttcagcacaagcagaagtgatccgccaacgtctgaaagcagaagctgacggtttaacagataaattcaagtcaatggatcacctcagtgatactgctcgtgctcatgaagagttccgtatgcgccttgaaaaacaatttgaacaagccatggcttctattgaagcaaataaagagattgctcgtgagcaagcggatgtattagcagcagcactgagcaaaacgaatattgaaattgtcggtggtgatggcaacttctttaataccttctctaaagcactgagcttaggtaaagcggttgatggttttatggataaaagtagctttgccaaagagaacgttgagaaattgattaatcgtactcagcaagataaaaaattagatgttgcttcactgctaaaaaatccagaagttcaagaattaattaatggatttatggcgactaaaggtgcgggtcaactgatcaaagaagtcacagcaaaatcagacaccccaaaagaagattaa

SEQ ID NO: 294038 - DNA, 630 bp, Proteus mirabilis
atgaacctttttttccaaaatagcttagcctttcctagcattatctttagtgccttacttattattatcctcttttattggctatgtgctgcttttggactattagatatcgatttatttaatatcgatagcgaattagatgtcgatgcgacgggccttgcgggttggctaactaaattagggcttgccggcattccggtaaccattatattaaccttcttcactttgttcggctggtttattagttacttttgcgtacattggtttattcgttttattgaaacagatttattgcgttatgttatcggctttattgcttttattatcatcagctttgtttctcttaatttaacagcgctatgcttaaaaccaatccgcaataagctcatttctcgtagcaaacctaaatcagttcaccaactagtaggaaaatttgctgtagtacgctccgaatatgtcacagaaaataaaggtgaagccctattagaagatggtggtgccggtttaattttacagatcagagcgccagcaacagaaaatattaaacgaggggatagcgtaattattattagttatgacgcgcctactcatagttatcaagtcgtaacggaagatgaatttcaccgctaa

SEQ ID NO: 294039 - DNA, 597 bp, Proteus mirabilis
atgcgtaagttagtcgttggtttggttttgcttcttatcattatttttgttgtattgattaattcttataataaaatccagaagaatgacgagttagttactgcggcggcatcagaattattaaatcaatatcaacgtcgtttagatttgatccctaatctagtcaatacagttaaagggtactcaaattatgaaagccaagtattacaagatgttgtaaaggcaagagcgtctgttggacaaattaatgtcaatacgcgtttatttgaaaattctacacttgctaccagttatcaaaaagcacaggatgatttgggaaaatctttatcacgtcttttagctatttcagaaagatatcctgacttgaaagctaacacattatatcaagatctgatggtgcaattagagggagccgaaaatcgtatctctgttgctagagggcgatatatcgaggcagttcgtcattataatactcagattagacagtttccttataacttcatagctatcgttatgggatatgataaaaaagtcaatttcactgttgagagtgaacaggaaataaaagtaacaccagtggtggactttgcctcatga

SEQ ID NO: 294040 - DNA, 1188 bp, Proteus mirabilis
atgatacgtaaggttttattcttattctcattgttcttatttagctttagcgtgatagtgagtgcatcagcgaatgatattcctcaactaaaaacagatagagtgattgatagtgcaaatttattgactgcacaacaattcaaagcgttaaatactttattggttaacttcgaaaatagtcgtaatgatggatcacaatttgttgtctatatcgttccaacgacagggaaagaaaccatcgaatcctttgcttttcgtgtttttaatcaatggaagataggcagaaaagggaaagataatggattattgctcgtggtggcaattaatgatcgtaatgttcgttttgaagtcgggtatggctatgagggagcattaactgatgtactggcaggacgaattattcgcaatgaaatgttgccattttttcgttcaaataattattatgcaggcatcgaacaaggggttaaaaatgctattcaagccgttaatcatgaaccaataagtttcactaactcacagataaatactaatacacttaaaatattccacacacattttatcctaatttatttggtaatattaggcggtgtttattggtttcagttgatattctcgacgcgaaaaataaaaaccaaaattaatcaattattagcgcctagaggaagaaaaaagaaaaatccagcagaccaaaaaggtaagttaagtataaagcaacgtaaacagttgaaaaattatctgcaatattcgtactattttcctacattttcaacgttatttttccccatgacactctgttttgcggcggcgatgttttatacacaagtctttcttgatggtattattgataattttgttttagtgataatagtcatattgtcattattatgtaattttatcgtattagtggttttatttggtattatcaacctgttatttccaatttatcggcaacaacgaaaagaatggaaagcgatttgtgtcgctagtccgtttggttcaccgtttaatcaactgccatattcaaaacgtattcgtagacgtagtggttattcaggctctggtggttattcgagttcgtcttattcatcaagttcatcaagttcatccagctcttctagttcttctagttcttctagcggtggcggcggtggttcgagtggtggtgggggtgcttcagggagttggtag

SEQ ID NO: 294041 - DNA, 573 bp, Proteus mirabilis
gtgcaacgtgaagcattattagaccacgtacttatccaattagagcaacatgggcttgccgctacgttgcctgagttattgcagggatttgatattactgaatctgaactccaacctttttggcctgataaagacgcgttaatttttgattgtctacgccatcatggacagcaaattgatatttggcaacgtcaagtgatattagatgaaacgctgaccacagagcaaaaattactagcacgttacgatcagctggctatgcgcttagaaaaaaatcgttttccaggctgtttgtttgttgctgcttgtagtgcttatcctgatgagcattcacaaatccatcagttaagccagcgccaaaagcaaagctcatttgaatactctagaatgctactacgcaagcttgatcttgaagatagtgagttagttgctaaacaaatggaactcatcttagaaggctgtttaagtcgcttaatggtcaatcgtcgtgctgacgatatcacgacagcaaaactattagctcaagatattcttaaaatcgcccaatgtcgtaaaaatggtgcgctaagctga

SEQ ID NO: 294042 - DNA, 1326 bp, Proteus mirabilis
atgttagccgtagaattgattatcgttctgctggccattttcctcggtgcgagactaggaggaattggtatcgggtttgccggtggtttaggggtgttagtattagccgctatcggtgttaaaccaggtactatcccttttgatgtgatctccatcattatggctgttattgccgcaatctctgcgatgcaggttgctggtggtttagattatttagttgatcaaacagaaaaactattaagacgtaatcctaaatacatcacaatacttgcgccaattgtgacttatttattaactctctttgcaggtacaggtaatatctctttagctacattacccgttattgctgaagttgctaaagagcaaggcatcaaaccttgtcgcccattatcaacaggtgtggttgctgcgcaaattggtattacagcatcacctatttctgctgcggttgtttatatggcatcagtcatggaaaaccctgcaatggtcggtgaaggtaatacagtaagttatatcactctgttatctattttattaccagcgaccttccttgctattattctgatgtcattcatcatctcttgggtatttaactcaaaactgtctgatgatgcgatttatcgtcaacgtttagagcaaggtctagttgaattacgtaatagtaaagagcgtagagaaacattaccgggtgctaaatcttctgtaatgctattcttacttggtgttatttgtgtggtcacttatgccattatcaatagcccaagtttaggcattgtaaaagagccgttaatgaacaccactaacgctatccttatcattatgctgagtgtggcaacccttatcactgttttctgtaaagttaaaacagataacatcttaaactcaagtacatttaaagcaggtatgagtgcatgtatttgtattctgggtgttgcttggttaggtgatactttcgtttcaagtaatatcgattggatcaaactgactgccggtgatttaatcacaggtcatccttggttattagcggttattttcttcttctgctctgccttattatattcacaagcggcaacagcaaaagcgttaatgccaatggctttagctttaggtgtttctccattaacagcgattgcatcattctcagcagtttctggtctatttattctaccaacttacccaacactggttgctgctgttcaaatggatgatacgggtacaactcgtattggtaaattagtctttaaccatccattctttattcctggtactatcggtgtgatattagcggtcggatttggtttcctcttcggcggtatgattttgtag

SEQ ID NO: 294043 - DNA, 1425 bp, Proteus mirabilis
atgtcaaataaaactcgtatcgaagaagacctgttaggtaaaagagaagttcctgctgatgcttactacggcgtccacactttacgtgcaattgaaaacttctacatcagtgatcgtacaatcaatgatgttccagaattcatccgcggtatggtcatggtgaaaaaagccgctgcattagcaaacaaagagcttcacactattcctcgcgaaatcgctgatacgattatcaaagcctgtgatgttgttttagaaacaggcaaacacatggatcaattcccagttgatgtattccaaggtggtgctggtacttcattaaacatgaatactaacgaagttatcgcaaacatcggtttggaattaatgggtcatcaaaaaggtgaatatcaatatctgaaccctaacgatcacgtgaataagagccaatcaacaaacgacgcttatccttgtggtttccgtatcgcagtttataactctgttattaaattaactgagtctattgagctactgaaagcaggttttgatagaaaagcaactgaatttgaagacatcctgaaaatgggtcgtactcaattacaagatgctgtaccaatgactttaggccaagaattccacgctttctcagtattaatgaaagaagaaatcaaaaacctaaaacgtactgctgaattactgttagaaatgaacttaggtgcaactgctatcggtactggtttaaatactgcacctggctaccaaaaattagctgttgaaaaattagcagaagtaactggtttaccttgcgttccagctgaagacttaatcgaagcaacctctgactgtggtgcttacgtgatggttcacgctgcattaaaacgtctagcagtgaaaatgtctaaaatctgtaatgacttacgtttactttcttctggtcctcgtgccggcctgaaagaaattaacctgccagaattacaagcaggttcttcaatcatgccagctaaagtaaacccagttatcccagaagttgtgaaccaagcttgctttaaagttatcggtaatgatacttgcgtcaccatggcagctgaagcaggtcaattacaattaaacgtaatggaaccggctattggtcaagcaatgtttgaatcaatttctctattaagcaacgcttgccgtaacttagttgaaaaatgtgttgatggtatcactgctaataaagaaatctgtgaacacttcgtatttagctcaatcggtatcgtaacttatctaaacccattcatcggtcaccacaacggcgacatcgttggtaaaatttgtgcagaaacaggtaagagcgtacgtgaagtggtattagaacgtggcttattaactgaagaacaactggatgatatcttctctgttgagaacctaaaacacccggcttacaaagcaaaacgcttcgatgattaa

SEQ ID NO: 294044 - DNA, 507 bp, Proteus mirabilis
gtgcgttggctcccattaattgttatctgccttcttatttatatagaagctgtgatttttgtgcatgttgcctcttcaattggcgttcttacaaccctattcctagtggtactgacttcttgtgtcgggatctctttggtcaaaaatcaaggtgtgaaaaatattgcttcaatgcaacaaaaattagccatgggagaagtgcctgcggctgaaatggtgaaaagcgtttcgttggtgttggcagggattttgttattgatccctggcttctttactgatttcctcggcttacttttattgttacccccattacaagcgctattggtaacaaaactgattacgcgtatcaaaatttatacccccggacagggtggaaatggcttttcttcccatcaaggtgggagtacttttgaaggtgaatatcaacgtaaagaagattcacctagtaagcaactgaataataaggatgaacatcaggataatgaccatttttctgataaaaaataa

SEQ ID NO: 294045 - DNA, 294 bp, Proteus mirabilis
atgaagattcgtccattacatgaccgtgttattgttaaacgtaaagaagtcgaagctaaatcagcaggtggtatcgtactgactggctctgcagcgggtaaatcaactcgtggcgaaatcttagcagttggtaacggccgtattatggaaaacggtgaagtcaaaccactcgatgttaaagttggcgatatcgtaatttttaacgatggttatggtgttaaatcagaaaaaattgataacgaagacgtgcttatcatgtctgaaagcgacattttagcaattgtagaagcataa

SEQ ID NO: 294046 - DNA, 1647 bp, Proteus mirabilis
atggcagctaaagacgtcaaattcggtatagacgctcgtaataaaatgttacgtggtgttaatgttcttgcagatgcagttaaagtaactttaggccctaaaggtcgtaacgttgttttagataaatctttcggtgcacctgttatcactaaagacggtgtttctgttgcccgtgaaatcgaattagaagataaattcgagaatatgggtgctcagatggtgaaagaagttgcttctaaagctaatgatgcggcaggtgacggtactacaactgcaacagtgttagcacaagcaattatcgccgaaggcttaaaagcagttgccgctggcatgaaccctatggatctgaaacgcggtatcgataaagccgttgtgggcgcagtagaagaactgaaaaaactgtctgttccatgttcagatactaaagctattgctcaagtaggtactatttctgctaactctgatgaaaccgttggtactctgattgctcaagcaatggaaaaagtgggtaaagaaggtgtcatcactgtagaagaaggtactggcttagaagatgagctggatgttgttgaaggtatgcagtttgaccgcggttacctgtctccttacttcatcaacaaaccagaaacaggtacagctgagttagaaaatccattcatcctattagttgataaaaaagtctctaatatccgtgaattacttcctgttttagaaggtgttgctaaagcaaacaaacctctgctgatcattgcagaagatgttgaaggtgaagcactggcaacattagtcgtcaacaacatgcgtggtatcgtgaaagttgctgcggttaaagcaccaggttttggtgatcgccgtaaagcaatgttacaagatatcgctattctaactaatggtactgtgatttctgaagaaatcggtatggagttagaaaaagcaacgctggaagatttaggccaagcgaaacgtgttgttatcaacaaagatacgacaaccatcatcgatggtctgggtgaacaagaggctatcagtggccgtgttgctcaaattcgtcaacaaatcgaagatgcaacttcagattacgatcgtgaaaaactgcaagagcgtgtggctaaattagctggcggtgttgcggtaattaaagtcggtgcggcaactgaagttgaaatgaaagaaaaacgtgctcgtgttgatgatgctctgcatgcaactcgcgcagcagttgaagaaggcgttgttgctggtggtggtactgcacttgtccgcgttgctaatgcgctgcgtgaaatgacaggtgataacgaagaacaaacggttggtatccgtgttgcactacgtgcaatggaagcgccaatgcgtcaaatcgttgctaacgcaggtgaagagccttctgtggtagttaacgatgtgaaagcaggccaaggtaactacggttataacgctgcaacagaagcttatggcgatatgatcgagatgggtatcttagatccaactaaagtgactcgttctgctctgcaattcgcagcttctatcgcaggtctgatgatcaccactgaagctatggtgacagatttacctaaagacgaaaaaatggatttaggtgctgctggtggaatgggcggcatgggtggaatgggcggcatgatgtaa

SEQ ID NO: 294047 - DNA, 381 bp, Proteus mirabilis
ttgtgtattcctgatgccgtccatttggtctttgtcacaaaataccggcgaaaaatatttgatcaggatgcaattgaaaaattgcgaggctactttgccagtgtttgtgctgattttgatgttgaactggttgaaatggatggggaacgggatcacgttcatttactgattaattacccgccaaaactggcgatatctaatctggttaacagccttaaaggggtattgagtcgattacttcgacgtgatcgtcctgatattgcccaacgttattactacaagggggttctttggtcgccgagttatttcgcggggagttgtggtggcgcaccaatatccattatccgccagtacattgagcaacaggaaacaccgagttag

SEQ ID NO: 294048 - DNA, 1710 bp, Proteus mirabilis
atgaacaagactaaaacaacccggttaagttttttacattactggcatgggttgggggcctggaatttttattttttgctaaagtttgttttgctttggtatggttatttaaaatttgatgcatttagcaatttactctttctagcatttttattatttccattaccgaaaacattttggcataaattacgtaattggatagcgatccctataggggttatgcttttctaccacgacacttggctacctagtttttcaacggtattagaacaaggagggcagttaaagaacttttcattctcttacctcattgaattagctgttaattttattaacttaaagatgatcggggtggcatttattttactggtagggtatctctttattgaacagtgggtaagagtgtcggtgtttattatcgcgggtgtagtgtggcttaatattagtggttttacccatttttcaggcgctatggtttctgctgtttctgccaatagctttactcagcaaaccaacacatctatcgatcagccacaaccgcaaaatacagaaatattatcgacagcgcagactagagcgccaaataataacgtactgagttcaccttacccgccacaaaaacagccggctaataacaaagtgttagatgaatggcttgctcagttttatcgttacgaaaataaacgcagcacacccgctcccgctcagctctcttcttatgcacaaccctttgatattttaattattaatatttgttcactctctaccgctgatgcggcagccgtcggattacagcaacatcctatttggggtaactttgatgtgttatttaatcgctttaatagtgttgcttcttatagtggccccgcttcattacgtttattaagagccagttgtggccaaacacaacacgctgatttgtatgatcctgccgatatgcaatgcttattgatggataatctggctgctttaggttttgagaagaaattggtgctcgatcataatggcgagtttggtcattatcttcaagaaattagagagttaggtaatcttaatgtgccgttgcaagatcaaagcggactctctcatcaaattaccgcttttgatggctctaaaatctataacgataaagagaccttagagcgttggttaaaagcacgagaaaaatcagatgaaaaacggacggtgacctttgtcaatttagtgtcacttcatgatggtaataggttcgttggcgaaaatacaacggctgattatggcaaaagagcctcagcgctacttgataacttaaatgcttttattaatacccttgataaacgtggcagaaaagtgatggtggtgattgttcctgaacatggagccgcattacaaggtgatacaacacagatgtctggtttgcgagatattccaagccgaagtattactacagttcctgtcggtattcgttttactggacttaaaaatcaacgtttacctcatacacctatgatgatagataaaccaagcagttatttagcgttatccgattttattctccgtaatgtgaatggcgatatctttaatcaacccaccattgattggaatgcgttaacccgtgaattaccacaaaccgcgacggtatcagaaaatcaaaataccattgtggttgattatcaagggaaatcttatatcaaattgaatgaaggagagtggatagactaccctgattga

SEQ ID NO: 294049 - DNA, 1155 bp, Proteus mirabilis
atgactacacacctttttacttctgaatcagtatcagaaggtcatccagacaaaattgcggatcaaatttctgatgccgtattggatgcaattttagaacaagatccaaaagcacgtgttgcctgtgaaacttacgttaaaacaggcatggtgatggtaggcggagaaattaccaccaaagcttgggttgatatcgaagagatcacacgtaaaacagtacgtgaaatcggttataccagttcagatatgggctttgatgctaattcctgcgccgttatcagtgcgattggtaaacaatccccagatatcaaccaaggtgttgaccgcgcagatccccttgaacaaggtgccggtgaccaaggtttaatgtttggttatgccactaatgaaactgacgttctgatgccagcacctattacttatgctcaccgcttagtccagcgccaagctcaagtacgtaaaaatggcacactaccatggttacgtccagatgccaaaagtcagatcactttccaatacgacaataacaacattgttggtattgatgccgtggttttatcaactcagcatgctgaagatatttcacaaaaagacttacatgaagcggtaatggaagagatcattaaacctattctgccaacagaatggttaaatgaacaaaccaaatatttcattaacccaacaggtcgttttgttatcggtggcccaatgggcgactgtggattaacaggtcgtaagatcattgttgatacttatggtggtatggcacgccacggcggtggggcattctctggtaaagatccttccaaagttgaccgttctgcggcttatgctgcacgttatgttgcaaaaaatattgttgctgcgggcttagctgatcgctgtgaaattcaagtgtcttacgctatcggtgttgcagagccaacatctattatggtcgaaacatttggtactgaaaaaatccctacctcacaactgatcttattagtacgtgagttctttgatttacgcccttatggcttaattcaaatgctggatttactgcatccgatctaccaaaaaacagcagcatacggtcattttggtcgtgctgaattcccttgggaagcaacagataaagctgagattttacgtgaagctgcgggtttaaaataa

SEQ ID NO: 294050 - DNA, 1908 bp, Proteus mirabilis
atgaatgataacatcgctcgtaagatgcaacagacttataacatcacatattgggggggaggatactactgcgcgaataatcgcggcaatattagtgtttgcccaaatcctgatgtgcctgaagcaacgctggatttaacagaattagttaagcaagtacaagaagagcattcacatttacgccttcctgcgctgttttgttttccacaaattttacagcaccgtttgcgctcaattaatgccgcttttcatcgtgcacgtgagtcttatggctacaaaggggattactttttagtttatccaattaaagtcaatcaacagcgtcgtgtgattgaatcgctaattaatgctggagagccattaggattagaagctggctctaaagctgaattaatggcagtgcttgctcatgccaacatgaccagttcggtgattgtttgtaatggttacaaagatcgcgaatatattcgtttagcccttacaggggaaaagctcggtcataaagtgttcttggtcattgaaaaaatgtctgagataaaaatggtacttgaagaagccgaacgtttagaagtgatcccccgcttaggggttcgtgctcgccttgcttctcaaggctccggtaaatggcaagccagtgggggtgaaaaatctaaattcggcctagctgcaacacaagtactacaactgattgatacgctacgccaagctggtcgtttagatagtttgcagttattgcattttcaccttggatcacagatggctaatatccgtgatattgcgacaggtgtgcgtgaatcagcccgtttttatgttgagttacataaattaggggtcaatattcagtattttgatgttggtggtggcttgggcgttgattatgaaggtacgcgctcacaatctgattgctctgttaactatggccttaatgaatacgctaataacgtgatttgggcgattggtgatgcttgtgatgaaaatgaattacctcatccaaccgttattacagaatcaggtcgagcattaactgcgcatcatacggtgcttatttccaatgttattggtgttgaacgtaacgaatttactgcaatcacgccaccggccgaagatgctccaagacctatcgcaagcctttgggaaacatgggaagagatgcaaaccaaagggaatagccgttcattacgtgaatggctacatgatagccaattagatttacatgatgtccatactcaatatgtacacggtatgttaagtctgacagagcgtgcatgggcggaagagttatatctgaatatctgtcgtcatattcaatatgatttagatccaagtaatcgagcccatcgcccgattattgatgaactgcaagagcgtatgtcagataagttctatgtcaacttttcactgttccagtcattgcctgatgcttggggaattgatcaattattccctgtattaccaattgaaggtttagataaaccgctcgatcgccgtgctgtattgctagatatcacttgtgattcagatggtattatcgatcattatgtcgatggtgatggggtcgaaaccacgatgccaatgccagcttatgatcctgaatatccaccaatgattggcttctttatggtgggggcgtatcaggaaatccttggaaatatgcataacttatttggtgatacagctgctgttgatgtttatcttgatgagaaaggcaatcttacttatcagttgagtgaagagggtgataccgttgcggatatgcttcaatatgtaaaacttaatcctgcggtattgttggagcgcttccgtactcaagtgaaaaatgcacagttagataaagcactccaagagcagttcctaactgaatttgaaagtggcttatacggttatacctatctggaagaagaggagtaa

SEQ ID NO: 294051 - DNA, 921 bp, Proteus mirabilis
atgaaaaattgtacgttaggtaatgagactgataattctttgatctcaaatgcatttggttttttacgttttccactgaattttcaaccttatagcagtgatgctgattgggtgatcactggggtgccttttgatatggcaacttcaggtcgtgcaggtactcgccatgggcccggcgctattcgccagatttcgactaacttagcgtgggaaggacatcgctggccttggcacttcgatatgcgtgaacgcctcaaagttgttgattgtggtgatttagtatttaacttcggtgatgcgcaagatatgagtgataagctacaagctcatacggaaaaattgctagcagcaggtaaaagatgtttaacctttggtggtgatcactttgtgacattacctctattacgtgctcacgctaaacactttggcaaaatggctttggtgcattttgatgctcataccgatacttatgctaatggcagtaagtttgatcacggtacgatgttctatcatgctcctaatgaaggtttgattgatccacagcattcagtgcaaattggtattcgtaccgagcatgacactaataacggctttactgtcttggatgctgcacaagttaatgatcgtggggttgatgatttagtcgcgcaaattaaagagattgtgggttcacttcctgtttatttgacttttgatattgattgccttgatcccgcatttgcaccgggtacaggaacaccggttgtgggtggattaaccacggataaggcgctgaaaatgctgcgtgctctacagccgttaaatattgtaggcatggatttagttgaagtatcgccagcgtatgatcaatcagatattactgcccttgccggagcaaccattgcacttgatatgctatatctgcaagcggctaaaaaataa

SEQ ID NO: 294052 - DNA, 780 bp, Proteus mirabilis
atggctttgaatggtaaagtaattttagttacaggtgctgctcagggaattggtcgtggtatcgcattacgtcttgctaaagagggtgccgatattgctctggttgacttaaaagcagataaattatccgatgtagcaaaagaaattgaagcgttagggcgtaaagtgacgacctttgctgcagatattagcaaccgtgatgaagtctttgcggcagttgaacatgctgaaaaaaccttaggcggttttgatgttatgatcaataacgcaggtattgcacaggtgaaacctcttgcagatgtgaccccggaagatatggatcggatcttcaaaattaacgttaatggtgtgatgtggggtattcaggccgcttctgagaaatttaaagcattaggccataaagggaagattattaatgcatcttctattgctgggcacgatggttttgccatgttaggggtttattctgccactaaatttgcagtacgtgcattaacacaagcggcagctaaagagtatgcgagcgcaggcatcactgttaatgcttattgcccgggcattgtcggcaccgatatgtgggttgagattgacgagcgttttgctgaaattactggagcaccaaaaggtgagacctataaaaaatatgtggacggtattgctctaggtcgtgctcaaactcctgatgacgtagctgcgttagtttccttcttggcaagtgatgattccgactatattacgggccaagctatcttaacagatggcggtattgtctatcgttaa

SEQ ID NO: 294053 - DNA, 342 bp, Proteus mirabilis
atgccatataaaatagtgcgttatcaggacagaaaccaaaaagtaccctatcgagagtggatacaaaagattaggaaacgagatcctcaagcggctgctaaaattgaagtacaagtaactcgagcatgttatggtaacttcgccgatcataaatttgttcgtgatggagtctgggctttacgaataaacttcgggcagggatatcgggtttattattcaatagaaaatgaatttattattcttttacttgttggagggaataaaagtactcaacaagcagatattgataaagcagtgaactatcttgaagattatcatgtaaggatgaaaaatgaccaataa

SEQ ID NO: 294054 - DNA, 345 bp, Proteus mirabilis
atgaccaataaaatagatgtagtaaaaagaaaaactgttcctgcatatcttgaccatgatttagagatgataaatgaactacgagaagatcctgattatgctgaggtgtatttgcaaacggcgttagaaggtatttatgagcctgggggaataggtgcatttttaattgcattacggcaaattattgaggctcatggtggagtgggcgtgattgcgaaaaaatcaggattatctcgacaacatatttatcgagcattatctgaaaatggtaatccaacactgacaacattgacagaaatcaccagagcagtaggcgttcgattagcatcaactcactgtgtttaa

SEQ ID NO: 294055 - DNA, 678 bp, Proteus mirabilis
atgtttacgccaccagcagcacctgaaaatgaatccgttttactcgcacgagcacaagcgctggctggttataccttcggtgaactcgccgcttttgcacagcttcctattcctgaaaatttaaagcgtgataaaggttgggtcggtatgctattggaatactatttaggtgccagtgccggcagtaaacctgaacaagatttttctcatatcggtgttgagctaaaaaccatccctatcgaccgttttggtatgccattagaaacgacctttgtttgtgtagccgcacttacaggaaacagtgggatcacatgggagaatagccatgtaaaacgtaagctgtcgaaagtattatgggtacctgtagagggagaacgggagatcccattagcacaacgtagagtcgcttccccgctactttggagccccaatcatcttgaagaagagctactgcgtcacgattgggaagagttaatggatatgattgtcttaggaaaagtagaaagcattactgcgcgtcacggacaagtattacaaattcgccctaaggctgctaacagtaaggcattaaccgaagccattggtgaaaatggacaacgcatcatgacacttccccgtggtttttatttaaaaaagaactttacaacgccactgattgctcgttatttccaactttaa

SEQ ID NO: 294056 - DNA, 1680 bp, Proteus mirabilis
atgacatcaccccgcttagagttgcaatttattcgcttatggcaagcttttgagggaaaagagactgaaaccacattacaagagcttgctgaaacattacattgcactcgtcgccatgtgcgttcgttactaaacaaaatgcatcaaactggttggatagattggcaagcagaagtaggaagaggaaaaaaatccaccctgacttttcattctaacgcctttgacatccaacaaagccgagcagagcgattactggaagaaaatgatatagaaaagctcgttgcactgatgggcgataaagactcgttacggcaaatggtgctttcacagattgaaaaaagctttcaccctagccaacaacgtctacgaataatttactatcgcccttttcgtaatttattacccggtacgccgcttcggcgctctgaattacatttaatgagccaagtatttaattcattacttcacttaaaagaggaaaatggggaagtcgaagcggaattagcccatcactggcagatgatcagcgagcaacattggcgcttttatttacgccctgctatctattttcaccatggacgagaattaaccatagaggatatcagcacctctttaatgagaatgaaagtctgcaatccactttatgcacatattgagaaaataacctcaccgcaaccttatgttattgatatttatttaaccgtaccggataaacaatttgccaccctattaggtagcccacaagcagcgatcttgccccaagaatggcgaactctcgctaatttttctcagcaccccattggcacaggggcataccaagtgatgagtaatgatcaacataaactgcaaatcaaagcgtttgatcgctattttggtttacgcgcactattagataacatcgatatttgggtggttcctgaattaaaagacaaaatggtttgctctacccttcatttaaccgatgatgatactcataacaactcactggaaagccgcaaagaggaaggctgttattttttactttacgatagtcgctcaacacaatgccaacaacctgagatccgcgaatggcttagtagtgtattaacaccggtgaatatgttggcccattgtgcgccctcttatcaacgccattggtcacctgcttatggtttattgttacactggcaccatagcaaactgatcccaccgcatgctaaacccgcttcactcacaaaactgaccattacactgtataaagagcaccacgaatacagcactattgctgaactgatcaaaaaaatcttatctgactatgatatcgaattatctattcaagtgcttgattatgaacagtggtattatggtgatgcaaagagtgatatctggttagctaccgtcaatttctataaaccgctcgagttttctatttttgcagcactttatgaactgcctctatttcaccagtgcatgggtaaacgttatgaagatgccctagccttatggcgtcaaaaagtattaccgcttgaagagtggtgtcgccaattaacacaaaataattggcttttcccgttatttcaccatttacttgaattacaagggcaacgtacgatacgcggtgtaaaaatgaatacctttggttggtttgattttaaatcggcatggtttatacctgatttagaaacgcccccattaaaatag

SEQ ID NO: 294057 - DNA, 603 bp, Proteus mirabilis
atgaataaattcacacaacacactggaattccagtacctttagatgctgccaacgtggatactgatgcgattattcccaaacaatttttacaaaaagtcactcgcacaggatttggtaaacacttatttcatgattggcgatttttagatgatgaaggcacccagcctaacccatcatttattttaaatcagcccatctatcaagatgcttctattttattggcgcgcgagaattttggttgtggatcttctcgcgaacatgcgccttgggcgctcacagattatggctttcatgcggtgatcgcgccgagttttgctgatattttttacggcaattcctttaataaccagttattgccaatcaaattaagtgatgagcaagttacccagttatttgattgggtaacagagcatgctggtacgcctattaccgttgatttagttgcccaacaagtgatcgccggtgaattatgcttctcatttgaaatcgatgcatttcgccgtcattgcatgattgaaggattagacagtatcggattaacgttacaacaccaagcagagataagtgcttatgaagctaaacaacctgcttttatgcgttaa

SEQ ID NO: 294058 - DNA, 1410 bp, Proteus mirabilis
atgggtaaaacattatatcaaaaaatttacgatgcacatgttgtcagagaagtagcgaatgaaacacctattatatatatcgatagacatttagtgcatgaagtgacttcacctcaagcttttgatggtttaagaaccaaaggtcgtgctgttcgtcaacccaacaaaacctttgccacaatggatcacaacgtttcaactcaaaccaaagatatcaacgcctgtggtgatatggcgcgtattcaaatgcaagagttaatgaaaaactgtcaagaatttggtgtgaccttgtatgacttaaatcacccatatcaaggaattgttcatgttatggggcctgaacaaggcttaactttaccaggcatgacaattgtttgtggcgactcacatacagcaacacatggtgcctttggtgcattagctttcggtattggcacttctgaggttgagcacgtattagcgacacaaaccttaaaacaatcacgtgctaaaaccttaaaaatcgaagtacaaggcaaaacagccaatggcatcacggcaaaagatatcgtattggcgattatcggaaaattgggtagtgcgggaggtacggggtatattattgaatttacgggagaagctattgaagctttgagtatggaagggcgaatgacgttatgcaatatggcgatagagatgggggcaaaagcaggcttagttgctcctgatgagactacatttgcttacttaaaaggacgtcaatttgcccctcaagccccattgtgggatgaagctgtcgcctattggaaaacgttaaagtcggacgaagatgctatttttgatgctactgtgacgattaatgccgcagagattgcaccacaagtgacttgggggacgaatccgggacaagtgattgctattgaccaaattgttccgcgattgaacagttttaacgatcctgttgaacgagctagcgccgaaaaagccttagcttatatgggattaactgaaggtgttaacttaactgatattacaatagataaagtttttataggctcttgcactaactctcgtattgaagatttacgcgcagcagcaaagatagctaaagggcataaagtcgcctcccatgtacaggcaattgttgttcccggctcaggccctgttaaagcccaagcagaagcagaaggtttagataaaatttttattgaagccggttttgaatggcgtttacccggctgctcaatgtgcttggcaatgaacaatgaccgattaaatcccggagagcgttgcgcatcgaccagcaatcgtaattttgaaggtcgccaaggtcgtggtggcagaactcatttagtcagtccggcaatggccgctgccgccgccattcatgggcatttcgctgatattcgcacttttgcaacagtatcataa

SEQ ID NO: 294059 - DNA, 1092 bp, Proteus mirabilis
atgtctaaacattatcatattgcagtattgcccggagatggcattggccctgaagttatggcgcaagcacaaaaagtgatcgatgcggtaaataaacgattttcactgaatatcacgaccaaagagtacgatattggtggtattgctatcgataatcatggcacaccattaccggcaaccaccttggctggatgtgagcaagctgatgcgattttattcggctctgtgggggggcctaaatgggagcatttaccggcagatcaacaaccggaacgtggcgcattattacctttacgcaaacactttaaattattctgcaatctgcgcccagctcgtttatataaaggtttagaagcttattgtccattgcgtgctgatattgcacaacgcggttttgatattttatgtgttcgtgaattaactggggggatctatttcggtcaacctaaaggccgtgatggtgaaggtcgcgaagagcgtgcttttgataccgaggtttaccatcgctatgaaatcgaacgtattgctcattttgctttcaaatcagcgcaaaaacgtcgttataaagtcacgtcgattgataaagccaacgttttacaaagctctattttatggcgtgaagtcgtcactgaggtcgctaaacaataccctgatgtgaccttgcaacatatgtatatcgataatgcgacaatgcaattaattaaagatccagcgcaatttgatgtattgctgtgctccaatatctttggcgatattttatcagacgaatgcgccatgatcaccggttcaatgggcatgttgccctctgcaagcgtaaatgaagcacattttggtttatatgaacccgcaggtggctccgcaccagatattgccggtaaaaatatcgccaatccaatagcacaaattttatcaaccgccctattactgcgttatagctttaatgaagataaagcagcccaagccattgaagaagcaattacaagagtactagcaacaggctatcgcaccgcagatttagcgggagaaggaaacgcaataacaaccgcagaaatgggtgatcatatcgctcagtttattcaagaaggggcataa

SEQ ID NO: 294060 - DNA, 1560 bp, Proteus mirabilis
atgagcaacaatgtgattatttttgacaccacattaagagatggcgaacaagcattgcaagctagcttaagcgtaaaagagaagttacaaattgcttatgccttagaacgtttaggtgtagatatcattgaagcgggttttcctgtctcttcccctggggattttgaatctgtacaaaccatcgctcgagaaattaaaaatagtcgcatttgtgcgttagctcgctgtgttgataatgatattgacgttgccgcagagtcattaaacattgccgaggcatttcgtattcatgtttttttagccacctccgctttgcatgctgaacataagttaaaaaaatcctttgatgacattattgaaatgggaacacgctcaattaaacgcgcccgacgctatactgatgatgttgaattttcttgcgaagatgcggggcgtacccatattgataatttatgtcgcattgtggaaagtgccatcaacgcgggcgcaacaaccattaatattccagacaccgtaggttataccacgccttatcaattcggtggcattatcactaatttatttgaacgtgtacctaatattgataaagcggtgatctccgttcattgccatgatgatttaggtatggctgttgcaaactctattaccgcagtacaagcaggtgcaagacaagttgaagggactatcaacggcttaggtgaacgagccggtaactgcgctttagaagaagtgattatggcgataaaagtacgtgaacaaatgatgaatgtacaaacgcgtattaatcacaaagagatctaccgtaccagccagttagtcagtcaattatgtaatacccctattcatgccaataaatccatcgttggctcgaatgcctttgcccactcctctggtattcaccaagatggcgtactgaaaaatcgtgaaacttacgaaattatgacacctgaatcaattggtttaaaagaggtgcaattgaacttaacgtctcgctctggtcgagctgcggtaaaacaccgtatggaagagatgggctatcgcgaaacagattataacttagattctttatatgccgctttcttacgtttagctgataaaaaaggccaagtttttgactatgacttagaagcattggcttttatggggcaacagcaacaagagcctgatgagtttgtaatgaactattttaatactcaatccggctcctcaacagttgccacagccagtgtcagcattagtcgtaaaaatgaagaaatcactgaagcagcaacaggaaatggtcccgttgatgctgtctatcaagctatttctcgtgctacaggttatcccttaaaactggtgacttatcaattaacagccaaaggtgaaggacgagatgcattaggacaagttgatatcgtggttgaataccaaggacgtaaatttcatggcatgggattagaaactgatatcgtcggttcatccgccaacgccatgatgcatgttatcaacagtatttggcgttcagagcaagtcgaaatagaaaaacgcaaacaccatacaacacaagaagcggtttaa

SEQ ID NO: 294061 - DNA, 945 bp, Proteus mirabilis
atgacggattacacatcagcaacaacgaccaataaagagtcagcagatatgcatttacgtaatgttgatcttaatttattaacggtgtttgatgctgttatgcaaatgcaaaatgtcacacgagcagcacaggtgttaggtatgtctcaaccggcagtcagtaatgcagtttctcgtcttaagatcatgtttaatgacgagttatttgttcggtatggccgaggtattcaaccaacattaagagccaaacaattatttggccctgttcgacaagcattacaattagtccataatgaattgccaggggcgggatttgaaccggaacaaagtgatcgtgtgtttagcttatctatttgcagtccattagatatcaagttagcgccaaaaattgtagagagaataaaaaataaaacccctaatattaatgtaaatattaagtcttatttgaatagtaatattgaacaccaattaaaatatcaggaagttgagttctttattaattataaacaatttgataaaccagagtttcattcacaccctttattcaatgatgaagtggttttggctgtctctaaccaacacccacgaattaaagaaagcgttactgaagagatgttattaaatgagcatcattctattgtttctttagaagatgtggggtcttttagtgctgcttattataagaatacagagttagaagatttaattacttatgaaggtactgatttaaatagtgtattaaatctagtctcaaaaacttattcggtcgctattgcgcctagatggttagttgaaagctattcagaacaattgaacattaaggcgatatcattaccttgggagaaggtagaacgtccatgctatttaatttggcatgagtcaacggcacgagataaaggccatttatggatgaaaaatttacttagtgaggtttgtcaaaactaa

SEQ ID NO: 294062 - DNA, 1809 bp, Proteus mirabilis
atgataaataataataatctatatgattatcatataattagaagattgcagatgcaattttcatcttctggggaaaaaacggcttatcgtcagtgggatgctaagtctgaaatcgccatgtcatgggcgtcagtagcaaagaaaacacgtgcactctcaaatgcattactcgatatgggcgtggctgttcaagaaaatgtggggattttttcccaaaacagcattgattggtctattgccgatattgctactttgcagttgcgtgctgtcacagttcctctttatgcaacaagtagtgtggaacaagccgcttatatcatcaacgatgcgaatattcgtattctttttgttggtgaccaaaaggaatatgacgttgtttctgagttagcgctattatgcccgcaacttaaacatattattgtgtttaattctcaggtcgttttaaatccgacaataccttcttatcatctgacaaacttaatcagtgactgtcaatctcaatatgattctctgctacaacaacgtattgatgaatgttgtttagatgatttgtttacactgatttatacctcgggtacaacaggtgagcctaaaggtgttatgcttgattacaccaatctggcttctcaactttatctgcatgatcagcgcctttcattatcggataaagatgtttcattatgctttttaccgttatcacatgtatttgaacgggcatggagcttctatgttatgcatactggggctattaatgtttatctcacagatacccatgccgtaagggaagcaatggctgcagtaaaaccaacggttatgtgtgcagtgccacgcttttacgaaaaagtatatagcgccattcaagagaaagtttctcaagcacctcgactacgccaatggatgtttaaatgggctcttaaacagggtgaaaaacaacgtcaggcacacttagctggacgttcattaggcgtgctatctcaatggtgttatcgctttgcggataaaaaagttcttcaaccactacgtcaaattttaggtgggcgagttcgttttttacctgccgcaggcgctcgtttagatgatgcggtgatcggctttttcttagccgcgggtattaatattaaatatggttatggcatgacagagacttgtgccacggtatcttgttgggaagaaaaccattataaactaggctctattggtactccgttaccgggggttgaggtacgtataggcgaagaaaacgagatccaagtgcgtggtagtatcgtgatgaaaggttattttaataagcctgaagagacggttgccgcgtttactgaagatggttggttacgtaccggtgatgcgggtgcattagatgaagatgggatgttatatattaccgaacgtttgaaagatcttatgaaaacctcaaatggaaaatatattgcaccgcaaatgattgaaggtacattagggcaagatcgctttattgagcatatcgctgtgattgcagatacccgtaaatttgtttctgcactgatcgtaccttgctttgatgcattagaagaacatgctcgagcattaaatttaaaatatcacgatcggatagagttattacgccatactaagatcaaagaattatttgatgaacgcttgcgtgaaatgcaacgtaattttgctagtttccatcaagttaaacgatttaccctattagcggaagggtttacgatggagtctggagaattgacacctaccttaaaattaagacgtaaaataatttctgaacgctatcgaaatgaaattgagcagatgtatcaagagtcgtga

SEQ ID NO: 294063 - DNA, 1008 bp, Proteus mirabilis
gtgaaactggatgaaatcgcccgcttggctggtgtttcacgaacaacagcgagttatgtcattaatggtaaagctaaacagtaccgtgtaagtgacaagactgttgaaaaagtgatggcggtggtcagagagcacaattaccacccgaacgctgttgccgcgggattacgtgctggtcgtacgcgttctataggtttggttattcctgatttggaaaataccagttataccagaattgccaattatcttgaacgacaagcgcgtcaacgtggttatcaattgctgattgcctgctcagaagatcaacctgacaacgaaattcgttgtgtagaacatctactacaacgccaagttgatgccattattgtatcaacggcattacccccagagcacccattttatcagcgttgggctaatcgttcgttgcctatcattgccttagatagggcgttagagagtgaacattttattagcgtcgtcggtgatgatttagaagacgcaaaaatgttagcgagtgagcttaaagcttttccttctcaatcggttctctatctaggcgcattgcccgaactatcagtcagttttttacgtgaacagggctttcgtagtgtgtggcaagatgatccacgacaagtgacttatctttatgcgaatagttatgaacgagaagcggcggcagaggtattttcggaatggttaaataataacccgatgcctgatgcactctttacgacctcctttgcgctattacaaggtgtgatggatgtaacgttgcaaagaagtggacgcttacctacgcagttagtgattgctacatttggtgatcatgaattattagatttcctcgaatgtccagtattatcggtggctcagcgacatcgtgatattgcacaacgtgtattagagctggttttagcaagtcttgaagaagagcaaaaaccacaagcgggtattacacgtattcgacgtgatttatgtcgccgaggtagtttaggacgtactcgttaa

SEQ ID NO: 294064 - DNA, 459 bp, Proteus mirabilis
atgtttcgtggtgcaacactcgttaatctcgacagcaaagggcgaataacagttccttcccgttatcgaacaacgctgaacgaggcttctgaaggtcaaatggtctgtaccattgatctcaatcagccatgtttattgctgtacacccttcctgaatgggaaaaaattgagttaaaactggcggcgctttcttccatgaatcccgccgaacgaagagtgcagcgtttattacttgggcatgctagtgaatgccaaatggatagcgcaggacgtcttttgttagctagcacgctaagacagcacgcggggctaaccaaagaggtcatgttagtcggtcaattcaataaatttgaattgtgggatgaacaggtctggtatcaacagatcaaagaagacattttggcagagcaaacctcacaggaaccgttatcgacacgactattggatttatcactttaa

SEQ ID NO: 294065 - DNA, 948 bp, Proteus mirabilis
atgacaacgaataattttagccataccagtgtattactggatgaagcagtaaacggcctgaatattaaaccttcaggtatttatattgacggtacttttggccgtggcgggcactctcgtctgattttatcgcaattaggtgaacaaggccgtctcattgcgattgatagagatccacaagctatcgcagtggcaaatgaaattgatgatccacgattctctattattcatgggcctttttcaaatattgaacactatatcaatgagttaggtttaagtggcaaagttgatggcgtattattagatttaggcgtttcttcaccgcaattagatgatcctgaacgaggattctcttttatgcgtgatgggccactcgatatgcgtatggacccaaccacaggacaatcagctgcacagtggttaatgaatgccgaagaagatgatattacttgggtgctaaaaaccttcggtgaagagcgtttcgcgaaacgcattgcccgtgccattgtggcgcgtaataaaactgaagagccattaacacgtactaaacagttagcggatttgattagtgaagcaagtccagtaaaagagcgacataagcaccctgcaacacgtagctttcaagcgatccgtatctatatcaatagcgagttagatgagattgaaaaagcattaaaaggtgccgtgtctattttagcgccagcagggcgtttatctgtgattagtttccactctttagaagaccgattagttaaacgctttataagagatgaaagtaaagggcctgttgttccagcggggatcccattaacagaagaacaaattaaagcactaggaagtgctcgcctgagtagcattcataaaatgaaacctaccggtgttgaagttgaggagaatccacgagcgcgaagttctgttttacgcgtcgcacagcgtattgaggaataa

SEQ ID NO: 294066 - DNA, 318 bp, Proteus mirabilis
atgtctactgaacgccattcattaccgggagtaataggacaagatttactgcgtcatggcaaattgccacttattctttttttcgccgttattatctccgcgatctatgtggtaacgacagcacataaaacacgcttactgacagcagaaaaagagcgcttagtgttagaaaaaaatgtattggatattgaatggcgcaacttgatccttgaggaaaatgcattggcggaccatagccgagttgaacgttttgcaagtgaacagttaggcatggttcatgttgatccaactaaagagaatattgtggttactaaataa

SEQ ID NO: 294067 - DNA, 1797 bp, Proteus mirabilis
atgaaattttcacgttcggcaaaagcgaagacaaagacaaagtcaaatgccaaactccgtaaacctgaagaaaaaacaggatttgtgagttggcgttttgcgttgctttgcggtggtattggtattgctttagcggcgttattaatacgagttgcctatttacagattattaacccagatcccctgatccgcgaaggggatctgcgctctttacgtgtgcaaaaagtccccacagctcgtggcatgataagcgatcgtatgggaagaccattggcggtgagtgtccctgtatatgctatttgggctgatcctaaagttgtgttagaagctaaccctgatatgaccgattcacgttggttagcacttgctgatgcattaaaacttcccgttaatcaaatttctcaaaaaatttctgcaacaccttccgctcgttttatctatcttgcgcgccaagttaatcctgaaattagtgattacataagtaagctgaaaatcaaagggataaacatgcgccaagagtccaaacgctattatccttcaggagaagtgaccgctcacatcattggtgttacaaacattgatggcgatggtattgaaggggttgaaaaaagctttaaccaatggcttaccggtgcccccggagagcgagttgtacgcaaagatggctttaaccgtgtgattgaaaatattgctcaaacagatagccaagctgctcacaacttaatgttaagcattgatgagcgtttacaatctgttgtgtatagagagttaaccaatgcagtcattgaaaataaagcagaatcaggtacggcggttttggttgatgtcaatacaggcgaagtgttagcgatggcaaatagcccgtcctataacccgaataatttagcgggaacgccgaaagatgcgatgcgtaatcgagctatcaccgatatttttgagccaggctctacggtaaagccgatggtggttatgagtgcgctaaacaataatattattaaagaaaataccgttattaatactgttccttatcgaattagtggtcatcagataaaagatgttgcgctttatcgtgagctttcgataactggaattttacagaaatcgagtaacgtaggggtatctcgccttgcgttagcgatgccggcgtctgaactggtagatgtttattcccgttttggcctcggaaaaccaactaacttggggctagttggtgaaagtagtggcatatttccaataaaaaaacaacggtggtccgatcttgaaagggccaccttctcattcggatatgggctaatggtaacgccattacagttagcgcgtgtctatgcaactatcggtagttttggtatttatcgaccgctttctattactaaagtcgaccctcctgtaccgggtactcgcgtttttcctgaaaaagtcatgagaacagtggttcatatgatggaaagtgtcgccttaccgggcggtggtggtgttcgtgctgcgatcaaagggtatcgtgttgcgattaagaccgggaccgcgaaaaaagtcggcccagatggaaagtatattaatgcctacatttcttatgcagccggtgttgcaccggcaagccgtccacgctttgccttagtagtgatcattaacgagccaaaagcgggcaaatattatgggggtgcagtttctgcaccagtgtttggcacaattatgggcgcggttctacgtacgatgaatgtagagcctgatgcattaacgccagacgataaaagtgaaatagtgattaataaaaaagaggatacaagtggcagatcctaa

SEQ ID NO: 294068 - DNA, 1488 bp, Proteus mirabilis
gtggcagatcctaatttaagtgacctattaggggcactcgggatacaagcaccgtctttaacgcttaaagacatgacactcgatagccgaaaagccgcgagtggtgatctgtttgtggcaattaaaggccatgaaacggatggtagacgctatattcctcaggcaattgcacaaggtgtttgcgctgttttagcggaagctgaaggtattgctactcatggcgaaattcgtgaaagtcatggtatacccgttatttatattgaaaacctaaattgtcaattatcaaaacttgcaggaattttttatcatcagccagcggataaattaaagctgattggtgtcactggtactaacggaaaaacgacaacaacacaattgttagcacagtgggcgcaaggtttaggtgaagtcagtgccgttatgggaacggtaggcaatgggttattagatcatattgttccggcaatgaatacaaccggttcagcggttgatatccaattagaattacagcaattagttaatcaaggcgctacctttaccgcaatggaggtttcgtcacacggtttagttcaagggcgcgttagtgcgctaccttttgtcgccagcgtatttaccaacttaagtcgcgatcaccttgattatcatggtgatatggccaattacgaacaggctaaatggttgttattttcgacccaccatagtggcgaaaaaatcattaatgctgatgatgcggtagggcataaatggttgacgcatctacccgatgcagtggcggtgactatggcggataaattgccggcaaattggcaaggacgctatgtgcaagcgacacaaatcaattaccatgatgcgggtgccactatccattttaattcaagttggggagaaggtgaaattgaaagcccattaatgggggcttttaatgtcagtaacttactctgtgctttagctacacttttggcacttgaataccctcttgatgcagtgattaaagcttccagtgcattaacgcccgtttgtggtcgtatggaagtatttagtgcggataatcgtcctacggtgatcgttgattatgcccacacgccagatgccttagaaaaagcgttacaagcggcacgcttacactgtactggcaaactgtggtgtatctttggttgtggtggtgatagagataaaggtaagcgcccactaatgggcgctgtagcagagcagtttgccgataaagtggttatcaccgatgacaatccgcgtagtgaagagccacaagccattattcaagatatcctttctgggttaatggatcctggtcgtgcattagcgattgaaggtcgagcagaagccgtgacgaatgtagtaatgcaagcctctcccgctgatatgatcttagtggcaggaaaagggcacgaagattatcaaatcgttggcactcgccgtcttgattattctgaccgattaactgttgcacggttattgggggtgatcgcatga

SEQ ID NO: 294069 - DNA, 1383 bp, Proteus mirabilis
atgatagcgctttctctcgaaactattgcacaagtcactcaaggcacgttgagtactattactcaaagccaagccaatcaattaatgatcaaatcaatttctaccgatagccgtaaaattgatgatgcatgtctgtttattgctttagcaggtgatcgttttgatgctcatgactttattgctgatgtcaaacaaaagggtgccgttgcggttttagttaatcggaaaatcgatgttgaatgtccacaaatcatcgtaaaagatacccgtttagcaatggggcatattgccgcttatatccgttcgcttagcaatgctaaaattgtggcgttaacgggctcttcgggtaaaacgtccgttaaagagatgacggcttcgatactgcgtcactgtggtgaaaccttatatacacatggcaatttaaataatgatattggtgttcccctgacactctttcgtctaacccctgaacatcgttttgccgtgattgaacttggtgctaaccatattggtgaaatagcctataccgtggatatggttaaaccagatagtgcattggtcaataatcttttttctgcacatattgaaggttttggttccttacaagggattgctcaagctaaaggtgaaatattcactggcttaaaagagcaaggcacagccattattaatcagcaaagtaatgatgttgcgctatggcaacagcattttaactcacgtcaaactcagtggtctttctctttatctgcagacactcaggccgatttctacccaacggatatcgttgttaatcaactcaccaccgattttacattgcatacgccagaagggtgtgtagcaatcaccctacctttacctggtcgccataatattgccaatgcgttagccgcaagtgcgttagccttgtcggtaggggcgacattaacggatattcagcaaggtttagcggtactgaaagccgtacctggcagactctatcctgttgagttaacaacaggaaaaatagtgttagatgatacctataatgctaatgatgggtcgatgatggcagggctgcaagttttatctcaattaccaggatataaaatctttgttgctggagatatggctgaactaggcgaggattcagaaaaatgtcaccgtgatgtgggacgttttgctcatcaagtcggtatcgatcgggtattaaccgtgggtcattacagccagtttattagtcaagaaaatgaaggcggtgagcatttttcatttaaagctgatttgcttacccaattaattccattattacagcagcatgatgttgtttcagttttagtaaaaggttcacgaagctcagcaatggaggatatcgtgaacgcattaaaggagtgctttgaatgttag

SEQ ID NO: 294070 - DNA, 1083 bp, Proteus mirabilis
atgttagtttggctagccgaatatttggttaaatatcatacattttttaatgtgttttcttatctgacattcagagcgattgttggtttattgacggcattaattattgcgttatggatgggaccccatttaattgcatggttacaaaaaatgcaaatcgggcaagtggtgcgtaacgaaggtcctgagtcacactttagcaaacgtggtacgccgaccatgggtgggatcatgatcctattttctatcgctgtatcaaccttattgtgggcgcgattagataatccttatgtatggtgtgtactcttggtgctaattggttatggcatcatcggttttatcgatgattatcgcaaagtagtgcgtaaagatactcgaggcttaatagcgcgttggaaatatttctggcaatcggtattagctttagcggttgcatttagtatgtacgcgattggtaaagataccccagcaacgcaacttgtcgtgcctttctttaaagatgtcatgccacaacttggcatgttgtatatcttactggcttattttgtcattgttggcaccagtaacgcggtaaatttaaccgatggtttagatggcttagccattatgcctacggtgtttgtagcggctggatttgcattagttgcatgggctacaggtaatgtcaattttgccagctacctaaaaattccttatttaatgcatgccggcgaattggtgattgtttgtaccgccattgtcggcgcgggattaggcttcctttggtttaatacttatcctgcccaagtctttatgggtgatgttggctctttagcattaggtggtgcattaggtactatcgccgtgttattacgccaagaatttttattagtgattatggggggcgtgttcgttgttgaaacgctctcggttattttacaagtaggttcatttaaactgcgcggccaacgtattttccgtatggcgccaatccatcatcactatgaattaaaaggttggccagagcctcgtgtgattgtccgcttttggatcatctctcttatgttagtccttattggtttagcgacattaaaggtacgttaa

SEQ ID NO: 294071 - DNA, 1311 bp, Proteus mirabilis
atggcaaattatcaggggaaaaaagttgttatcgtgggactaggcattaccggtctatcctgcgttgacttttttatccgccaaggtgtaacacctaaagtgatagatactcgccagcatcccgcgggtttagataagctacctgctgatgttgagtatcatacggggagttttcatcaagtatggcttaatgatgctgatttaattgtctcaagtccgggtattgcgttatcaacgcctgagttagttgaagcgcgagatcatggagtggaaattgtcggtgatattgagctattttgccgtgaggcaaaagcgcctattgttgcgataacaggctctaatggcaaaagtaccgtaacgacgttggtgggggaaatggctaaagctgacgggatccctgtcggtgtcggtggcaatattggtgtacctgctttaacgttattaacacagccttatgacttatatgtcttagagctatcgagctttcaattagagacaacctatagcttaacagcggcggctgccacggtattaaatattagcgaagatcatatgaatcgctatccgttaggattagaacaataccgtgaagctaaattacgtatttatgataatgctaaaacctgtgtctataacgcagatgatgttctgacattgcctttagctggcaaagatgcacgttgtgtgagttttggtatcggacaaggggattatcaacttgataataccaatcgttacttgaacgtaaatggtgaaaatattcttgccacttcacagatgttcctttctggtcaacacaattacaccaatgcattagccgcattagcgttagctgatgcggtgggaatttctcgtaaagcatcactggctgttttaaacacctatcatggccttgctcatcgtttccaattagtttactcccataatggggtacgttggatcaatgattctaaagcgactaatgtaggtagcacagaagcggctttaagagggcttgaagtagaagggactttgcacctgttgttaggtggggacggtaagtctgctgattttagcgcgctattaccttatctcagtggcgataatattcgcttatattgcttcggacaagatggtcaagcattggcaaatttacgaccacaagtctcacaattaaccgcgactctggaagaggcgatgcgattacttgcaccaacagtgcaaactggcgatatggtgctactttcacccgcttgtgcaagtttagatcagtttaaaagtttcgaacaacgtggtgatgagtttgcccgtttagcgcaggagcttggctga

SEQ ID NO: 294072 - DNA, 1194 bp, Proteus mirabilis
atgagtgtatacgcaatgcgaagattaaaacagtggctggtgggaagttatcaaacagataacagcgcgttcgtgccttatgatcgcactttgctctggtttacattcggattagcggttgtcgggtttgtgatggtaacctcggcgtcaatgcctgttggacaacgtttagctgaagatccttttctatttgctaaacgtgacggcatttatatgattgttgccctttgccttgcattagtgacaatgcgagtgccaatggcggtatggcaacgctacagtagcttaatgctgtttggttctatcttgctattactcgtggtattggcagtgggcagttcagtaaatggcgcatcacgttggattgcatttgggcctttacgtattcagccggcagaactttctaaattggcactgttttgttatctctccagttatttggtgagaaaagtagaagaagtgagaaacaacttttggggattctgtaaacctatgggggtgatgttaatattagccgtattactgctattacaacccgacttaggtacggtggtcgtgctgtttgtgaccacattagcgttgctttttttagccggtgcaaaaatttggcaattcctcgccattattggtacaggtattgccgctgttgtgatgttaattattgttgagccttaccgtgtacgacgtatcacttcgttcttagaaccttgggaagatccttttggtagtggttatcagttaacacaatccttgatggcttttggacgcggtgatctactggggcaagggttaggaaattcagtacaaaagttagagtatctacctgaagctcatactgactttattttctccattttagcagaagaacttggttatatcggtgtggttttagtgcttttaatggtattcttcatcgcttttcgtgcgatgcaaattggacgccgtgctttgctgctcgatcaacgtttttcaggctttttagcctgttcgattgggatctggtttaccttccagactttggtcaacgtcggtgcggcagcaggtatgttgccaacgaaagggttaacattacctcttattagttacggtggttcgagtttgattattatgtcaacggctatcgtgatgttgttacgaattgattatgaatcacgcctagcacaggctcaggcgtttgtaaggagtcctaaatga

SEQ ID NO: 294073 - DNA, 1083 bp, Proteus mirabilis
atgagcgaacgtaaacgccgattaatggtgatggccggcggaacaggagggcacgtctttcctggattagcagttgctcattatctgcaatcccaaggctgggatattcgttggttaggaaccgcggatagaatggaagcacaattagtgcctaaacatggcattgaaattgagtatatccgtatttcgggtctgcgaggtaaaggggtaaaagcgttaattgcagcacctattcgtattataaaagcgatttttcaagcccgtcggattatgaagcgctatcagcctgatgccgtattaggcatggggggctatgtttctggaccaggcggtgttgcagcatggagctgtggtattcccgttgttttacatgaacaaaatggtattgcaggcttaactaaccgttggttgtcaaaaatagccaaacgtgtgttacaagcattccccggtgcgtttgctaatgcgcctgttgttggtaatccggttcgtgacgatgtcttagcacttgaagcgccagcagagagattaaaaggcagagaaggtgctgtccgagtgctggttattggtggtagccaaggtgcgcgtatcttaaatcatacaatgcccgtggtggctggattattaggagagcgagttacaatttggcatcaggccggcaaagggagcgaaagtgataccaaattacgctatcaaaatgaactttctaaaaattcagttaaatctgagtataaagttactgaatttattgatgatatagcgcaagcttatcaatgggctgatgttgttgtatgtcgttcaggtgcattaacagttagcgagattgccgctgcggggttacccgctatttttgttccttttcaacataaagatagacagcaatattggaatgcattgccattagaaaatgccggtgcggcgcgtattattgaacagaatgatttaacgccagaagcgatagctgacaccctagaaaattgggatagacatcagctaatgctaatggcagaaaaagcacaaagtgttgcgattacggatgctactgagcgagtcgctaatgtaattatcgaagtggctaaaaaataa

SEQ ID NO: 294074 - DNA, 1464 bp, Proteus mirabilis
gtgaatacacaacagctggcgaaattaagatcttttgtgcctgagatgagaaaagttaggcatatccactttgttggcattggtggtgccggcatgggcgggatcgccgaagtgttggctaatgaaggttatgcaatcagtggttctgatttagcgcctaatgtagtcacacaacaactcgttgcattaggggcgacaatctattttaatcatcgccctgaaaatattcgtgatgctagtgttgtggtggtttctaccgcaattagtgcagataatccggaaattattgcagcaagagaagcgcgtattcctgtgatacgtcgtgcagaaatgttagcggagttaatgcgttatcgtcacggggttgcgattgcaggaacccacggtaaaacaacaacaacggcgatgatttcgaatatttatgcacaagcaggattagatccaacctttgttaatggcggtttagtgaaatcagcaggtacccatgctcgtttaggttgtagccgctatttaattgcagaagcggatgagagtgatgcttctttcttacatcttcaacctatggttgcggtggtaacgaatattgaagctgaccatatggacacttatcacggtaattttgataatttaaaagagacttttattacttttttacacaacttaccgttttatggtcgcgcagtgatgtgtattgatgacgatgttattcggtcaattattcctaaagtagggcgttatattactacctatggttttagtgaagatgctgatgtacgcattactcattacgaacaaaaaggtgcgcaaggatttttcactatttctcgtgaagatatgcctgatttagatgtggtattaaatgcgccgggacgtcataacgccttaaatgcaaccgcagctgtggctgttgctacagaagaagggattgcggatgagcatattttagccgcactacttaatttccaaggcactgggcgtcgtttcgatttcttgggaaatttcagtcttgagcatgtgaatggccaagaaggggaagtcatgctggtggatgactatggacatcacccaacagaagttgatgcaacgataaaagcggcacgagcaggttggcctgataaacgtttagtgatgttatttcaaccacatcgttatacacgtactcgtgatttatatgaagattttgcaacggtgcttaatcaagttgatattttattattaaccgatgtttatgcagcaggagaggcgcctattcccggtgcagatagtcgttcactgtgtcgtactattcgtcaacgtggcaaactagatccgatttgggtttctgatgttgagaacatctcctcaatattagcgggtgtattaacagataatgatcttgttttagttcaaggtgctggaaatattggtaaaatagcgcgtcgcttagcagaaacaaaattacaaccatctttaagcgaggattaa

SEQ ID NO: 294075 - DNA, 348 bp, Proteus mirabilis
atgtttgagcaagtgaacatcatttatggtgaaatggttaagaaaatgactgtaatggtgggagattttagtcaaaaagagatcttatttgcgaaaaatacgatcggtaatttgcttgctcaaagagatgtgggaaaaatttatcagttaaaagtagcgaaatttaaagaaaaactcgctattttgacttttaaggtaaataattctcaacagattgaacaatttagtgatttaattatcaaagctaaaggtatttatagagtatatatatctagtggaagtattaatcgtaggaatatcgtacaaaagaatagccgattctcttatttgaatgttgcgcaggggtga

SEQ ID NO: 294076 - DNA, 789 bp, Proteus mirabilis
atgtcacaagcagcgctaaataataaagagataaaagagaaacgtcattctgatagaccgagtaatggtagctatttatcaggattaatcttcttcttatgtgtgattgccaccattatttggggcggaatacaagttgtgaattggatgaaagatgctaatcgtctaccgatatcaaagcttgtacttactggtgagcggcattacacaacgaatgatgatgtgcgtcaggccattttatctttaggccaaccaggcacttttatgacacaggatgtcaatatcattcagcaacaaattgaacgtatgccatggattaggcaagtgaccgtacgtaaacaatggccagacgaattaaaaatccatctggtggagtatgtgccatttacccgttggaatgacacacattttcttgatagagaaggccgaattttcagtctgccaacgcgattggaaacacaaggaaattacccactattatatgggccgcaaggaagtgagaaaatggtattagcaggttatttagcaatgagagatcagcttcttgccagtaatctgaaattaaaagcagcatcaatgtcagctcgtcaaggatggcaattagtcttagacaatgatgtccgattggagttagggcgtaaggataccgaaaaacggattgctcgctttattgagctgtatcctatcttgcaacaacagactgacaaacgggttgattatgtcgatttacgttatgacagtggtggtgcagttggatgggctcctttattacttgatgtgaatgaataa

SEQ ID NO: 294077 - DNA, 1257 bp, Proteus mirabilis
atgatcaaagcgacggacagaaaattagtagttggtcttgagattggtacggccaaagtagccacccttgtcggtgagatcctgcctgatggcgtagtgaatattatcggggtgggaagttgcccatctcggggtatggacaaaggtggcgtgaacgatctcgaatccgtcgtaaaatgtgtacaacgggctgtagatcaggctgaattgatggcagattgccaaatatcgtcagtatatttggcgttatcaggcaaacatattagctgccaaaatgaaattggtatggtgccaatttcagaagaagaagtaacacaagatgatgttgatagcgtggtgcatactgcgaaatccgtcaaagtaaaagatgaacaccgtgttttacacgtaataccgcaagagtacgccattgattaccaagaagggatcaaaaaccctgttgggttatccggtgtacgtatgcaggctaaagtacatctgattacctgccataacgatatggcgaagaatatagtaaaagcagttgagcgctgtggtttaaaagtggatcaactgatttttgcaggactggcttcaagttttgctgtgctaacagaagatgagcgcgaattaggtgtttgtgtcgttgatatgggtggcggaaccatggatatcgccatatataccggtggtgcattaagacatactcgtgtcattccttatgcaggcaacgttgtgactagcgatattgcttacgcttttggtacaccaccaaatgatgccgaagcaataaaagtgcgtcatggctgtgcattaggctctttagttggcaaagatgaaaatgtcgaagttccaagtgtcggaggtagaccaccaagaagtctacaacggcaaacacttgctgaggtgattgaaccgcgttataccgagcttctaaatcttgttaatgaagagattttgagtgttcaggaacaattacgtcagcaaggaataaagcaccatttagcggcaggtattgttttaacaggtggtgctgcacagatagatggacttgttgaatgtgctcaacgtgttttccacacgcaagtacggatcggtaaaccgttaaatattaccgggctaacagattatgcgcaggatcccttctattctacggcagtcgggcttttgcattacggtaaagaatctcactttggtgaggaaactgaaaccgaaaaacgctctgcagttagtggttggctaaaaaaactcactggctggttaaaaagagagttttaa

SEQ ID NO: 294078 - DNA, 1167 bp, Proteus mirabilis
atgtttgaacctatggaattaaccaacgatgcggtgatcaaagtcatcggcgttggtggcggcggcggtaatgcggttgagcacatggttcgtgaacgtattgaaggcgttgatttcttcgcggtcaatactgatgctcaagcattacgtaaaacagcagttggacaaactatccaaatcggtaatgccattacgaaaggcttaggtgcaggtgcaaaccctgaggtaggccgtaatgctgccgaagaagatcgtgaagcgttacgcgctgcactagaaggtgcggatatggtatttatcgctgcgggtatgggcggtggtacaggtacaggtgctgcgccagtcgttgctgaagttgcgaaagagttaggtattttaacggttgctgttgtgactaagccttttaattttgaaggcaaaaagcgtatggcatttgctgagcagggaattactgagttatctaagcatgttgactcattaatcactattccaaatgacaagttgctaaaagtactcggccgtggtatttcgttacttgacgcatttggtgcggcaaatgatgtattaaaaggtgctgttcaaggtatcgcagaactgatcactcgcccaggtttgatgaacgtcgactttgctgacgtgagaacggtgatgtcagagatgggttatgccatgatgggatctggtgcagctaaaggcgaagatcgtgctgaagaagccgctgaaatggcgatttcaagtccattactggaagatatcgacctgtctggcgcacgtggtgtgttagttaatattacagcaggctttgatttacgtcttgatgagtttgaaaccgtcggtaacaccattcgtgcatttgcatcagataacgccacagtggtgattggtacttctcttgaccctgaaatgaacgatgaactgcgtgttactgtggttgctacaggtatcggcatggataaacgtccagaaattacgctggtaactaataagcaaaatcaacaaaacgctatggaaaatcgttatcagcaaatgcaaaatagcatgtcctctttctctacagtagaagagagcaagcctgcagctaaagcggttaatgaacaatctactcaagctaacaaagagccagattatttagatatccctgctttcttaagaaaacaggctgattaa

SEQ ID NO: 294079 - DNA, 921 bp, Proteus mirabilis
atgatgatcaaacaacggacattaaaacgaattgtacaagcaactggtgtggggctccacacgggtaaaaaagttacgcttacaatgcgtccggcgccagctaatactggggtcatctaccgtcgtactgacttaaatccaccggtggattttccagcagacgcaaaatcagttcgtgacactatgttatgtacttgcttagtgaatgaagatgatgtgcgtatatcaaccgttgagcatttaaatgcagcactggctggtttaggcattgataatatcgtaattgaagtggatgcacctgaaattcctattatggatggcagtgcagcaccttttgttttcttattgcttgatgcaggtattgaagagcttcgcactgcgaaaaaattcatccgtatcaaggaaacagtacgtgttgaagatggcgataaatgggcggaaatgcgtccttataatggttttaaattagattttactatcgattttaaccatcctgctatcgatgcaagtactcagcgttataaattagatttctctgctgaatcctttatgagtcaaataagtcgtgctcgtacatttggatttatgcgtgatattgaatatttacaatcgaaaggattgtgtttaggcggtagctttgattgcgctatcgtggttgatgactatcgtgtcctcaacgatgatggtttacgttttgaagacgaatttgttcgtcataaaatgttagatgcaatcggtgatttatttatgtgtggctataacattatcggtgaatttaccgcgtttaaatcaggtcatgcactaaataataaattgcttcaagctgttttagcaaaagagtctgcttgggaattcgtcacctttgaagacgaagcgaaaatgccagtggcatttaaagcgccatcgacagtttttgcttaa

SEQ ID NO: 294080 - DNA, 519 bp, Proteus mirabilis
atgcgggatagctacccacaatcattggaaaacatcctaaaagagcttgaaggttccaataaaagcacattacagcttatacaacagcgtgcaacaattttactcaaattaaatcgtaccgtcatggcacttttaccagcaccgttacaaggtaaatgccgtgtcgccaattatcgcaatgctattttaattattgaagtcacaaacgcaagttggatgacccgattacgttatgaaattccatcattactttctgcattaagaaaggaaattttaccatcgttatcctcaatagacatcaaaataaatccttctttaagcataaaagcgggaaaaaagagtgtcacttcatcattaaaagatccaacacccgtaaaaaaacgccatttaagtgtagagagcgcacaatcattgaaatatttggcagagaaaagcccgaagaaattaagagaaagattagaacggttggctgcacttgccggagagagtacaagtacagccaaagatgacgctaattag

SEQ ID NO: 294081 - DNA, 528 bp, Proteus mirabilis
atgagcattataaatttttggcgacaatttggcagacgatatttttggtcgcatctgctattagggatggtagcagcaggtattggtatgccttcgctggtgtctgcccatgctgaaaatccatcacaaacggatacaccttcctcacaaaatcgtcaaagccaagcattaatcgcttttgataatttattcttacgccagagtgtacagaatcctgcttcatccttcacctttaattactggcaacagcatgccgttaaaaatgtgattaagcagctctcttttgcttttaccattcattcacctgaattgatggtaaaagcaaaagatgagccatcacctgttgcgaatgttgctgaggtcatgcttgatacgctttatgcgttactgactcaagcgccatcttctaccctggttaatttaccgatttcccgtggcgtattaacggaaaatcgtatttcctatcataccggattatggcttgctcagatccgcggtatccgtgctggaccttacctaacagcttaa

SEQ ID NO: 294082 - DNA, 2709 bp, Proteus mirabilis
atgttaggtaaaattgtaaccaaaatttttggtagtcgtaatgaacgcgctattcgtcgtatgcgtaaagtggttgctcaaatcaatcaactagagccagaatttgaaaaattaaccgacgatgaattgaaagccaaaacagatgagtttcgtgagcgtttaaaaaaaggtgaaaaagaagaggatattttacctgaagcttttgccactgtacgtgaagcgagtaaacgtgtttttggtatgcgtcactttgacgtacagcttattggcggtatggtactaaatgatcgctgtatcgcagagatgcgtacaggggaaggtaaaaccttaactgcaacactgcctgcttatttaaatgcgctatcaggtaaaggggtgcatgttgttaccgtcaatgactatttggcgcaacgggatgcggaaaataaccgcccactatttgaattcttagggttaagtgttggtatcaacctccctaatatggcaccaccagcaaaacgtgaagcttataacgcagatatcacttacggtacaaataacgaatttggtttcgactatttgcgtgacaatatggcgtttagccccgaagagcgtgtccaacgtaaattacactatgcattagtggatgaggttgactccattttaattgatgaagctcgtactccactgattatttcagggcctgctgaggatagctctgaactttatattaaaatgaataaagttattcctcatttagtgcctcaagaaaaagaagattcagataccttccaaggagaaggggattactctgtcgacgaaaaaacgcgtcaagtgaatattactgagcgtggcttagttaaaattgaagggttattagccgaagcaggtatgatgaaagagggcgagtcactttactcacctgctaacatcatgcttatgcaccatgtaacggcagccttacgtgcccatgcattatttacaaaagatgttgattacattgttaaagatggcgaagttatcattgttgacgaacataccggtcgtaccatgcaaggtcgtcgttggtcggatggtctacaccaagcggtagaagcaaaagaaggtgtgaagatccaaaatgagaaccaaacattagcgtccattacattccagaactatttccgtttatatgagaaattagcggggatgaccggtactgcagataccgaagcttttgaatttaactctatctaccgtttagaaactatcgttattccaactaaccgcccaatggtacgtaaagatttacctgatttagtttatatgaatgaaaaaggtaaatttgccgcgattattgaagatattcgtgaacgtactaaaaatggacagccggtactggtggggaccatctcgattgaaaaatctgaagagatctcccaagcacttacaaaagcgaatattcatcataatgtcctgaatgccaaattccatgctatggaagcagatatcattgctaatgcggggttaccatcagcggtgactatcgcaactaatatggctggtcgtggtaccgatatcgtattagggggaagttggcagactgaagttgcgaagctggaaaatccaacagaagagcaaattgaagagatcaaagcacaatggcaaaaacgccatgatgcggtattagcttctggtggtttacatattattggtactgaacgccatgaatcacgtcgtatcgataaccagttacgtggtcgtgcggggcgtcaaggggatgagggttcttctcgtttctatctgtcaatggaagactccttaatgcgtatttttgcctctgataaagtatcaggcatgatgcgtaaactgggaatgaacgaaacagaagctattgagcatccatgggtaactaaagcgattgctaatgcacaacgtaaagtagaaaaccgtaacttcgatattcgtaaacaattacttgagtatgatgatgtagccaatgatcagcgtcgagctatttatactcaacgtaatgagttgttagatgttgctgatgtcagtgaaactatcgacagtattcgccaagatgtgtttacttcgatgattgataactatattccacctcaatcattagaagagatgtgggatattgaaggtttaacggcctgtctgcaaaatgactttgatttaaatttacctatcaaagagtggttagataaagagcctgaactacacgaagaaacactgcgcgaacgcattttagaaaaatcaatcgaagtctataaagcaaaagaagagattgtcagtgctgaaatgatgcgtaactttgaaaaaggtgtcatgttacaaacactggattcactgtggaaagagcacttagcggcgatggattatctgcgtcaaggtatccatttacgtggttatgcacaaaaagatccaaaacaagagtacaaacgtgaatcttttgctatgttcgctaatatgttggaatcactgaaatatgaagtgatcagcacattaagtaaagtacaagttcgtttacctgaagaagttgaagagttagagcgtcgtcgtcgtgaagaggcggagcgtttagctaaacagcaacaacttagccatgaagtgacaaaagaatcacaaatgtcagccgttgatggccaagtggcatcaggcaaaaaagtgggtcgtaacgaaccttgcccttgtggttcaggtaaaaaatataagcattgtcacggtaaattaggttaa

SEQ ID NO: 294083 - DNA, 408 bp, Proteus mirabilis
atgaatattggtcaagctgcaaaaaaatccggtatttcaagtaaaatgatccgatattatgagcaaattggtttaatacctaaggcaattcgtactgacggaggttatcgcgattacaatgatagcgatgtagattgttttcgctttatccgccattcacgtgctcttggtttttcaacagagcaaatatcaacattattagttttatggaataacagagaacgaacaagtgctgatgtaaaagctattgccctttctcatatcgatgaattaaaccgtaaaatagcgcaattgcaacgaatgacgcaaacattatcgcatttagcacaagagtgccaaggtgataataatcctgattgcccaattattgctaagctagtcgaaccccaaacagggacagaatattaa

SEQ ID NO: 294084 - DNA, 2490 bp, Proteus mirabilis
atgaatacacctacaacattatcctcagcaaataggctgagcttacctgtagaaggtatgacatgtgcttcatgtgtcggacgtgttgaacgagcattaaaggcagtacctgaaataaaagatgctgtcgtgaatcttgcaacagaacgtgctgatattacatttagcagtacccccaatcctgtacttgctgtaagcgcgattgaaagctctggctataaagttcctgaagagatcactgaattagctattgaagaaatgacctgcgcttcctgtgtcgggcgtgttgagaaagcattagctcaaattcctggtgtattagaagccaccgtgaatcttgccactgagcgtgctcgtgtgcgtcatttatccggcgtagtatctattactgatttagaagtggcggttgtccatgccggttataaaccacggcggctatcagataatccagccaatactcgtgatttaagtgaagagcgtcgtgaaaaagaagcccgctcgttacgccgagcattacttattgccactatcttcacattaccagtgttcgttattgagatgggctcacattttatccccggagtccatcattgggtaacgcgaacattagggcaacagctcaactggtatattcaatttgttcttgccaccatagtgatgtttggccctggcttacgctttttcaaaaaaggaatacccgcattattacgcggtgctcctgatatgaactcattagtatcagtcggtacagtagccgcttacgggtattctgtcgtttcaacctttataccccaagtcttacctgcaggtacggcaaatatctattttgaggctgctgtcgtgattgttaccttgatcttattagggcgaaatcttgaggcaaaagccaaaggaaatacctcacaagcgattaagcgtttagtgggtcttcaagccaaaacagcacgtgtttcacgtcatggtgaaatactagaaattccattagatcaagttatgatgggcgatatcgttgttgttcgtcctggtgaaaaaatccctgttgatggtgaggttgtagaaggccattcttatgttgatgagagcatgataaccggtgaacccgttcctgtagcaaaagagataggggctgaggttgtcggtggcaccatcaataaaacaggcgcttttagttttaaagtgaccaaagtgggtgccaatacgatactcgcacaaattattcgcttagttgaggaagctcaaggttcaaaattaccaatccaagcgcttgttgataaagttaccatgtggtttgtgcccgcagtaatgataggtgcaacgatcacattctttatttggctcgcatttggtcctgagcctgcactaacctttgcgctcatcaatgctgttgcggtactcattattgcttgtccgtgtgcaatgggattagcaacaccaacatcaattatggttggcacaggacgagctgctgaattaggaatacttttccgtaaaggtgaagctttgcaagccttacgtgatgttagtgtggtcgcactcgacaaaactggtacattgacaaaaggccgccctgagctaactgatctgatcccagcagaaaaatttgaatataacgagatattaagtcttgtcgcttcaattgaaacttattcagaacaccctattgcacaagcaattgttaatgcagcaaacgaggcaaaattaacgcttgctagtgtggataattttgaagctattcctggttttggtgttagtgcaacagttgatggaagatctgtctctgtgggtgctgatcgctttatgaaacagcttgggttagatgtcagtcagttcgcttcatccgctcaaaaattaggtgagcaaggtaaaacaccactgtataccgccattgatggccgtcttgctgcgattattgccgttgcagatccaataaaagaaacaacacctgaagctattaaagcattacatgcattaggtttgaaagtagcaatgatcacaggtgataacaaagcaacagcaaaagcaatagcaaaacaacttggtattgatgaaatagttgcagaagtccttcctgatggaaaagttgcagcattaaaacaacttagtcagaaaggagataaagttgcatttgtcggagatggtatcaatgatgccccagctcttgcacaagctgatgtaggattggcaattggtacaggaactgacgttgccattgaagctgctgacgtagtactaatgtcaggtgatttacgcggtgttgttgatgcgattgcacttagccaagcaaccattcgtaatatcaaacaaaacttattctgggcatttgcttataacgcattattaatccctgtcgctgcgggcatgctttatcctatcaatggcatgttactttcgcctatattcgctgccgcagcaatggcgctttctagtgtatttgttttaggaaatgcactacgactaaaacgttttcaagcgcccatgaaaacacattaa

SEQ ID NO: 294085 - DNA, 4734 bp, Proteus mirabilis
atgaaatcaaaaaactttaaactttcaccctccgggcgacttgctgcgtctttagcaataatttttgtctctcttaatgcttatggcaatggcatcgtgcccgatgcaggccatcaagggccggatgtctctgctgttaatggtggtacgcaagtgattaatatagtcacgccaaataacgaagggatttctcataaccaataccaagacttcaatgttggcaagcctggggctgtatttaataacgcattagaagcgggacaatctcaacttgcgggtcatttaaacgctaacagcaatttaaatggtcaagctgcctctttaattttgaatgaagttgttagccgcaacccatcattcttattaggtcagcaagaggtctttggtatcgctgctgaatatgtgctttctaacccaaatggtatcacatgtgatggttgtggttttataaataccagccgctcttcattagttgttggtaatccgctctttgaaaatggtcagctaaaaggctatagcaccctcaacaacaccaatttactatcgcttggtaaaaatggcttaaatacaacagggttgttagacttaattgctcctcgtattgatagtagagggaaaatcactgccgctgaaatttcagcctttactggacaaaacaccttctcacaacattttgatattctctcttcacaaaaacccgtttcagcattagatagctatttctttggtagtatgcaatcgggtcgtatccgcattattaatacggctgaaggtagtggagttaaattagcaggtaaatttaccgcagataacgacctaagtgttaaagccgataatattcaaacagatagtcaagtccgttatgacagttacgataaagatggcagtgaaaattaccaaaactatcgtggcgggatcacggttaataatagtggctctagtcaaacactcactaaaaccgaattaaaaggtaaaaacatcacattagtagcgagtagccataatcaaatcaaagcctctgatttaatgggggatgatatcactttacaaggtgctgatttaactatcgaagggaaacaactacagcaaaaagagaccgatattgataatcgctggttctactcgtggaaatacgatgtgactaaagagaaagaacaaatacagcaaattggtagccaaattgatgctaaaaataatgcgacattaaccgcaactaaaggagatgttaccttagacgcggctaaaattaatgcggggaataaccttgcaattaatgccaataaagatatccatatcaatggattagttgagaaagaaagtcgtagtgaaaatggcaataaacgtaatcatacttctcgcttagaaagtggtagttggagtaacagccaccaaactgagacgttgaaagccagtgaattaacggcaggtaaagatcttggtttagatgctcaaggctcaataacggcgcaaggtgctaaactgcatgcgaatgaaaatgtgctggtcaatgccaaagataacattaatttaaacgtccaaaaaaccaataatgataaaacagtcaccgataatcatgttatgtggggaggtattggtggtggtcagaataaaaataataataatcaacaacaagttagtcatgcaacacaattaaccgctgatggtcaattgctccttgctgcagataacaatgtcaacattaccggtagccaagtaaaaggcaaccaaggtgcttttgttaaaaccacacaaggtgatgtcgtcattgataatgcgctgagtgaaaccatcagtaaaatcgatgaacgcacaggaaccgcgtttaatatcactaaaagttcacataaaaatgaaactaataaacaaacatctacaagtagtgaactcatttccgatgcacaattgaccgttgtcagtggcaatgatgttaatgtcattggtagtttgatcaaaagcgctgataaattaggtattcattctttaggtgatatcaacgttaaatcagcacaacaagtcactaagattgatgatgaaaaaacatcattagccattactgggcacgccaaagaagttgaagacaagcaatatagtgcgggctttcatatcactcataccaccaataaaaatactagtactgaaacagagcaagctaactcaaccattagtggcgccaatgttgatctgcaagcgaataaagatgtgacttttgcgggatctgatctaaagactaccgcagggaatgcctctattacgggtgataatgttgcctttgttagcacggaaaataaaaaacaaacggacaacacagataccactatttcaggaggttttagctacacaggaggtgtagataaagtcggttctaaagccgattttcaatatgacaaacaacatacacaaacagaggtaacaaaaaatagaggcagccaaacagaggtttcaggtgatttgactattaccgcgaacaaagatttgcttcacgaaggagcttctcaccatgttgaggggcgttatcaagagtctggtgaaaatattcagcatcttgccgtcaatgatagtgaaacatctaaaactgacagcttaaatgttggtatcaatgttggcgttaatcttgattatagcggtgtaacgaagccagttaagaaagcaatcgaagatggtgttaacacaaccaaaccgggtaacaataccgatttaactaaaaaagttacagcaagagatgcaattgctaatttagctaaccttagcaatttagagacccccaatgtcggtgttgaagtgggtattaaaggtggtggtagtcagcaatcacaaaccgatagccaagccgtttcaacctctatcaatgcaggaaaaatcaacattgatagtaataataagttacatgatcaaggtactcactatcaatcaacccaagaaggtatttctctcacagcaaacacccacacaagtgaggtcgcgcaagataaacatcaaacgacattccatgaaacaaaaggcggtggacaagttggtgtcagtaccaaaacgggcagtgatattaccgttgctattaaaggtgaaggccaaacaactgataacgccttaatggaaacaaaggctaaaggtagccaatttacctcaaatggcgatatttcgattaatgtaggtgaagatgcccattatgaaggtgctcaatttgatgcacaaaagggcaaaacagttatcaatgcggggggtgatctcactcttgcacaggcgactgatactcatagcgaaagtcaatctaatgttaatggtagtgcaaatctgaaagtgggcaccacgccagagagtaaagactatggtggaggtttcaatgcagggaccactcatcacagcaaagagcagactaccgcaaaagtgggcgctatcactggctctcaagctattgaattaaacgctgggcataacctgactttacaaggtactcatttaagtagcgaacaagatattgcattaaatgcaactaataaagtcgacctacaatcagcgagctctgagcgtactgaaaaaggcaataatttatctggaggagtacaagcaggttttggtaaaaaaatgaccgatgatgcttcatctgtgaatggtttaggtagtgcccaatttgctattggtaaacaagatgagaaaagcgtatctcgagaaggaggaacgattaataactcaggaaacttaacgattaatggcaatagcgtccatcttcaaggagcacaagttaatagtaaagatactcagttaacatcacaatccggtgatatcgagatcacatctgcgcagtctactgattataaaaacaattggggaacagatattggctttaatggcaaaaaaaccagtaccaccccaaaagaagttacagaggagaaacctgctacctctattcataacatagggggtaaattactggttaacgtggaagatcaacaaaaaacgagccaccaaaatgcaaccttagaaacaggtacattaacgattaatagtaataaagatctgacactatctggtgctaatgtgactgctgatagcattacgggtaatgtcggtggttcactcaatattgctagccaaaaagagagtgatcgccatgtcactgttggcgtcaatgttggctataaccacaccaatgatcctaaatcaagccaagtgaataaaacggctaaagccggagggtcattattagagaaaactatcaaagatacgattgattcaggaattaaatcatcaaccgatgctatctctgataaatacaattccctctcttcaactattgcagataaaacaggtatcagtgatgaaactaaagccaaaattgatcaaggttttggtaaagttggtaatggtattaagaatatcgtcacaggtgctgaaggtcatactgctaatgcagatatcaaagtcactcatgtagataatgatgctgtcactaaaaccacctccttaactagcaacaacgacctatcattaaatgtgaatggctcgacaaaactcaccggagcagaaattgcgagtaaacaaggccaagttgatttagggggaagtagcgttaaattagaaaatattgaaggacatcattatgaagccggcgctgatcttggtctgaaatcctctgtggtggatttagcaaaacaactggtaggtggagatatttcttttaaatcccccgttaaaacgaatgaaaccgtcaatacaaaagcatctatttctgaaaaatag

SEQ ID NO: 294086 - DNA, 1686 bp, Proteus mirabilis
atgaaaaaaaaagttgttttattaacactattaagctgtttttctaccagtggattaagcgcaaatgaaacaggaaatttaggctcaatcagtgaatcaaggcgtgcattgcaagatagccaacgtgaaattaatcaattaatagaacaaaatcgctatcagcaactgcaagaaaaagcggtaaatatttcacctaccccaactttaattactgagtcagaacactgtttgcctataaaaggcgtttatattcaaggtattactttacttactgagaaggatctcaattcattatctccgttacctgatcaatgtattaagagtgctgatattaatcgcctcgtgaaagaactcactcagcgttatcttcaacatggttatattaccgcgcgtatccaatttttacgtcctaaccaacatggcgaattaggtctgtatgctattgaagggtttgttgaacgtattgaaggaggtgatcgaggtgttaacaccacactactatttcctcgaatcaaagggcaaccattaaaactcgctacactcgatcaaggcttagatcaagctaaccgtttgcaatcaaataaagtcacagtggatattcttcccggtaccgaattggggggctctgtcattaagttgtctaatcaacgaaaatcaccttggcatctcaatatcgctagtgacaattatggacagaaaaattcaggccgctggttaatacgaacgaatgctagtttagatagcccattaggtttatctgattttgtaagcttaaatgccaatataaccacagataacccgaatacccgttttaatcgtgcttatactttgctctattcaattccttatggtggttttacttttagctcttttggtagttattcggagtaccaatttcaccaaaaattacaaacacgtactgtcagcttatatggcgataccactcaagtaggtattagaggcgattatgcttttagtcgtagccaaaaacaaattgataccttaaatattcaagtcactcataaacgtatacgcaactactttagccaaattcgtttagatctcagtagccctaaattaaccacgattgaattagggattaatcatttgcagattattccaaatggcgtattgagcactaatttaagtgttgaaaaagcggtcggctggtttggtgcagaggaaacaccctatatcgctaacggtaatggtaacgactatcgctttacaaaagttaagctatttgccaattggtatcaacgcttttctctatggcattctacatttttattcaatagtacttttttaggccaatacagccacgacacactccccggcgttgaatggctaagtttaacagacaaaaacgctattcgtggttttgatcaaagcacactttctggtgataacggtggctatttacgcaataccctctcctatccctatcgacttaaccacttctctatcacacctcgtataggggtagatatcggtcaagtaaaacaacatggcaactacaaaggatggcaaggtggttacggcctaagctccggcttaaatattcaatatcaacaagcacaactcgaccttgaagttgcaaaaggcgagttactgtatcaccaaacaaattccaataaaaccaaagatcctactcaactactggttaaattttcatacttattttga

SEQ ID NO: 294087 - DNA, 1308 bp, Proteus mirabilis
atgtcattaacaaaaattgttatagtcggtggtggagctggtggattagaactagcgactaaattgggtgataaattagggcgcaaaaaaaaagcagaaattacccttgttgatagaaataatagtcacttatggaaacctctgttacatgaagttgccacaggctcattagatgatggtgttgatgcattaagttatctcgctcatggttataaccatcactttaattttcaattaggcactttaacagggcttgatcgccaacataaaaatatcactttggctgctatttatgatgaaaatcaagagctattagttccagagcgtcaactcgattatgatattttagtcatggccttaggcagtaaatctaatgattttggcaccccagggatcaaagagcactgcatctttttagatagcccacagcaagcacaccgttttcataatgaaatgctcaatttatttttaaaatattcagcagactccaacgcagaagctgaaaatcgtaaagtaaatattgcgattgtgggtggtggtgcaactggagtggaattatctgccgaattacacaatgctgttcgccaactcaatagttatggtttaaaaaaattagcgccatcagcccttaatatcacgcttgttgaggcgggtgagcgaatattacctgcattacccgtgcgtatttcaagtgcagcacatcaagagctgactaagttgggtgtgcgcgtgatgacgaaaaccatggtaacaagcgccgatgaaaaagggttaaataccaaagatggcgagcatattgatgctgatctgatggtttgggctgcggggatcaaagccccagactttatgaaagatatcgctggattagaaaccaatcgtattaaccaattagtcgttaagccgacattacaaacaacattagatgatgcgatttttgcgattggtgattgtgcatcctgtccgcgaaaagagggaggttttgttccgccaagggcacaatccgctcatcaaatggcaagccgttgttatagcaatattttagccatgttaaagggtaaaacgttaaaagaatatgtgtttaaagatcatggctcgttagtttcgctctctaaatttagtacggtagggagtttgatgggcaacttaatgaaaggcgatatgatgatagaagggcgtattgcacgtatcgtttatatttctttataccgtatgcatcaaatcgcgttacatggttatcttaaaacgggtttgatgatgttagttggatcaatcaatcgtgtgattagaccaaaactaaaacttcattag

SEQ ID NO: 294088 - DNA, 546 bp, Proteus mirabilis
atgattatatatttacatggctttgattccaccagtccgggaaatcatgagaaggtattacagctacagtttattgatcctgatgtccgttttctcagttacagtacgttgcatccacgtcacgatatgcaacatctactcaaagagacggataaactgattaaatcgacaaaacagccggtgctgatttgtggtgtaggattaggtggctactgggcagagcgtatcggttttttatctaatattcgccaagtaatgattaatcccaatctttttccatatgaaaatatgactgataagattgatagacctgaagagtatttagatattgccactaagtgtattcaagatttccgctctaaaaatagagacaatgcattagtgattttatcccgtcatgatgagattttagataaccagcgttctgctgatgagttatcaccttattattcgattatttgggatgaaacgcagacacataagttcaaaagcttgtcagaacatctttttaaaattaaagcatttaatagcaaaatccccgcttaa

SEQ ID NO: 294089 - DNA, 1020 bp, Proteus mirabilis
atgggtcctgtaatgcttgatgttgaaggatatgagctcgataacgaggagcgtgaaattttaaagcatccccttgttggtggtttgatcctttttacccgcaacttccacgacgctgagcagttaaatgaattagtgcgccaaatccgtgatgcttcccatgagcgtttagtgattgccgttgaccaagaaggagggcgagtacagcgctttcgtgatggttttactcgcttacctgccgcgcaatcttatgctgcgcttaatgagcgttatcaagctagtcgcttagcacaagaggccggttggttaatggcatcagaaatgatcgcaatggatattgatattagctttgctccagtcctagatcttggtcatgactgtattgctatcggtgagcgctctttccatgagtgtccagaaattgctatggatatggcggaaagctttattaaaggaatgcgctctgcaggtatgaaatcaacaggtaagcattttcctggtcatggtgcagtcagagccgattcccataaagaaacgccacgtgatgagcgctctttaaacgatattcgtcaacgtgatatggctatctttaaagattttatccaacgtcaattattagatgccattatgccagctcatgttatttattctcagattgatgagcgtccagcaagtggctctccttattggttgaaatcaattttacgtgaacaactcggtttccaaggcgttattttctctgatgatttatctatggaaggtgccgctattatgggaagttatgcgcagagagcgcaacgttcattagatgcgggttgtgatatgcttttagtgtgtaataaccgtaaaggggcggtaagtgtgttagataacctgtcctttgtcaaagcagaacgcatttcggcgttgtaccatcaccgaggtcgttacacattaagtgaactgcaagcatctgatcgttggaaaaaagcgaatcaaatgctgacccaattacaggagcaatggcaggagcgcgcatga

SEQ ID NO: 294090 - DNA, 912 bp, Proteus mirabilis
ttgagtaagtcttatcaacaacagttattgagcctattgcgggaatggtttcccgcaatacccttatcacagtggcaaataaccgccttagcgggattagggggcggtacttttcgtttgcaaagtaatgggatagattgggtcgctcgttattatggttctgaaaaaacggcactttttgtcagggctaaaaaagagtcttcgattttaaaacagctattaaatactcagcttgcaccaaatattattaaacgccatggtgcatggttttttttccagtggctagagggtgagcatcttactcatcagcagttatttggctcccatatcaaattattagctcatcaaattgctaagttacatcagcaaaaaccttttgggcttcctcttgatttgtggcatgaactttcagtctattggtatcatattgacagaaaacgattatcaccaaagtggttacgtttacatcacgattttttacgtcaacctcgacgtacactcataaaatacgcaccagctcacatggatcttcatcctgagaatattcttctgagcgattcaggtataaaatttattgattgggaatatgccgctgatattgatacggcagattcattaatgacattttttgccgcaaatcagttaaacagcgcacaacaaacagcatttttacatgagtattgtgcatatcatcactatactgaattaaataatgatcagcaaaataggcagcacccacaacagcagtcgttttattcggttaacgtattaaagcagcgtattttatcaagagaaccctttatcttgtatatgatgctgatgtggtatgaggttcgttggcaacaaaccaaagataacgcgtttttggctatgtctgaacctttacgtcgttattttagtctgatgaattga

SEQ ID NO: 294091 - DNA, 582 bp, Proteus mirabilis
atgaaaaaaatgctatttgtggtggcagcggtatttttactggcaggttgtccatcgatgttaccacaacaacccccagcacctgtagagcctgttactcccacagagccaacagagccacctaaacctatcgagccacccatagaggttgtaccaacaccgccaaaaataaccagtattaattggaacgcggccattcagccattaattagagagatgtctgtcacggatgatttagcaactggcaaattattagtggttgataatgtaaaaaataattcgggcggaaacatccaagcggttaatgctactaacacaattatcgactcggtaaatagtattagtgcattacaaacagttccttatgcacaaatgatgtcagcaagaaaagcattaggactatccggtgaagatagcttaggattgcgcagtgcggcaattggtttagcgcgttatttgcaagcagactatattttgttttctactgtcgatggtaagaaagataatcgtgtgatcagcatgcaattaatgtcggttgcgagcggagaaatactctggagcgggcgccataaggttgagtaa

SEQ ID NO: 294092 - DNA, 402 bp, Proteus mirabilis
atgataaaacaagctaaaagggtttattcattacttatagtattgttgatgacaacgttattggctggatgttttgcgtctcattcagacaataaactctattttaatcgtcaacaatctattgtgatggagccgtcggttttagctgtaggtattgtggcaggcaaaccattattaacgcgtaatgaacaggggagtcgcgccacggtgacgttatcgaatacgcgatcttatcctgtctctattcgttatcgtttttattggtataacgagcaaggactggaaatttcgccggcaggccgcgtaaatgatgtaatgattttgggcgatggtgatactgagatcagtgctgatatacccaataaaacagtaagttatgtcagagtctatctctttacttag

SEQ ID NO: 294093 - DNA, 351 bp, Proteus mirabilis
atggcagaagagacaatttttagtaaaattattcgtggtgaaattcctgaagatatcgtttttcaagatgatactgtcactgcatttcgtgatatttcaccccaagcgcctactcatattttaattatccccaataaacttattccaacggtaaacgatgttactgtacaagatgaacaagttttaggtcatctatttgttgtggcagctaaaattgctcagcaagaaggtattgcagaagagggatatcgtttagtaatgaattgtaataaacatggtgggcaagaagttttccatattcatatgcatcttttaggtggaaaaccattagggccattattaagcaaataa

SEQ ID NO: 294094 - DNA, 786 bp, Proteus mirabilis
atgtttttagttgattcacactgccatcttgacagcttagattatgaaaaactgcacaaaaatattgatgatgttgtagaaaaagcacaacagcgtgatgtcaaatatatgttagctgtcgcaacaacattacctggctttaaaaatatgcgcgaactgatcggcaagcgtgataatgtggctttttcttgtgggattcacccattaaaccttgatgagggacacgatgtcgctgagcttgcgcgccttgcagctgaggccgatgttgttgcattaggcgaaacaggtttagactactattatcaacaagaaaatgcgtcacttcagcgtgaaattttccgtgaacatattcgcattgggcgccaagttaataaacctgttattgtacatacgcgtagcgctcgtgaagatacgctaactattttaaaagaagaaaaggttcaagactgtggtggtgtattgcactgttttacggaagataaagaaacagcaatggcgctacttgatcttggtatgtacatctctttttcaggcattgtgacatttagaaatgccgagcaaattagagaagctgcacgtatcgtaccacttgatcgtattctggttgaaacggattcgccatatttagcgccagtgcctcatcgtggtaaagagaaccaacccgcttatgtacgtgatgttgctgagtatatggccgtattaaaaggggtgagcatagaagagcttgctcagcaaaccacccgtaattttgcaacactttttcaaataccaaacctcgcagactaa

SEQ ID NO: 294095 - DNA, 987 bp, Proteus mirabilis
atgaattggtatccttggttaaatcaggcatatcgacaactggtaagtatgtaccaagaagggcgtggtcatcatgcgattttgttgcatgcatctcaaggaatgggggctgatgcactttcttatggattaagtcgttggttaatgtgtcagaataagcagggttcaaaaagctgtaatgagtgtcatagttgccgtttgatgttggcagaaacacatccagattggcatatcttgcaaaatgaaaagggaaagtcatcaatagggatcgaagcggttagaaaagtcaccgaaaagcttgagcaccatgcacaacaaggtggctcacgagtggtatggataaaagaggttgaggcattaacagaagcggcagccaatgcgttattaaagaccttagaagagccaccagttaattgctattttttattgaattgtcaacaacctgaaatattgctagcaacactacgtagtcgctgtttctattaccatttagcaccgcctgagatgaattatgcgatacattggctacaacaacagctacctaatatggcttatgccgatggtgtcacagcattaaacctatctcaaggtgcgcccgttttagcgttatcattactaaaacaagaatggcaagaaagggaagccttctgccaagcgttatatgttagcttacaacaacgaaatttatatgggttgttagctcagttcaatcaagataatgctgaacgtaagatctattggttattatcattactgttggatgctttaaaacgacaaactcatgctgaagtgtattgtgtcaaccaagataagcagccattaattatggcgttatcacagttgccttctgcaatgttgttagcggtgagcgaaagctggaaacagtgtcgccatcaattagttaccattccagcaatcaataaagagctattgttggcagaacagttacttgattgggaagcccagctagttgctctagggaaataa

SEQ ID NO: 294096 - DNA, 645 bp, Proteus mirabilis
atgaaaaacagcaaatttattgttattgaaggattagaaggggctggcaaaaccagtgctattcaaacggttgttgatacattaaaacaacaagggatcaccgatttggcctttacgcgcgagccggggggaactccgcttgcagaaaaattacgggaattgattaaacaaggtattgaaggcgaaaaagttaccgataaagctgaattgctaatgttatatgctgcacgtgtgcaactggttgaaaatgtgataaaaccagctttagcccaaggtaagtgggtgataggggatagacacgatctctcttcacaagcatatcaaggtggtggtcgaggaattgacaaagccctgatgaagtcactacgtgatacggtattagcagattttaaacctgatcttaccctttatcttgatttagatccggccgttggtctagccagagcacgagcacgaggtgaattggacagaatagaaaaagagtctatggactttttttaccgcactcgcgaacgttatcaagcattagcaaaagaagacgcctcgattattaccattgatgcatcacaagatattgataaagtacaagcggatattcgcgatgtactcaatcagtggctgactcaggaaaatagcgcattatga

SEQ ID NO: 294097 - DNA, 1023 bp, Proteus mirabilis
atgaagataaaaaaattagtttggatagccttttttgcattattgattagcgctggcgcagccacattatatattatgcaaagccttcgtgggttagagaacaatgttgtggtaaagcaagatgaaatgctgcttactgttccggcaggaacagggcgtattgcgatggaacaattgcttattaagaataatctccttaaacaaggagattattttcaaattttattaaaagtaaaaccagaactcagtcaatttaaagcagggacttatcgtttaacaaaaggtatgacactgcgagatgttttgctgttaataaaaagtggcaaagaggcgcagtttacgattcgatttatcgagggtagccgtttaagtgattggcaagctatttttgataaagcccctgagttaaagattgtcgcaaatggtatggaaagcgataagttacgccaagagataggaatgaagcctgaaattacccatcttgagggttggtttgctcctgatacttaccattacactgcaggcacgacggatattgccattttaaaacgtgcttatcagcaaatggaaaaaacattagaagaagagtggctaaaacgcgatagtgatttaccctataaatctgcctatgaaatgttgattatggcatcgattattgaaaaagagactggcattgatgcagaaagaactaaagtggcctcggtgtttgttaatcgtttaaaacgtaatatgcgcttacaaactgatcccactgtgatttatgggttaggtgataaatatcgcggtacaatttatcgcagtgatcttaatggctatacgccttacaatacctaccaaattgatgggctaccgccaacaccgattgctatgccaagtgttgcttccattaaagctgcagcacatcctgcggatacacgttatctctattttgtcgcagatggcactgggggacataagttttctacaacgttggcggagcataataaagccgtcgcacaataccgacgcttacaacaaagataa

SEQ ID NO: 294098 - DNA, 828 bp, Proteus mirabilis
atgtattgggtaaatggacaacagcaacaaagcatcaatgtgagtgatcgcgcggtacaatttggtgatggctgttttacaacacttgccgttgaacaaggtaaacctattctattatctgctcaccttaagcgtttacaacgcggttgtgatgcactgtttttaccctcaccagactggcaatggttagccagccatcttctacaaatagcgtccacaatcactgaaaaaagtgttattaaggtgattattagccgcggaagcggtgggcgaggctattcatcgaaaggctttgacacacccacagtgatcacatcctgctcaacttacccgttttattatcataacttacaaaagcaaggggtttctttagccattagcccagtgagattgggacaaaatagtttattagccggtatcaagcatcttaatcgcttagagcaagtgctgattaaacaccatttagaaacaaccccatttgatgacatgttagtgtgtgacaatgaaggatatttagttgaagcgaatgccgcaaaccttttctggcgtaaaggaaatcaattatttaccccggatattagcctttcgggtgtgaatgggatcatgcgccagcaggtattagattttgcgcaacaattggactgggatattcacattgtgcgagaaaaaccgcaaacgctctatcaagcagatgaaatttggttaaccaatgcactgatgcccattattcccgtaaaacagatctatttttcagatgataagcactatcaatatcgcgatagagacgcttaccatgttgttttacaacactgtttgtcactgacttaa

SEQ ID NO: 294099 - DNA, 1242 bp, Proteus mirabilis
gtgtctaagcgtcgtgtagttgtgaccggactaggcatgttatctcctgtcggtaataacgcagaagcttcttggaaagctgtgtgtgccggacagagtggtatcggccttatcgaagaatttgacaccagtcatcatgcgactaaattcgcaggattggtaaaagatttcaatcatgaagattacaatctttcgcgtaaagatgcgcgcaagatggatctctttattcaatatggtattgcagcaggtgttcaagccattgcggattcaggtcttgaagtaacagaagccaatgcaagtcgtatcggagctgctattggttctggtattggtggcttaggccttatcgaggaaaatcattcatcattaatcaatggtggccctcgtaaaattagcccattctttgttccttcaaccatcattaatatggttgctggccatttaagcattatttatggcttacgtggaccgaccatttctatcgcaactgcatgtacatcaggtgtgcataatatcgggcatgctgctcgtattatcgcttatggtgatgctgatgtgatgttagcgggcggtgctgaaaaagcaacaacaccattaggtgttggtggttttggtgcagtacgtgcattatcaacacgtaatgatgatcctcaagcggcaagtcgcccatgggataaagatcgtgatggtttcgtgttaggtgatggtgcaggtgtgttagtcctcgaagagtatgaacacgctaaagcacgtggcgctaaaatttatgcagaagttgttggctttggtatgagtagtgatgcttaccatatgacctctcctgcagaaaatggtgcgggtggtgcacttgcaatggaaaacgcattgaaagatgcgggtattactgctactgatgtcggttatatcaacgcgcatggtacttctactaatgcgggtgatattgcagaagcgcaagctgttgaaacggtatttggcaaagggactgatgtattagttagctcaacaaaatcgatgacgggtcacttattaggtgctgccggggcgattgagtctatctttactattttgtctctacgtgaccaaattgtaccgccaacaatcaatcttgataatcaagatgaacattgtcaccttgatttcgtaccacataaagcgcgtaaagttgagaacatggattatgcactatgtaactcatttggctttggcggtaccaacggttcgattctctttaagcgtgtgtaa

SEQ ID NO: 294100 - DNA, 237 bp, Proteus mirabilis
atgagcactatcgacgaacgcgttaagaaaatcattgttgaacaactgggtgttaaagaggaagaagttgtgaattcagcttcatttgttgatgacttaggcgctgattctcttgacacagttgagctggtaatggctctggaagaagaattcgatatcgaaatcccagacgaagaagcagaaaaaattactacagttcaagctgctattgattacgttgaaaacgcaggtaaataa

SEQ ID NO: 294101 - DNA, 735 bp, Proteus mirabilis
atgggatttgacggaaaaatagcgctagttactggtgcaagccgtggtattggccgtgcgattgcagaaaagctaatagcatgtggtgctaccgtaattggtacagcaacgagtgaaaacggtgctaaagcgatcagcgaatatttaggcaataaaggtaaaggttttgtgttaaacgtcacagaaactgactctattgaaaaatttttagctgatgtgcgcgcggaatttggcgaaattgatattttggtcaataatgcaggtattactcgtgataacctgttgatgcgcatgaaagatgatgagtggcaagatatcattgacactaatctttcatcagtcttccgtctgtctaaagcagttatgcgtgctatgatgaaaaaacgttatggtcgcataattactattggttcagtagttggaaccatgggtaatgctggacaggcaaactacgcggcagcaaaagcgggtgtgattggttttagtaaatcattagcacgcgaagttgcttcccgtggcattacggtaaatgttgttgctcctggctttatcgaaactgatatgaccagagcgttaacagaagaccaaagagccggtattttatctcaagtgccagctaaccgtttaggtgatgccaaagagattgccagtgctgtagctttcttagcttctgatgaagcaggctatatcacgggtgaaacattgcatgtcaatggcggcatgtacatggtctaa

SEQ ID NO: 294102 - DNA, 933 bp, Proteus mirabilis
atgactgattttgcaatggttttccctggacagggatcacaagcgattggaatgcttgcagaacttgccgagcattatccaatagtgacagaaacatttgctcaagcatctgatgtattgggttattctctttgggatttagtgcaaaatggtcctgaagaagagttaaacaaaacatggaaaacacagccggcattattagcagcatccgttgctatttggcgagtatggcaagaaaagcaaggcaaaatgccacaaatgatggcaggtcacagtcttggtgagtattctgctttagtctgtgctggcgtaattgattttgctgcggcgattaaactagtagaattgcgcggtcaattaatgcaagaggcagtacctgcaggtactggcgccatgtatgcaattatcggattagataatgatgctattgcaaaagcttgtgaagatgcggctcaaggacaagttgtctcacctgtgaactttaactcacccggtcaagtggtgattgcgggtaataaagaagccgtagagcgtgcaggggcattatgtaaagaagctggagcaaaacgtgcgttacctttagcggtaagtgtgccttctcactgtgctttaatgaagcctgctgcagataagttagctgttgcattgcaagaaattgaatttaaacaacctgaaattcaagttgttaataatgttgatgtgaaagcacaaaccgatgctaatgctattcgagatgcattagttcgtcagctttataacccagtccgctggactgaaacggttgaatttattgctggtaagggcatcacacaattattagaaataggacccggtaaagtattaactggtttaacgaaacgtatttctaaagagatgaacgctgcggcagttaatgatattgcatcattagacgctgcattaggaaatgactga

SEQ ID NO: 294103 - DNA, 954 bp, Proteus mirabilis
atgtatacaaaaatcttaggtactggtagttacttgcctgtacaagtgcgaactaatgccgatttagaaaaaatggttgatacatcagacgagtggattgtcaccagaacaggtattcatgaacgtcgtatcgcaacagaagaagaaactgttgctaaaatgggcgcgagtgccgctgagaatgcattagaaatggctgatattgatagacaagaaattggcttaattatcgttgccacaacatcaggctctcatgcgtttccgagtgcggcatgtcaaattcaacacgccctcggtattgctgattgtattgcgtttgatgttgcagccgcgtgctcaggattcgtttacgcgttaagtatcgctgatcaatttattaaggctggtacggtgaaacaagctttagtgattggtgctgatcgcttatcacatgcgttagatcctaacgatcgcggtacaattattcttttcggtgatgctgctggtgccgtcgttgtcggtgcttctgaagagtcaggtattatttctacacatttacattctgatgggcgttttggtgagctgttagctctgccttatcaggatagagaaaatcaagacttacctgcttatgtcaccatggcagggaatgaagtctttaaagtcgcagttcgtgaacttgcccacattgtggatgaaacattagaagcgaatcatattgataaatcggaactcgactggcttgtgcctcatcaagcaaatttaagaattatttcagcaacagccaaaaagctggatatgacaatggataaagtcgtggtgacattagatcgccacggtaatacgtcagcagcatccgttcctacagcattagatgaagctgtaagagacaatcgcattcaacgtgggcagttaattctgttagaagcgtttggtggcggctttacttggggctctgcacttatccgtttttaa

SEQ ID NO: 294104 - DNA, 1008 bp, Proteus mirabilis
atgggcggggacttcggtcctcgtatcacagtgcctgcatgtttgcgggcgctggcatctaatcctcatttaaaaatattgctggtgggtcaaccagactctatctctcctctgcttgcaaatcaaaatgctgagctaatctcccgtttacatgttataccggctgaacatattgtcgccaatgatgccaaaccttcacatgctattagagcaagtaaaggcacatcaatgcgcgtggcactcgatctggtgaaaacaggggaagcacaggcatgtgtaagtgcaggtaacaccggtgtgttgatggggttagcaaaacttcggctaaaagcgattgatggaatagaacgtcctgcattggtttctgtgttacctaatcagaaaaaaagcaagaccgtcgttcttgatttaggcgcgaacgttaactgtgatagccaaatgttagttcaatttgctgttatgggggccgtgatggcagaagaaattgcaggtatacattcacctaaagtggcacttttaaatattggtgaagaagagagtaagggattagataatatccgcgaagccgccaccgttcttaaggcgacaccaaatataaactatattggttatgtggaaggtaacgagttactgaccggcaaaacagatgtgttggtgtgtgacggcttcgcaggtaatgtttcccttaaaacaatggaaggggtgattagagtcttcctttcattgattaaatcttctactggtgacaataaaaaaacgtcgtggtggatgaaattattgaagaaatggttacaaaaacgcctaaataagcgttttggccatatgaaccccgaccagtataacggtgcttctctgttaggattacgcggtatcgtcattaaaagccatggtggcgcaaatgaaaacgcgtttacagcagcaatagaacaggctgttcaggccattgagcgacaaattccagaacgaattgcctcacgtctgaatacagtattacccaagagtgattga

SEQ ID NO: 294105 - DNA, 171 bp, Proteus mirabilis
atggccgtacaacaaaacaaaccaactcgttctaaacgtggtatgcgtcgttctcatgacgcactgacagcaactcatgtttctgttgacaaaacttctggtgaaactcacctgcgtcaccatgtaactgctgacggttactaccgtggccgcaaggttatcaacaagtaa

SEQ ID NO: 294106 - DNA, 534 bp, Proteus mirabilis
atgcaaaaggtaaaattacccctgaccattgatgcgctgcgagcagcacagaagaatttagactatgacggtcaatattcctctgagcaagttagccgcttagctgaatcggtggtcagtgtggacagtaatattgatgtggctttatcatttgatattgaccatcaacgtttggcagtcatcaaggggcattccgatgtggatgtcactttagagtgtcagcgttgcgggggccattttccctatcatgttcacacaacatattgttttagccctgttgttagtgatgaacgggctgaagcattaccggaagaatatgagccaatcgacgtagacgattttggtgaaatagatttgctggcgatgattgaagatgaaataatcctcaacttgccggtggttccggtacatgattttgaacactgtgaagtgtccgacgcggaacaagtgttcggtgaactctctgaagaattatcagagaagccgaatccatttgccgtattagccagtttaaagaaaagtactaaggagtaa

SEQ ID NO: 294107 - DNA, 600 bp, Proteus mirabilis
atgttgccactggttcttgcgtcgacttcacccttccgagctcagcttctgaaaaagcttggaatgccctttatacaggcctccccaaacattgacgaaacccctttgcccacagagtgtgcacaagcgttagtcactcgtttatcctatgaaaaagcgcgtgctttagaggtacaatacccaaatcacttaattattggttcagatcaggtttgtgtactcaataaaaaaattacgggtaagcctcttaattttgaaaacgcttttgcacaattaaaacaagcatccggccaatgtgtatcattttatactggattaactttatataatagctcaacattagcctatgaaagtcattgtgaattatttcaagttcactttcggcatttaaccgatgatgaaattatcggctatttaaataaagaaacgccgttttattgcgcaggaagtttcaaatctgaggggttaggaattactctgttcgataaattaagcggtgatgacccaaattctttaatcggattaccacttatccgattgaataaaatgttactctcacaaagaattaacccattactttccacagataatcaggaatag

SEQ ID NO: 294108 - DNA, 399 bp, Proteus mirabilis
atgaataaattagcatcaattttggcagctttaatccttacggcatcggtagtaggttgctctgatgagaaagcacctgacaattcagccgtaaaagcagacaacagtagtaatgttgcccaaaatactgatcccaaaaaagaagatgaaagtgcatcttcatttaaaaagaactttattagtagttgcatactcggttctggtgtgactgatgatgcactaataccacaaattaccgaagtttgtagctgtacttacgataacatcatcaaagattatggtatgaccgaatttattcgcgttgatatggaaatgagaaaagacggctccaaatcgcttccgaaagagtggaatatcgataaaattgttgagcaatgtatatcaaccatcaccaaataa

SEQ ID NO: 294109 - DNA, 954 bp, Proteus mirabilis
atgaaatcatttaatcaagttcagttcgtcaccattgatggcgatgaggcaggccagcgtattgataattttttactggcacgcttaaaaggtgtaccgaaaagtatgatttaccgaattatccgcaaaggtgaagttcgggttaataaagggcgcattaagcctgaatataaattagctgcaggggatagcattcgtattcctcctgtccgggtagcagaaaaagaagaacatgcggtatcgcctaagttagagaaagtatcagcacttgctgagtgtattttatatgaagatgaacatgtgatgctgattaataagccatcagggacggcagtacatggtggtagcggactcagttttggtgtgattgaaggtttaagggcattgcgcccagaagcgagatttctagaattagtgcatcgccttgatagagatacctctggggtattgttgattgctaaaaagcgctcagccctgcgttcactacacgaacagctaagattaaaacagatgcaaaaagattatttagccttagtacgtggtcaatggcaatctcatacaaaagtagtacaagcccctttattgaaaaatatcctacaaagtggtgagcgggtggttaaagtaagtagtgaaggtaaaccatcagaaacacgctttaaggtagaagagcgctttgaatttgcgaccttagttaaagcaagtcctgtcacgggacgaactcatcaaattcgtgtccatacattacatgccggccatcctattgcttttgatgatcgctatggtgatcgtgattttgatacacaattagcttcaaccaagcttaatcgtctctttttacatgcgagttcattaacctttattcatccctcaacaggggaaaaaatgcgtattgaagcgccgatggataaaacgttacgttactgtttacaagtattacgcaatcaaaaatcttaa

SEQ ID NO: 294110 - DNA, 3522 bp, Proteus mirabilis
atgaaaagaatgttaattaacgcgactcaacaggaagagttgcgtgttgcccttgttgatgggcaacgtttgtatgatctggatatcgaaagccccggacatgagcaaaaaaaagccaatatctataaaggtaaaatcacccgaattgaacccagtctagaagccgcttttgttgattatggtgcggaacgccacggtttccttcctatcaaagaaattgcccgcgaatattttcctagtaattatcactcacatggtcgtcctaacatcaaagatgttttaaaagaaggtcaagaggtaattgtacaggtagataaagaagagcgcggaaataaaggtgctgctttaaccacctttattagccttgcaggtagctatttggtattaatgccaaataaccctcgtgctggcggtatttctcgtcgtattgaaggggaagatcgtactgaattaaaggaagcattatctagccttgatattcctgatggaatggggttgattgttcgtactgcaggtgtgggtaaatccgcagaagcattacaacaagatttaagctaccgtttaagacattgggatgctatcaaaaaagcagcggaaagtcgccctgctccttttctgatccaccaagaaagtaacgtgattgtacgtgctttccgtgattatttacgaccagatattggtgagatcttaattgataacgctaaagtagttgaaatggctcgtagccatattgaagccattggtcgtggtgactttgctagcaaaattcgccactacacaggggctgtaccactatttagtcactaccaaattgaatctcaaattgaatcagccttccaacgtgaagtccgtttaccttcgggtggcgctctggttattgataccacagaagcattaaccgctatcgatattaactcatctcgttcaacacgaggtggcgatattgaagagacagcctttaacactaacttagaagctgctgatgaaattgcgcgccaactccgtctacgtgaccttggtggtttgattgttatcgactttatcgatatgacccctgttcgtcatcagcgtgaagtggaaaatagaatgcgtgaggctgtgcgccaagatcgcgcacgtattcaaataggtcgcatttcgcgtttcggcttattagagatgtcacgtcagcgtttaagtccttcattaggtgaatcaagccatcatgtttgtccgcgttgtttaggcaccgggactatccgtgataatgagtcactttctctttctgtattgcgtcttatcgaagaagaagcattaaaagaaaatactcatgaagtacacgctattgtgcccgtacaaattgcctcttacttgctcaatgaaaaacgtaaggccgtcaccgatattgagttgcgccaagccaatgtcaaagtagtgattgttcctaatgatcaaatgcaaacaccgcatttctcagttattcgtgtgcgcaaaggcgaagagatctcttcattaagctacaatttagcgcaatatcacgaaactcagttaaatgaagcagaagatgaagccgtacctgagcgtaaagcgccagagcaaccggcgatatccgcttttgcattacaagataatagcgctgacaccaccaataagaaaaaatctgcaccaactccagctaaacaggtgaagaaaagcgaaacaacagagagtggtggattctttagtgctattgcaaaattcttctctaacttatttgcgagtcagccagagcctgtcgttgaagaaaaaccgcaagaaagcaaaaaagagaataatgaaaaccgtcgtgagcgccgaaataataacaatcgtcgcaataataaccgccgtgaacgcgataatgatcgcaatcgtgaccacgagcgcaatcgcgataacgtaacgagcgaagaaaatcgtaagaaccgtaatcagaaagcgcaaaatgccaatactgaagtcagtaatgagcaagaaatcgctgaacgtgaagcccgtcgtcaacaacgccgtgaacaacgtgcagaacaacgtcgtcgtcaggaagaaaaacgtcagcaacaacaagaagctgcgaaagccgcacaaaatacagcggaaaatgacaatgcagcaaaacaggctgagaagaaagaagaacctcgtcgccctgttatgcctcgtcgtgctcgccgtcaattaacgcaatctgttcgtgttactgatgctgtcgcaacacccgctattgatgttgctgtgagcgactcaccggtttctgagccaccagcgacagtggttagtcaattaccatcatcagaaaaacagcaagttgcgaaaccagtagcgacggttaaagatgagcaagaacaagtttctgctaatgcgttaactgatactgtaaaagcacaagaagaagtgaaaaaagaagagaatgcgggccaacaagaaaatgtgatgccacgtcgctctcgccgttcacctcgtcatttacgtgttagtgggcaacgtcgtcgccgttatcgtgatgaacgtacattagtctcccctatgccgctaacgatggccgtagcttctccagagcttgcgtcaggtaaagtatgtattcattaccctgtcacaccaattagtgatgcaccatttgttgacaataatgttgaaaatagcactgacaatacagttgctaaaaacttcattacacataaagatccacaaatggttgctattgcaccagaagtatcagaaaccattgctgcagatgttgctcaggctcaaacagcaaatgctgaagcaactgaagcgacttattcggtcacagttagtactgaatcaaccactgaagctgtagctgaaattgtcgcgattgcaccgcaagaaacgactgctgatgttaatgagtcaactgccgatcatgtagaagaaaacgctgttaacaacgttattgctgacgttaatacccaagagcatgttactcgtaaagagaatatctctgcggtattaaatacaacggaagcttatctacatgaagtgactgagcaagcagatgttgccgaagagaaaacagaaaccgctcataataaagtcatagctaatgctgatcatgaaaccgctagtgaagacacccatagtgacatgacaacgcaagcgcctgtacctgagatgccagcaacaacccaagcatcgactgaatgtgcggctgagcaacatgtagagcaaactgcttctcaatctacacctgtagaaacacagcctgaagtgaccgagcctgttgctgaaactaaaacggaaaccgaagtcgcatcggttgaagttaagcagccagctaaagtgaccgttattcgtcaagagccaacagtacgccagttacatgccagctcgccaatgacgaaagctccggcatctacagatgcgcctgtagcaattgaaatcaaagcatgggatgcacgtccagcctttgataagcaaggccgtagcggtgcgggtggtcattgttcaactaatcatgcttcatctgaaatgactaaagcgtcaacgcatagtgagtcataa

SEQ ID NO: 294111 - DNA, 339 bp, Proteus mirabilis
atggataacgcaagcaagccgtctttccaaaacgtactggagtttgtgcgtatgtatcgtcgtaaaaacaaaatccgtcgtgagatcactgacaatgagaaaaagatccgtgataaccaaaaacgtgttcttttattagacaacttaagtgaatacattaagcctggtatgtcaattgaagatgtactcggtattatcgctaatatgcgtagtgactatgaagatcgtgtagatgattacatcataaaaaatgccgatctctctaaagagcgtcgtgaattgtcaaaacaattaaaagcgatgggtgaaattaaaaatattcctaatattaaaaattaa

SEQ ID NO: 294112 - DNA, 1263 bp, Proteus mirabilis
atgaataaagatgctaaaaaatactatgtgatcttaagtgcgttgctatttttcttcttttttacatggtcttcatcgttttcattaatctctatttggttacatcaatatgttggacttaaagcaacagatactggtttgatattctcggctatatcattgattgctttatgtgcccagccactctatggctttattcaagataaactgggtttacgcaaaaatttactgctggttatcgcggtattgcttattttatcggggcctttttttcttagctttgcggcaatattacgctggaatatttttattggctctattctcggagggctctatgtaggaatgacttttaatgccgggatcggcgttttagaatcttatactgagcgtgttagccgtattcgtggttttgagtatggcagggcgaggatgtggggctctttgggatgggcatcggcaacctttattgctgggcataatatcaatatcgatcctaactataacttttttatggcatcgatagcgggggtgatcttcttaattctgttggcgttactaaaaacagataaaccagatgcttttaatcaattagagcatggtaaaccttctgcactcaccatcaatgatgcattaaacttactgtcattaccgcgcttttgggcattaatattatttgtggtcggaacctgtatttatagcgtctacgatcaacagttcccggttttcttctcttcacaatttgcatcattacagcaaggtaatgagatgtacgggtatcttaattccttacaggttttcttagaagcgggaggaatgtttgttgcgcctttcttagtgaacaaaataggggcgaaaaacggtttattattggcgagtagtgtgatggctgcgcgtattattggttctggattagttgaagggccgataatgatctcttgtatgaagttattacatgccgttgagcttcctatcctgttaatttctatttttaaatataacagccaacattttgataagcgtttatcttctacattgtatttagtcggtttccaatgtgtcagttccattgtggcaacattgttatccccattagcgggttatggctatgatcattacggttttgcccctacgtatatggtgatgggatgtatggtagtcggtactacgttactttctgctgtgttgttacgtgctgactcgaaagcattaccacaacatgatatgactgatctcgatagtaacaataaagctcaaccgatttaa

SEQ ID NO: 294113 - DNA, 1431 bp, Proteus mirabilis
ttgtcaaattcagctaatacccccactttctatatccatgactacgagacctttggtacgcatcctgcgatggatcgccctgcgcaatttgccggtgtcagaacagatatggattttaatatcattgaagatcctctggtcatttattgcaaacctaatgatgattacttacctcagccagaagccgtcatgataacggggatcacaccacaaatagcactaaagcatggtgtatcagaagctgaatttactcgccaaattcatcaagcctttagccagcctaacagttgtattatgggttataacaatttacgctttgatgatgaagtcaccagaaatatcttatatcgtaatttttatgatccctatgcctatagttggcaaaaaggaaattcacgttgggatttacttgatgttttacgtgcatgttatgcattgcgtcctgagggaattcattggcctgagaatgatgatggttttccgagttttcgccttgagctattaactaaagcaaatgggatctcccacgaaaatgcgcatgatgcgatgtcagacgtttatgcaactattgcgatggcaaaaaagctcaaacaagcgcaacctcgtatgtttgattatttctttaatttacgtgataaacgtaaagtacaagcactgattgatatcccagccatgacgccgcttgtgcatgtctcgggtatgtttggtgcagcgcgttctaatttaagccttgtagctcctttagcttggcatccagataatcgtaatgcggtgattgtttgtgatttagctgcggatatttcccctttattaaccctcacgtcagagcaattgcgtgagcgcttatatactcctcgcagtgaattatctgccgatgagccaccagttccaataaaattactgcatattaataaatgccctatcgttgcacctaaaaataccctcagatctcaagatgccgatagaattgggttagatattgataattgtttaaataaccaagcattattgctgtctaatcctgagatccgcaataaagtcgtcgagatttttgctcagcaaacaccatttatccctgcagatgatgttgatgctcaattatacaatggcttttttagcgataatgatcgcagcgcgatggaaattattcgctcaacacagccacaaaacttaccagcacttaatttaacttttgaagatccacgtatggagccgctatttttccgttatcgtgcaagaaacttcccagccacattaacttatgatgaacaacaacgttggttagcgcatagaaaagagcaattaacgccagaaaagctgactgaatatatcaataccattcagctgctagcagaagaacatagcgataacgaagaaaaactaaaacaactacaagagctatatttatatgctcaagaaattgcgagttaa

SEQ ID NO: 294114 - DNA, 1770 bp, Proteus mirabilis
atgaatgagagtagcagctccacaaaccagcattttattcgtaagttagaaggtattgtcggtaaaaaacatgtattaacccaagagcataaaacagagcgatatcgtaaagggtttcgttcagggcagggaaaagcgctggcagtggtatttcccggcactttattagaacagtggcgtatttttaaaacctgtgttgaagccgataaaattattattatgcaagcggcaaatactgggttaacagaaggttcaacccccagtggtgatgactatgatcgtgatattgttatcatcagtaccttgcgccaagataaaatacaagttctttctgaatataaccaagttattgcctttcctggcagtacattatggcacttagaaaaagtattaaagccattaggaagagagccacattcagtgataggctcttcttgtattggtgcttcggtgattggaggcatttgtaataactccggtggagcattagtgcgccgcggtcctgcttatactgagttatcactttacgcccgtgttaatgaacaaggtgaagcagagcttatcaaccatttgggaattgatttaggtgacactccggaagagatattaaccaatctggataatcggcattatcatacgaaacaaattcatgcgacggataaactggcatctgatcatgaatatagtgagcgagtacgtgatattgatgctgatacaccatctcgatttaataatgacgaaagacgtctatttgaagcggcgggaagcgccggtaagctctctgtttttgccgtgagattagatactttcccagctgatcatcgcacacaagttttctatattggaaccaatgatcctgatgagttagaagatatccgtcgccatattcttagtcaatttaaagtattacccgttgcgggtgagtatatgcatcgaagttactacaagatggcagaagtttatggcaaagatacctttttaattattgataagttaggcacagataagatgccagcattatttgctattaaagggcgtgttgatgctgttcttaataaagtgccatttttgcctaagaatctaactgatagaacaatgcaattgatgagcaagttatggcctgctcatttacctgctcgtatgacagaatatcgcgataaatatgagcaccatttaatgctaagaatggcggatagtggtatagaagaagcctcaacttatttaaaagaatattttaaacatgccacgggggattatttcgaatgtacagaagaagaaggtaataaagcctttttacatcgttttgccgccgcgggtgccgcagtgcgttatcatgccgttcatattaacgatgtggaagatgtgctacctttggatattgcattgcgtcgtaatgatcgggattggtttgaaaaactgcctcctgaaatagaaaaccaattgctctataaattgtactgtggtcactttatgtgtcacgttatgcatcaagattatattattaaaaaaggtgttgacgctaaggcgcttaaagcacagatgttagccttactagacaaacgtggtgcggaatatccagcagagcataatgtaggacatctctattatgccaaaccgcaattaaaagcgttttataaacataacgatccgacaaatagcatgaacccaggcattggtaaaacctccaaattaaaatattggggagaagagtgtggttgcgggcataatcataatcaagctgaagttaatcatgtagaaaacaaagaataa

SEQ ID NO: 294115 - DNA, 894 bp, Proteus mirabilis
atggatattcgtgttttacgctattttattgaagttgttcaattaaatggatttagccgagctgctgatgctctatttatcacacaaccagctattagccgtagcattaaaaaattagaagatgaattaggcaccgttttattaataagagaagtagatggggtaaaattaaccgatgacggtgctattttatatgagcatgcaaagcagatcctcgctcaatttaatagtatgaataaagcattaaatgataaagatgaacctttaacaggtgccttaaatgtcggattacctcctgttatagcctcaacctattttgctgatattattatggcgtttagctctcgtcatcccaatgttgaacttaaaatttttgagctaggcactaaacagatggaagatgcgatgttagaaggtagggtagaaaccgccgcggtgatgttaccttttaatgataaagattttgaattaactattttttcagaagatcacttgatgctattagtagcacaatctcatcctttggctaaagataagaaagttaattttaaacagcttattaccgagcggtttatctttttttcagaagattttcgtattaatgatttggtacgtagtgcttgtgggatttataacactgagccacaaattgtggggagaagtaatcatttagatttaattattgcaatggttaaagccggtgtcgggatcacactgttgcctaatagcatgtgtaataaatatcctatcgatgatttagtggttattcccattacttcccctaggttatcttatcaattagctttagccaccaatcaaaatagttatcaaagccgtagttgccaagcatggaataaattagcaatagagaaattaatgaaagagaagatttaa

SEQ ID NO: 294116 - DNA, 1650 bp, Proteus mirabilis
atgacaaacacagttattaagtacgttttagaccgattatatgatttaggtatcaaagatatttttggtgttgctggtgattatgccttccctattgaagatacgatttgcaacagccaacaacagcgttggattggtaactgtaatgaattaaatgcggcatatgctgcagatggctatgcccgaattaaaggtatggcagcattatccactacctttggcgtaggtgaattaagcgcgattaacgctattgccggtgcctatgccgaaaacttaccgattttccatttagttggcatgccagcaagtggcgtacaaaaaagtaaacgccttgtgcatcatactttagggaatggtgattttgatgttttttatcagattgctcagcgccttgcttgcgctcatactattttaacaccagaaaattgtgtggaagaaatggagcgcgtaatagaagcagcgttaaaagagcgtcgtcctgtttatattggtataccttcagattatgctaatagccaagtagtagagccgttatctgttaccgcaccacaaaagccaacaagtgataaagcaacattagaaaaagcagtatccgcaatcgttgagaaactcacccacagcaataatgtctgtgtattaccaggctttttatctgcacgtttagggttaacagataaaatccagcattttattgataaaacaggtttaccttatgccactatgtttatggataaaagcatattaagtgaatctaacgcgcaatatgttggtatgtatgacggacaattaatgacaccagaggtcagagaatttgttgaaagtagtgaatatatattagggatcggtacattactgactgactttaatacaggcagtttcactgctaatattaaatcagaacaatttatcagtatcatgccagactatgttgaaattgattctgtgatctactcctgcgtttatatgacagatattctttctgaattaacccaacgactaccgaataaaacttatcataaaataacagcgaaaggattaggtgaagcggttacatctgataatgataaaattacagcacaatatctctatcctcgtttagaacaattctttaagcctaatgatattattattgcagaaacaggaacctcatccatgggattaggcttcgctttattacctgaaggtgcacaatttcataatcaaacactatggggctctattggttgggcaacaccggctgcattaggcgctgcgttagcggcaccagaaaaacgtattattttaattaccggtgaaggctctcatcaattaacagtacaagaaattagtcaatttgttcgtttcggtttaaaacctattattctagtattaaataacgatggttatttaatagagagattattatgtgattaccccgaagcttattataatgatttagctcagtggaactatcatcagttacctcaagcctttggtgcaacagattggtatagtgaaaaagtgacgacagcaagtgaactcgataatgcgttaaataaagccgcattaacagatagtgcatcttatattgagatagtcacagaacgatatgaggcctctgaattagcgcaaaaattaaaagaatcgaaaagctcgttatattcattctaa

SEQ ID NO: 294117 - DNA, 2922 bp, Proteus mirabilis
atgaaaaatatcgtaatacctacctcgttaagctgcttttttttacttttttcccattcaacatggtctgaaaccaatatttcacaaaccaagcaacgtattatcgagcaacgtaattattggttagatgaaatcaaaaatggtgttatcacaactagtcctcaaaaaggatcgagagccgccgaattagatagaataatcagcaataattatcaagctattaccggcgaacgtagagaacttgccgaagcggataaatcacagtctcatacttatgtgttgaatacctatgctaatattttatttggtgataaggctaaatcgatcaactttagcgatattcaagcttatcaagatctcaataaattacatagcacaggcacctatgcttatgatacaaataaaaaaagagtacgctcgatagattttatcttaaaagaactttttttacgtggccgaccttatcaagtacttgataaaaaaggtcattatcttgataactacacctctataacaggctcatcttatcccagtggtcatacgtggaacggatacaaacaagctgcagtgttatccatcttattccctgaaaagggcagtgaaatgtttgccagagcaatagaatatggtgaaagtcgagttattgtcggagcacacttcgcaacagataccatcgcatccagaataggcaattattacctgctgtcacaaatgcttgcagatgatgacaccacccgcacttttgtagagcttgccaaagaagtccgccaaaatgttgctagccaatgcaaaaatccacattgcttaacgacctcgacaacaatcactaacgatgaaacaggttattacgcaaccaaagatccagagcctgcaccacgcattacccctaatgaaataccaacatctgccaacgcgttactgcgtttacgctttgcctatttaaccaaagagcaacgacaatctatcttagcgagtaccgcctacccgagtaattcattggctggctgggctacaaacaaagatgatccaaacgccaattggggattaattaatctcccgaaagcctataatggccctacttatttctacaatcattttattgttaatcaaataactaatgaatttgactttgctgaatttggtcaacttgatgaatggaaaaatgatattagtgggcctggcaaattaatcaaacaaggtaatggcaccttgatcttatcaggcaataaccattttgctggcgttgaagttaatcagggtcatttactgctcactggtgaaaaccactatgcaaaaaattcttccattaatggtggtacattacttcttgaaggaacactaaacactttactagatgtaaacaaaggagcattgctattaaatggtgggagcgttgattctcaagtcaatatcaataacaaagggatactttctggtaaaggaaaaattaataagctggccgtttattcaggaggcatcgtatcaccgggtcattcaataggtacaattaatatcgatgatactgttatttttaattctggtagcaactaccatgttgaaataaattcacaaggtgatagcgataaaataatcagtttgggtaccgcgacactgaatggtggaatggttaatgtatcgcttgaaaatagccaaaatctgctaacaaaagatgatgttcaaagtttatataacacaaaatataccattttaacggcagatcacggtgttaatggtcaatttactgatgtaaatccaaactatctttttttaggtaccacactgtcctacgataaaaattcagtaatactaaatgtcggaagaaatgacaccgccttttcaagtgtggctaaaacaaaaaaccaactatcaatcgccaatgcgatagacgcattacccttgggacatcctatttatgaaagcattataagaatggatacagggaatgatgcccgctctgcctataatcaattaacaggtcaaattcatgcggatatcttatctagccaactcaacaatagccggcaaataaaagaaacactcctctctcaggttaaaaatgcagaaataattaatagagagaaagaaagtgcagataacaaaggtcatgtttgggctaaaattctctctcattgggaaaagacttccaatgatggcaatgcaaatagctatgatgcttccacctatggcgtactattaggtgctgatcaacgggttagtcacgataaaatgctgcttggtattgcaacagggatcaccaaaacctcactatctggtgataacagtcacgcaaatagcgaaaattaccacttatcactctatggtggttatgattttgacacaatcgcgttacgtgctggtgcatctaatacctttcatcgtatccatacaacaaaatcagtcaactatggtgtgcagtcagataaaaataaggcgaattacaatgggaacactagccaactctttattgaagcagcttatcccatcaccctctcagatacacaattagagccttttgttaatcttgaatatgccaaaacaaaaaacgccaccattaacgagcaagggggacgagcagccttacaagctcattcgcaaactctagagtcaaccacctccactacagggctacgtttaaataaccaatggaaatttaacagtaaatcaacggtttctctctatggtgagctaggctggagacaccaatataacgatgtagaacgagggatcaatttacgcttcacacaaacccagcctacatttatagcaaatagtgttgatgccgctcgagatgcactagtggtaaaagctggaacaactatccaaatcaatgagacatcaaaagtctcaattggatacagcggactaacggcaagaaatcagcacgataatggtattgatatgaaactctctatcgcgttctaa

SEQ ID NO: 294118 - DNA, 1380 bp, Proteus mirabilis
atgtcagataatgtcatctcctctatcggcaccaatcaaactggtgttaataaccgtgttcaattacgcaaaacattgacgctaatgcaagtcgtcatgatggggttggcatttttacaacctatgacgatttttgatactttcggtattgtatcaggcataaccaatggtcatgtggcaacatcttatgctattgcgttaaccgctattttatttaccgcagtgagctacgggaaattagtcaagcgtttcccttcagcaggctctgcttatacttatgcacaaaaatccatgagcccacatgttggttttatggttgggtggtcttcattattagactacttatttatgccaatgataaatatcttattggctaaaatttatttacaagccatattcccaggcgttgatccgtggatctttgttgttgcgttagtcgcgttaatgacattttttaatctacgcggaattaacgttgtggctaacttaaataccgttattgttattattcaagtagctgtaatggtggtatttgttggtttattaattcatggcgtatataacggcgaaggtacaggggagttatggactttccgcccatttgcgtcagtagatgccgaattaatcccaatgataaccggcgcgacaattttgtgcttctcgttcttagggtttgatggcattagtaccttatctgaagaaacacctaatgccggtaatgtgataccaaaagcgattttcttaactgcgttaatcggtggtttaatttttatcgctgtttcttattttttacaattatatttcccagatatttcacgttttaaaaatccagaagagtcacaacctgagattatgttgtatgtagcaggagccttgttccagtctattatcttagtgttttcttgtgtgacagtattagcatcgggtatggcggctcacgctggtgttgcgcgtctgctgtatgtgatgggacgtgatggtgtattccctgagaaagcgtttggttatgttcatcccaaatggcgtacaccggcatttaacgtactgttagttggctttttagcgctaggggcgatcttttttgatttagtcactgctacagcgttaattaactttggtgcgttagtggcatttacctttgttaatttatctgttatttcgcagttctacattcgtgagcgtcgtaataaagggttaatggatcatattaactatcttatattaccgattattggtgccgcgacaatgggggtactgtgggtaaaccttgaaccaggctctatggaattaggactgatttggggggcaattggtatactttatatggtgtggatcactcgtcgattccgtcgacctatgcctcaaatgccagagaaataa

SEQ ID NO: 294119 - DNA, 1983 bp, Proteus mirabilis
atggtagtgttaaagaaaaataaaattgcgcttggcgttgttgctgctcttgcatcaagttttgtgatgacagcttccgcagaagatccggaaagattactggtgacaaccgcttcgggatttaaacagactgttgaagatgctccagcttctgtttcagttgtaactcgtgaacaattagaaacaaaatcatatcgtgatgtaactgatgcgctaaaagatgttccgggggtgctagtgacagggggcggtagtagctctgatattagtattcgtggtatggatgctaagtataccatgatcttagtcgatggtaagcgtgttgcatctcgtgaaacgcgtcctaatagtgataactcaggtattgaacaaggctggttaccgcctttacccgcgattgagcgtattgaggtagtaagaggcccaatgtcttctttatatggctctgatgccatgggaggcgttatcaatattattacgcgtaaagcgcaaaaagaatggaactttagtttacgtggtgacacaacgttgactgagcgtaaaaatgaaggaaatacagggcaaggtagtttctatgctgcaggtccattgattgataatgtgttaggtctaaagctgcaagggcaatattctcaccgtggtgaagatagacgtgttgatggctataaccgtcagatcacggcaaatggtggcggtacattaagctggacaccagatgagaaaaataccgttgaatttgaatttaaaaaagataatcaacatcgtgattcacgtgttggctattcaaaatcagctgaacttgttaaagggaaaaaaccacaaagtagttttactgattatgagctaacgcattatgccttaacccatgatggtatttatgattttggtaccatgaatacctatgttcagcgcgatgaaagccgcaatccatcacgtaaaatggattatgatgatacaactgttcgtaaccaaaccgtctttatgtttggtgatcatatgttaagtgtcggcggtcaatatcgctatgaagagctgaaagatgaaggcaataagcttaaaggtaataataagctagatcgctatagttgggcgctatttgctgaagatgagtggacattgacaaacgacttcgctttaactggcggtttacggatggataaagatgaaaactttggtactcactggacaccgcgagtttatggtgtttggcatttagctgatgaatggacattaaaaggtggggtatctactggatatcgttcaccggatttacgccaagcgacagctacttggggacaggttactggaggaggacgcttggatggtgttatttttggtaaccctgatctaaaacctgaaaaatcggtaacagaggaaattggtattatttgggataatcgtgataacttaacggcaagtttaacgatttataatactgattttaaagataaaataatggaaaagcgcgtttgtgacaaagactcatctaaaccatgtacagcggataatggttttggtcatgtctatgattttgtaagtaaacgtgaaaatgttgataaagccaatatgcgcggtgttgaagttactgctaactggattatttccccagaatggaatttagcagcaaactacacgttcacagatacggaacaaaagagtggtgatttcaaaggtaagcctctgaataagcaaccgcgccatatggcaaacgcgaccttaaattgggaaaccacccctgaaatggaaacttgggcacgcattaatttccgtggtaagacatcagattatttatcacgtacttcaatggctaagagcacaccttcatacgcctttgttgatgtagggactagctatagtctaacgaagcaacttaatctgatcggtggcgtctataatgtttttgatcgtcgtatcgaaagagataattacggttcaaccttagaaggccgtcgttataacatcggattaaactacaacttctag

SEQ ID NO: 294120 - DNA, 1488 bp, Proteus mirabilis
atgtcagaacaacaaacagataccgcaaaatcgggtgcggtacgcactttgcgtcgagaattaaaggcgcgacatttagcgatgatcgctattggtggttcaattggtacagggctttttgtcgcatcaggtgcaactgttgctcaagcagggccagggggagcattactctcttacgcattaataggacttatggtctatttccttatgaccagccttggagagttagcggcatttatgcctgtttccggatctttttcaacctatggctctaaatatgttgatgaaggatttggtttcgcactaggctggaactactggtacaactgggctgtgacgattgcagttgacttagtcgccgcgcagctcgtgatgctgtattggttccctgatgtggatggttggatttggagtgcgttatttttagccgttattttcttgcttaactatatttctgtaaagggatttggtgaagcggaatattggttttcattaattaaagtatcgaccgtgattatttttattgcggtgggtattgcgatgatcaccggtattatgaaaggtgctgaaaatgcaggttggcacaactgggaaatcggcgatgcgccttttgctggtggttttgctgccatgataggggtagcgatgattgttgggttctctttccaaggaactgaacttatcggtatcgcagcgggggagtcgaaagatcctgcgaaaaatattcctaaagcagtacgtaaagttttttggcgtattttactattttatatcctagctatcttaattatcagtttaatcattccttatactgatcctaacttgctacgtaatgatgtgggtgacatcagtgtgagtccgtttacactggtatttaaaaatgcagggttactttcagctgccgctatcatgaacgcagttattttaacggcggtgctttcggcagggaactccggtatgtatgcatctacgcgtatgttatttaccttagcaagagaaggtaaagcgccgaaattttttggtaaattatccaaaaacggtgttccacgtaatgcactttatgcaacaacagtggttgcgggtttatgctttttaagctcaatgtatggtaaccaaacggtttatttatggttattaaatacatcaggtatgacaggatttattgcttggttaggtattgcaatcagtcattaccgttttcgtcggggttatgtagcacaaggtcgtgatctgaatgaattgccatatcgttcaggcttcttccctgtaggacctatttttgcctttattctctgtttaattattacattaggtcaaaactatcaggcatttttagaagatactattgactggtatggtgttgtggcaacctatattgggatcccattattcctgctgatttggtttacttataaaatagtgaagaaaacacgttttattcgttacagtgaaatgcagtttcctgagcatattgaaaacaaaaaatag

SEQ ID NO: 294121 - DNA, 891 bp, Proteus mirabilis
atgcgtattacattgcgacaactggaagtatttactgaagtacttaaaagtggttctacaacacaggcttcacaacagttggcattatctcaatccgctgtgagtgcttctttaactgatctagaaactcagttaggagtacaacttttcgatagagtggggaagcgcttagtaactaatgaacatgggcgattattatatccaagggcactctctttacttgagcgagctacggaagtagagcagttatttcaagccggaaatggtgcattacgtattgctgctagcaccactattggtaattatattttgccccaaatgttgggtaattttcatcgtaactaccccgatattccacttgaaatgagtattggtaatacggaagaagtcgtcaaatcagtcagtgagttccgtgtggatttaggcctgattgaaggggcttgccaaagctctgaattgatcagccaaaaatggctactggatgaaatggtcatattttgttcccctgaacatcctttagctaaggctaaaacagtgacattagccgatcttcaatccgcgccgtggatcttacgtgaaaatggttcagggacgcgagatgtactcaatcatctactgtttgcttcattacccggatatcgaatcgaaatggaattaggtaattcagaagcgataaaacatgcggtaatgtatgaaatggggattagttgtttatctcgccgagtgatccaagatcaaatagataatggctctttaaaagagataaaggtcgaaggcctaaaattacaacgtactttgtatttggtctatcatcgccaaaaacatgtctctgatgccctcaaaaaattactttcatattgtaatgctgaacatttaatcgacaacgcttga

SEQ ID NO: 294122 - DNA, 1116 bp, Proteus mirabilis
atgcaaaatttacataagcaaggtttttctatgtcagagcaaagtcaaacaaccacattggctaaaaaatgttttattcctgtttatcgctggctccccggcttgctgctaacaggtatattaaccgccctcgctatttacgtaggtgatattccatggttttccagtatggggttaggcgctcttacactggctatcttatttggcattattgcgggtaatacggtttatcccatcgctaaaccttatagtgatgaaggcgttaagtttgccaaacactatttactacgtgcggggatcatcctatacggttttagactcacttttcagcaaattgcagatgtaggtgcaacagggttaattattgacgcgattatgttgacctcaacttttctcattgcaatgtgggtggggaaaaaatattttggtcttgatgatcaaaccgtcatgttaattggtgctggtagtagtatttgtggtgcggctgcggtcatggcaacagagcctgttgtcaaagctcaggcgagccaagttgcagtggctgtatccaccgtcgtgatttttggaactatcggtattttcctctacccatggttcttccatcttaacgcttttgccggttggttaccttttagtgaagaaacttttggtatcttcgctggttcaaccatacatgaagtcgctcaagttgttgcggtgggtcattcaattagtccagatgcagaaaatgcagccgtaattagtaaaatgatccgcgtgatgatgctggcacctttcttaattatcctttctacttatattagtaaaaagggtcgtaaaacagtcggtgcgacaacagaaaaaagtccgataactattccttggttcgcggtgttctttatcttaatggctggttttaattcatttaatttaattcctgccgctattgtgaaccatatcgtcactattgatactattttattggcaatggcaatggtggcattaggtttaacaacgcatattagtgcgatacgtcaagcgggtgtaaaaccactactgctagctttatttctctttttctggctaacgttaggtggtgctgctattaatatctttatccaatctgtgttgatgtga

SEQ ID NO: 294123 - DNA, 846 bp, Proteus mirabilis
atgaaatttgttggcgcacatgtcagtgctgcaggtggtgttgatcaggctgtattacgagctcatgagatcaaagcaacggcatttgctctttttactaaaaatcagcgccaatggaaagcagccccgttatcaactgaatcgattgataaatttaaaaaaaattgtgaaatctatggctatggtcctgcacaaattttaccacacgacagctatctaattaatttagggcatccagaagaggaagcccttgaaaaatcaagagccgcttttctcgatgagatgcaacgttgtgagcaattaggcattgaattacttaattttcacccaggtagccatttaaaaaaaatcgatgttgataaatgtctgcaacgcatcgctgaatccattaatatcaccttagataaaacccaaaatgtgaccgcagtaattgaaaataccgctggacaaggcactaacttaggctatcgttttgaacatctcgccgccattatcgatggtgtagaagataaatctcgagtgggcgtttgtattgatacttgtcacacttttgctgcaggttatgatctacgtaccgttgaagactgcgaaaagacctttgctgaatttgataatattgtcggctttcaatatttaaaagccatgcacttaaatgatgctaaaagcgaattggctagccgtgtcgatcgccatcatagtttaggacaaggcaatattggcaaagtcccttttacttatattatgcaagatccccgttttgatgggatcccacttatcttagaaacaattaaccctgatatttggccagaagaaatagcttggttaaaatcacaacaaactcaataa

SEQ ID NO: 294124 - DNA, 417 bp, Proteus mirabilis
atgtctgtagtcgttggtgttggagtgatcatcgtcaatgaaaaaggtgaagtattattaggtaaacgctgtggtaaacacgccccttattggtcaatttttggtggccatgtcgatccgggggaaacctttgaacaatgtgctattcgtgaaattgaagaagagattggcattaccattcctactcctgaagtgattgggatcagcaacaatctacaaacttatcaattagaaggtaaacataccgtatctatctgtatgctagcgcaatatcaaggtggcgagcctaagttaatggagccagataaatgttctgaactacgctggtgctcacctgatgatttacctgaacctcattttgaagcgagccgtaattctattgctttatggaaaagtaaacgtttctatcaaccttaa

SEQ ID NO: 294125 - DNA, 1242 bp, Proteus mirabilis
atgtcagaagtcacatccattgctaaacgcccatctatactcggtggtgcgatgattattgccggtacagcagtaggtgccggtatgttttccattcctattgtgacttccggtgtgtggtttaccggctctatctttttactcatttatacttggttttgcctatttatgtctggcttaatgatcttagaagttaatcttcactaccccctaggatcaagctttcatactattaccaaagatttattaggtaagggatggagtaccattaatggtctttctattgcttttgttctctatattttaacttatgcctatatttctgcaggtagctctatcattgtgcaaaatttcgctaatgtggttagcttgccacaagccgttgcaggcttagtatttgcccttgttgttgctttcttcgtttggttatcaacccgagccgttgatcgcttaagtaccatattaattggcggtatgattgtggcttttgtatttgctatcggtggattatttaccgaagtgaaaatgccggtattatttaatacaacagaaagccatgccagttatttaccttatgcactagccgcattaccttatttattaacttcgtttggttatcacggcaatattcctggattagtcacctactaccgtaaagacggtaaagccgtgatgaaaagtctattaattggtaccttgatttcgctggctatctacattttatggcagtttgttgtgcaaggtaatattcctcgtgaaggctttaaacaagtcattgctgaaggcggaaatattggtaacttactggcacaaatgcgtatcaatacagcaaatacttccgtttcattcttattagacttgttctcatatatggcattagcgagttcatttttaggcgtgtctttagggttatttgattatttagctgatttctttaaattctcaaatacagggactggacgtttaaaatcagccatcgtgacttttgtcccacctaccattctagcgattatttttcctgatggcttcttgtatgctattggctttgcaggacttgcagccactatttgggcggcgattattccagcattaatggcaaaagccagtcgccaacgtcatcagcaacaaagctttaaagcacctggtggcacctttatgattatctttgtgatcttatttggtgcaattaatgcgattgcacacatattagcaaactttaatctcctacctatttaccgctga

SEQ ID NO: 294126 - DNA, 573 bp, Proteus mirabilis
atggcaaaagctaatgaaattaagcgcggtatggctatcagttataacaataaattattattggtaaaagatatcgacatccaagcgccaagtgctcgcggtgcaagtactttgtataaaatgcgctttactgatattcgtacaggtcaaaaagtagaagaacgttttaaaggggatgatattctcgatactatcaacttaacacgccgtgcagtcagtttctcgtatatcgatggtgatgaatatgtctttatggacaatgaagattatacgccttacaccttcaaaaaagatcagattgaagaagagttactgtttattccagaagaaggcttagctgggatgcaggtcttaactatggatggacaagttttagctttagagttaccgcaaactgttgatatggaaattatcgaaacagtaccgggcattaaaggcgcgtcagcgagcgctcgtactaagcctgcgactctacctactggattagtcattcaagtccctgaatatctttctacaggggataaaatccgtattcatattgctgaacgtcgctatatgggacgtgctgattaa

SEQ ID NO: 294127 - DNA, 327 bp, Proteus mirabilis
atgaaaaaatatctgaccattttatgcagtcttctcgtttccagttcgatatcatttgcttgggcgtcaacagcacagcaaaccacaggacagatttatgtacgaggagcgattgttgatccagcttgtgaaattaatttcacactcgatcaagctgagtaccaatgttacaaaaataacaaagtctttacatcaacccagtctattttccctacctcttttgaacaatcatcatcaattatactgcctcaaaatatggggaaagctgaaatccgttggatggatggcgctgaaaaaaatggattgattaatgtgcaatatttttaa

SEQ ID NO: 294128 - DNA, 531 bp, Proteus mirabilis
atgagcgcgctgttgctgtactgcagtacagatggtcaaactaaaaaaataatgacgcacatagctaatgaactaagacaacagggctatgaatgtgatgtaagagatttaactgctgttcaccatagccttaatttatctgcttataataaagtgttagttggggcatcaattagatatggctattttaataaagtactggataaatttattacccaacacctttctcaattaaatagtatgccatccgccttttttggggtgaaccttacggcaagaaaagctgaaaagagtacacccgaaaccaatgcttatatgcgtaagtttttagataagactccatggaagcctagattaacaggtgtttttgcaggcgcgcttctttacccacgttataaatggattgatagagtgatgatccagcttattatgaagatgactaagggtgaaaccgatccaacaaaagaaatcgaatatactgattggaataaagttagcgaatttgcgacaaaattttccaaaattgagtga

SEQ ID NO: 294129 - DNA, 1452 bp, Proteus mirabilis
atgcattttcgttcaataacccgaattgttgggctacttgttattttattctctgtcacgatgatcatccccggtatcgttgcgttgatctatcgggatggtgcaggacgagcatttagtcagacatttattgtcgctcttattattgggctaatgttgtggatccccaatcgaaacaataaaagtgatctaaaacccaaagaaggttttcttattgtggttttattttggacagtgttaggcagcgtaggggcattgccttttattttttcggaacaacctcatctatcgattaccgatgccttttttgaatctttttccggattaacaaccacaggggctacgacacttgttgggttggatagcttacctaaagcgattttattttatcgccaaatgctgcaatggttagggggaatggggatcatcgtattagcggtggcaattcttccactgttaggcgttgggggaatgcagctttatcgggcagaaatgccggggcctttgaaagacaataaaatgcgcccaaggattgcagaaactgcgaaagcattgtggctgatttatgtcttactcactattatttgtgcccttgcattgtggattgcgggtatggacgtatttgatgctatctctcatagtttttcaaccattgcaatcggtggattttctacccatgatgcaagcattggctattttaatagtccaacaattaacgtcattattggtgtttttctattaatttcagggtgtaactttgctttacacttttcggttttaacagggcgaagcctcaatatttattggcgtgatcctgaatttcgcatgtttatctttatacagctcggattagtgattatttgtagccttattctatggctctattcggtatatgactccggatggacaacaattaatcaagcttttttccaagttgtttcaatggcaacaaccgcagggtttgcaacagatagttttgcccagtggccaacttttttacctctgttactgttgtgctctgcctttatcgggggctgtgctggttcaacgggggggggattaaaagtaatccgtatcttactgctatttttacaaggctctcgtgaattaaaacgtcttgtacaccctaatgcggtttatacgattaaactaggacatcgagcattaccagagcgtattatagaagcggtttgggggtttttctcagcatatgctttagtgtttattattagcttaatgctattaatagcgacaggcgttgatgagttttctgctttttctgctattgctacaacacttaataatttgggtccaggattaggtattgttgctgataactttacaacaatgaatccagccgctaagtggatacttgttgtcaccatgttatttggccgattagaagttttcacattattggttttatttacaccaacattttggcgtgattaa

SEQ ID NO: 294130 - DNA, 621 bp, Proteus mirabilis
atgaaagcttatttgatccccgctgaaacggtagaattcagtgaagaaataaagaagagccgttttattacatttattgctcatactgaagggattgaggctgccaaagcgtatatccaatcaattaaagcgcagtttcccgatgctcggcatcattgttgggcatttgttgctggaagaccggatgattcacaacagttaggtttttctgatgatggtgaaccaacaggcacggcgggaaaacctattctagcacccctgttagggagtggtatgggagaggtgactgcggttgtggtacgttatttcggcgggatcaaattaggcactggcggattagttcgtgcttatggcaatggggtacagcaggcattaaaacttttgccaacgaaaaccaaagtacctcagcgccgatttcttgtggagtgtgaatattccttggtgtcattacttgagcaagttgttgcagaatatcaagggaagatcctctctagtgaatatactgataaagtcacttttgaactatcattgccagcagtagagagtgaaaaagttgaaagtaaactacgcgatatcagtcgtggcagtatgcaattaatatgtttagaaccgaatgaataa

SEQ ID NO: 294131 - DNA, 1335 bp, Proteus mirabilis
atggaaaaattgctttctctgtatcaagaacatatcaaaacactacaaaatcgtactcgtgatgctttatctagacaccaccttgataatgtcttgattcactctggtgaacctattggtgttttccttgatgatagtgattacccttttaaagtgaatgcacactttaaagcgtgggtgccagtaactgatgtgccacattgttggttattggttgatggtgtcaataaaccaaaactctggttctattcacctgttgattattggcatagtgttgaagctttaccaagtagctattggacccatgaaattgagctgatccatttaaaaaatgtcgatgatattcaaaaagagctagcaccttttattaataaaaatactgcttatattgggccaaatacacaacgggctgattcattaggtgtcagtcttgataatgttaataaccaatctcttcttaactattatcattattatcgtgcttataaaacgggttatgaactggcatgtatgcgcgaagcgcagaaaatggcagtcaatggacatatcgccgctcgtgaggcattccaagctgagttaagtgaatttgatattaatatggcttatttaatggcaacaggacatcgggacacagatgtaccttatggcaatattgttgcattaaatgaacatgctgctgttttgcattacaccaaattagatcatcaatcgccagatgaatatcgtagtttcctcattgatgcaggagcagagtataatgggtatgctgcggatattacgcgtacttattcagcgaaagaaaatcatgaatttactgctttagtcaaagatatgaatgatgcgcaacaggcattgatagcgacaatgaaagcgggagtacgctacagcgaatatcatattcaaatgcatcaacgtattgccggattattacataaatacggtattgttaagggaattagcgaagaagagatggtgagtgaaggattaacaactcccttcttaccacatggattaggccatgcgctaggtttacaagttcatgatgcgggtggatttatgcaagatgataaagggactcatttagctgcgccagccatgtatcctttcttacgttgtacacgtattgtagagccgggaatggtacttaccattgagccaggattctattttattgattcattattagcaccttggcgtgaagggaaatatcgtagtcattttgattggcatttgattgaacacttcaagccttttggtggcattcgtattgaagataatattattatccacgataacaaaattgaaaatatgacaagagacttacatttagcctga

SEQ ID NO: 294132 - DNA, 2181 bp, Proteus mirabilis
atgctctatcaaagcgaaaatattcaagccgattgggtgaagcaaggtattgttgagctcgttttcaatgctagcggttctattaataaattagatacaaaaacggtggcaatgttaagcgaagcgttaacagtattagaaaacacatctgatctaaaaggggttattttacgttcagaaaaacccgcctttattgttggtgccgatattaccgaatttttatcactttttgatgcacccgttgaagaactgacacaatggctacattttgctaatcatattttcaatcgattagaagatctccccgttcctacagtttctgccattaatggctacgccctaggcggtggctgtgaatgtgtattagcaacggattttcgtattgcatcaccggatttacgcattggtttacccgaaacaaaacttggtattatgccgggttttggtggctctgttcggctacctcgccttattggcgttgataatgccttagaaattattaccgcaggtaaagatattaatgccgaaacggcacttaagaatggcttaattcaagctattgtccctgttgataagctaaaagaaagtgccatttcactgatagagcaagccattgatggcaaatttgactggcaagctgctcgtcaacctaaaactgtggcgttaagattaacggaacttgaacataaaatgtcatttgctgtggcaaaaggcatggtgatgaaagtcgcaggccctcattatccagccccaatgaccgccgttaatacgatagaaaaagccgcatttctagatagaaaagcggcacttgaattggaaacagaaaactttgtcaaactgacccgcaccgatgttgccaaagcattagtgggtattttccttaatgatcaatatgtgaaaggtattactaaaaaacgtcatgctagcttgccaaaacaagcggcagtattaggcgcggggatcatgggtggcggaattgcctatcaatctgcactaaaaggcattcctgttaccatgaaagatattaatgccaactcccttgaattgggtatgacagaagcactcagtctgttacaaaaacgtcaagaaaaaggacgtatgagtgccgttgatatggcaaaaaccctcgcctctattcatcctactctaaactatgccagtgtagctgatgcacaaattgtggtcgaagcggtggttgaaaaccctaaagtaaaagcctctgtacttgctgaaaccgaagcgctccttgctgatcatgctgtacttgcttcgaatacctcaacaatccccatttcgctacttgccaaatcactaacacgccctgaaaatttctgtggaatgcacttctttaatcccgttcaccgcatgcctttagttgagatcattaaaggtgaaaaaaccagcgaagagacgattaatcgcattgtcagttatgctagcaaaatgggtaaaacgccaatcattgttaatgactgcccggggttctttgtcaatcgcgtgctcttcccttatttcgccggattttctcttttattaagagatggtgctgattttattgctgtagataaagtgatggaaaaagcctttggctggccaatgggtccggcttatttactggatgttgtcggtatcgatacagcgaatcatgctcaagcagtgatggctcaaggtttcccagacagaatgggaagtattgataaagacgttattgcgcttttatatcaacaacaacgctatggtcagaaaaataatcatggtttctatgactacactattgataagcgtggtaaaaaacaaaagcaggtagataacgatattcacagccttattgaacatcatgtcggtaaaaaacaggaatttaaccaagacactattattgctcgtatgatgatcccaatgatcaatgaagttattcgctgcttagatgaaggcattatcgcctcacctgcagaagccgatattgcattagtgtatggtttaggcttccctcctttccgtggtggtgtcttccgttacctcgataccattggattagcacaatttgttgcaaatgcagagcaatactcagaattagggccactttaccaaattcctgagagcttaaaacaaaaagcattacgtaacgaaacctactatccaaagcctgcaaaagtagatgttaacatcagagaactcgcttaa

SEQ ID NO: 294133 - DNA, 1164 bp, Proteus mirabilis
atggaaaaggttgtcataattgatggtgttcgcaccccaatgggacgttcaaaaggcggggcatttcgccatgtaagagctgaaaatctctctgcgcaattaatgcaagctttgcttaagcgtaaccctgatattgatcccaatgatattggcgatgtgatttggggctgtgtacaacaaactttagagcaaggctttaatattgcacgtaatgccgcactattagcagaattaccgcataaagttccggcagtaaccgtcaatcgtttatgtggctcttcgatgcaagccttgcatgatggtgctcgccaaattatgttaggagagagccaagttgctttaattggtggcgttgaacatatgggtcatgtaccgatgacctataatgctgactttaacccagcattaaatctttctgtggcaaaggcttcattctcaatggggttaactgcagaaatgttagcaaaatcatttcaaatatctcgtgaagaacaagacaaattcgcctatcgctcacaccatttagccgccctcgcgacccaaaaaggctattttgataacgaacttgttgccattaatggtcatgatgcagcaggagattttatacgcgtcagcacggatgaagttatccgttataacccaagccttgatgaattagcacaacttagacccgtatttgatcccgccacaggctccgtcactgcggggaattcatctgcagtctctgatggggcatccgcgatgtttatcacgagcgaaagttatgctaagcaacatcatttaaaaccccgtgcaattattcgttcgatggcggtaacaggttgtgatccggcaatcatggggtatggtcccgttcctgccactgaaatagcgctaaagaaagcagggttaaccctcagtgatattgatatctttgaacttaacgaagcctttgcagcgcaatccttagcttgcatgaaaaaaatgaatttactcgatagcattgatgacaaaatcaatcttaatggtggtgctattgcacttgggcatccattaggttgttctggtgccagaataaccaccacgctattaaatattatggagcgtaaagatgcacaattaggattagcgacaatgtgtattggattaggccaagggatagcaaccattattgagcgagtttaa

SEQ ID NO: 294134 - DNA, 702 bp, Proteus mirabilis
atggcgatactgaactgtaaagtctcactcgttgagccgataacagatacggtgtatcgggtaagattattacctgatggcccatttgattttcaggctggacaataccttttagcggttatggatgagcgagataagcgcccattctctattgcctctattcccgaaaataaagactttattgagcttcatattggcgcgtcagatctgaatctttacgcaatggctgtgctcgatcttattttagaaactcaacaattaaagattgatattccccatggtaatgcgtggtttagacaacagagccaacgtcctttgttgcttatcgcaggaggaacaggattttcttatactcactctatcttgctagcggcattacaagaaaatcctcaacgtgcgataacgctttattggggaggacgagagcaggtgcatctttatgatcttaatgagttgcaagatttaacggaaaagtatccctcattatcagtcgtacctgttgttgaacaacctgatgatgcttggcgtggtagaaaagggactgtattaacggcaattagtgaagattttggcgatttatcatcctatgatatttatatcgcaggacgttttgaaatggctaaaatagcgcgagatcgtttttgtaatgagcgtaatgctgatagagaacgcttatttagtgatgcttttgaatttatttaa

SEQ ID NO: 294135 - DNA, 1473 bp, Proteus mirabilis
atgatgaaataccgcgatttaagagatttcctttcattactcgaagaaaaaggtgaattaaaacgcatcacctttgaaatagatccctaccttgaaatgaccgaaatagcggacagaacattacgtgctggtgggcctgcactgttatttgaaaatcctaaagggtttgatatgccagtgctatgtaatttatttggtacacctgagcgtgttgctatggggatggggcaagatgatgttaaagccttacatgaagtgggtaagctattagcatttttaaaagagcctgatcctccgaaaggatttcgtgatctttttgataagttacctaaatttaagcaagttttaaatatgccaactaagcgcctgagcaaagccccttgtcaggaggttgtgttaactggcgatgatgttgatttaactaagatccccgtgatgcattgttggcctgaagatgcagcacctttgattacatggggacttacagtaacgcgagggccatttaaagagcgtcagaatttaggtatttatcgccaacaagtgcttggtaaaaataaagtgattatgcgttggctatctcatcgcggtggcgcgttagatttccaagaatggtgtcaaaaacacccaggagaacgctttcccgtttctgttgcattaggggctgatcctgcgacaattttaggtgccgtaacgccagtaccagatacattatctgaatatgcctttgctggattattgcgaggtaataaaacagaagtcgttaaatgcctttccaatgacttggaagtcccggcaagtgccgaaattattctcgaagggtatatcgaacccggtgagcttgcaccagaagggccatatggtgatcatactggttattataatgagattgactcttttccagtatttaccataacacatctaacacgtcgtaaagatgctatctatcactctacttatacagggcgtccaccggatgagccggcagtattaggcgttgcgcttaatgaagtattagtaccgatattacaaaaacaatttcctgagattgtcgatttttatttacctcctgaaggttgctcttatcgtttagcggttgtgaccatgaaaaagcagtatgctggtcacgctaaacgcgtaatgatgggagtttggtcttatttgcgacaatttatgtatactaaatttgtgattgtttgcgatgatgatgtgaatgcaagagattggaaagatgtgatttgggctatcacaactagaatggatcccgcaagagataccattatgatggaaaatacgccaattgattatcttgattttgcttcacctgtttcaggtttaggctccaaaatggggttagatgcgaccaataaatggcccggtgaaacagagagagagtgggggcgacctatcgtaatgacggatgaaataaaacagcgggtcgatactatttgggaacagctcgatattgttaaataa

SEQ ID NO: 294136 - DNA, 726 bp, Proteus mirabilis
atggaagtttttttattgagtaatgggaagattgccggggacccacaatggttaagttacgccaaagataatatcgacagcatgattaaaaagcgtggtattcgttctgccgtgcttattgcatatgcggttattcgttctgatcacgaccaacgtgctcgtgaattatcagaagtattaggtattgaagtgacttgtattgaacattttgattcagaagtggaagccattaacaatgctgagtgtattttagttagtggggggaatacgtggttattaaaccaaatgctgcatgaaaaaggattagtggttcctatccagcgtgcagttcgtgaacgtaatatcccttatatcggttggagtgcgggttgtaatgttgccactccgactatccgtactacaaatgatatgcctgtgcgctgttctgttgttatgccttcactgggattattccctgtacaaattaacccgcactatattgatgccaccattagtggacatatgggcgaaactcgagatgagcgtattgcggagttttgtgcgatgaacccagatgagatagtggttgccattcgtgaaggtagttacttatatattcagggtgaagagttacgttattacagcgctaaaaatgaaggctttaaaattttccaacatggaaaaacttttccagaacagtttgatacaaaaatgttggcaaaatgggttccatttcgctgtttataa

SEQ ID NO: 294137 - DNA, 267 bp, Proteus mirabilis
gtgcgctttggacgctatcctgtcacagtgccacaagaggttatagataccttacaatcgccgacaccgtcttcagttatctacagtgaagaaaatgtgccgcatagtggtgattatgtattaattacggaaggtgtttttcaggggatcaaagcgatataccaagagccagacggcgaaactcgctctattttgctattaaaaatattaaataatgaagtgaaaaaatccgttgataataaagagtttaaaaaagagcctttctaa

SEQ ID NO: 294138 - DNA, 786 bp, Proteus mirabilis
atggcagtaaatgatacccaaccgctgatcagccatttaatagaactgcgtaagcgtctaatgtacagcttaatttcagttctagtggtttttctggctttggtttatttttctaacgatatctatcaattaatctcggcacctttacttgataagttgccgcaggggtcaaatatgagtgcgactgatgttgcctcaacttttttgacgccgattaaattgactattatggtatccgtttttgcttctgttcctgtgatcctttatcaggtatgggcttttatcgcaccagcactgtataaacatgaacgccgcttaatgttaccgttactggtttcaagtaccgtattattttatctcggtatggcgtttgcgtattttgttgtgtttccacttgcatttggtttctttgtgaatactaccccagaaggggttaactttattccagatatcagtaagtatttaagtttcgtaatgacgctgtttatggcgtttggggccgcatttgaagttcctattgcgatcatcttgctgtgttggagtggtgtcacaacacctgatgcattaaagaaaaaacgtccttatatcttagtgggtgcttttgttattggcatggtattaacgccacctgatgttttttctcaaacattattagcaataccgatgtatttattgtttgagattggtgtcttggtgtcccgtttttatgtcaataatggcagaagaaaaacaccagaagaagaagctgaagaggctgaggcgcaagcaacagaacagcagaaataa

SEQ ID NO: 294139 - DNA, 531 bp, Proteus mirabilis
gtgtttgacattggttttagtcagctgctattggtcatggtgataggtcttgtttttctggggccagaacgattgcccgtagcagtaaaaacaattgctggctgggtaagggcattacgctctttggcggcgaatgtgcaaaatgagctaactcaagaactaaaacttcaagagcttcaagagagcctgaagaaagtggaagagaaagcgaatttgcaaacattatcccctgagctaaaagcgtcgatggatgagttaaaagaggctgcacagtctttaaaagaaacttatcaagcacctacaacgccaggatctacagagacagagcagtctgtaaaaaccgactctacggaacctacgccttctgatttagcggcactggctgaagcgaatgaagcgaatgacgatgttcaacacagttccaaaacggtaactgaaaatacagaacatgttattaagccagatgttcctgttactaaaacagtaacagtagagaagaaaacaactgatcaggcaaatggtgagcactaa

SEQ ID NO: 294140 - DNA, 267 bp, Proteus mirabilis
atgggcggtattagcatttggcaattactcatcatcgctgtcatcgtagtcttattatttggtactaataaactgcgcactttaggctcagatttaggtgcttcagtcaaaggctttaaaaaagcgatgggtgacgaaaaccaaaaagagaccaacaacgcagaaaaaaccacgaacgacgcagattttgatactaaaaatttagcgcagaagacttcgacagaagagaagtcaaccactgagagcaaaaataaagagcaggtgtaa

SEQ ID NO: 294141 - DNA, 1638 bp, Proteus mirabilis
atgctcctcagtgagttaaagcgcctttatcatattattaaagtcttcttatcttatgggcttgatgagctaattcctaaacatcgaattaccttgccagcaagattggggtgccgagcactattttggatcaaaaatcagcatgccgataaaccattaggtgagcgcttacgacttgcattacaaacattagggcctgtttggataaaactgggtcaaatgttatcgactcgacgtgatctttttcctcctcatatcgctgatcagttggcgttactgcaagataaagtagctccttttgatggtaaaaaagcgcgacaatatattgaaaaatcatttggtggccctatcgataaatggtttgatgattttgacgaaacacctcttgcttctgcgtctattgcacaagtccataccgctacattgaaagaaaatggtaaagaagtggtattaaaggtgatccgtcctgatattcagcctgttattaaagcggatattcgtttgatgtatcggttagcgaatttattgccatttttacccgatgggcgtcggttacggcctaaagaagtgatccgcgaatatgaaaaaacattacttgatgagctaaacctattacgtgaagcggcaaatgccattcaattgcgtcgtaactttgaaaatagctctatgctttatattccggaagtgtattcggattattgccatgaaaatgtaatggtgatggagcgtatttatggtattcctgtttcagatattgatgcgttaaatgcccaaaataccaatatgaagctattggcagagcgtggggttaaagtcttttttactcaagtatttagagacagttttttccatgcagatatgcatccgggtaatgtatttatcagttatgatcatccggaaaatccatactatattggcattgactgtggtattgtcggctcactgaataaagaagataaacgttatttagcggaaaacttcttagcattctttaatcgtgactatcgtcgtgtggctgagttacacgttgattctggttgggtacctgctgataccaatgtagaagattttgagtttgctattcgcacagtgtgtgagccaatctttgaaaaacccttgtcagaaatttcttttgggcatgtgctactgaatctttttaatacggctcgtcgttttaatatggaagtacaaccgcaattggttttactgcaaaaaactttgttgtatgttgaaggcttaggtcgtcagctttatccacagcttgacctttggaaaacggcaaaacctttcttagaagattggctacatagtcaaattggtattactgcgttggtaaatggtatcaaaagtaaggcgccttactggattgaaaagatgcctgaattgcctgaattggtttatgatagcctgaaacaacacaaaaatatgaagttaacgctagaaaaattgacggaacaaataagttcacagagagtcaaacaaagacagtcctattttttattgggtatgggaacaacgctatttttatgcggtagcctgttttttgtttctggttttaaaacattatttagtgtttttatcagtttaggccttctcgcatggatttggggctggtttaaatcaggtaatgcacaataa

SEQ ID NO: 294142 - DNA, 642 bp, Proteus mirabilis
atggaaaaagccactttttctcatgatattgcttctcaagtgctctatccactgataactgcatcgatggaaacggcacttaatcatgttttatatcaggaaaatgtgcttaaacctgcccgcaatcgccttgcgggcaaagtcttggcgctttctattaatgagtttcctcaatctatctatttaattttcagcgaacagcaagttgatgtgttaactcaatggaatgatgagactgattgcacgataaaaactaaattattaactttaattaaactcactgaccgacaaaagttgtctgaattaattaatcgtggtgatattaccattgaaggcgatatgcaggtggtacaaaactggtctgccttgctggatatggcaccctgggagcctgcgcaatatttagcgccttatattggtgatttggctgcagaaggattatcgcttgcagcaagtaaagggctcaaattattcactacactatttggccgacaaaaagcttatttaagagacgctttgattgaagagtggaaaaccgccccctcaacattagagactgtccatttttatgatgaaatagaacaactggcacagcaaacagccgagttagaaaaacggttaagcaccttggagaaaaaataa

SEQ ID NO: 294143 - DNA, 756 bp, Proteus mirabilis
atgactcaacaatctaaggaaacaacagattttggtttccaaaccgttgacaaagatgaaaaacaaaccatggtggccaaggtttttcactctgttgcatctaaatacgatttaatgaatgacttaatgtcttttggcatccatcgtgtctggaaacgctataccattgaggcaagtggtgtaagacgtaatcaacgtgtacttgacttggcaggtggaaccggcgatttaacggcaaaattctctcgtttagtaggagagaatggtgaagtggttttagctgatatcaatgactccatgttaaaaatgggacgtgagaaactgcgtgatcacggtattgttggtaatgtcagttatgtacaagcgaatgcagaagagctgccattccctgatgattactttgactgtatcactatctcgttcggtttacgtaatgtgactgataaagccaaagcgttacgttctatgttccgtgtgctaaaacccggtggacgtctattagtccttgaattctctaaacccgttcttgatccgctaagtaagatttatgatgcttactctttccatatattaccaagaattggtcaagtgattgtgaatgatgcagatagctatcgctatttaaccgaatccattcgcatgcacccagaccaagaaacattaaaaggaatgatggaagaagctgggtttgatcaggtttcctataccaatatgactggaggtatagttgcattacacaaagggtttaaattctaa

SEQ ID NO: 294144 - DNA, 1341 bp, Proteus mirabilis
gtggatattcagttgttatacgggatcattggtttattaggcggtgtattggtgggggggatcgccgtttggtggcttatccaacaacgcttagccgaaaaagaaaacctattacgtgaaaattatactcagcttgcggttgcacaacaaaaagcattggtgatcccttctttacaacaacagatagcgcacttagagcaagagttacgtgcacaacgtgaaattattacttctcaagaagccgaattaagggaagtgaccacgcgttgggaagagagccgaatatccgctgaagagaaacagcgtttactgcttaatagtgaacaacgactagccactcagtttgaaaatctggctaaccgcatttttgagcaaagtggacgtaaagcgcaagagcttaatcgtcaaggtttaacccatctcctttctccatttcgagagcaactagagagttttcgtcggcaggtacaagaaggttttggacaagaagcgcgagaaaggcatacactggtacatgaaattcgccaactgcaacaactcaatgtcaaaatggcgcaagaagccgttaatctgactaatgccttaaaaggggataataaaatccaaggcaactggggagaaacggtattagcgcggatcttagagtcatctggtttacgcgaagggcacgagtttgaaactcaagtcagtattcgccatgaaaatggcagtcgttatcaacccgatgtgattgtgcatttaccgcatcgtcgagatgtgattattgatgctaaaatgtcgctgattgcttatgaaagatactttaatagcagtgatgagaatgaacaaaaacaagcgctgcatgctcatgtgaactctatcagagcgcacattaaaggcttaagtctcaaagattatcataagctaccgggagtgacttcgttagactacgttttaatgtttataccgatagagcctgcttacctcgttgctattggtcattctccagatttattagaagaagcattgaaaaataatataatgttggttgggccatctactttacttgttgctttgcgtacaatagccgcattgtggcgttatgaataccaaagccaaaatgcgcaagaaattgctgatagagcggctaaaatgtatgacaaattaagacttttcgttgatgatatgcaagggctaggtaatagcattcaaaaagcgcaatcgggctatctattagcgatgaaaaaactctctgaaggtcgtggaaaccttatcagtcaagcagaaggctttaaatccttaggggttgagataaaaaagaccattgataatgatctggttgaaaaatcagcttctgattga

SEQ ID NO: 294145 - DNA, 531 bp, Proteus mirabilis
gtgacagtacaagacattattcataccatcactctgtttgtaaaagagcacgaaatatgggctgtgcctatcgtgttcttactggcatttggtgagtcacttgcctttatctcgttattaatacctgccactgtaatcctattaggcctaggagcattaataggtgaaagtggtctactcttttggccaatttggcttgccgccgccctaggcgctttttttggtgattggatctcctattgggtgggttatcactataaagaaggggtaagaaacttatggccgatttctcgctcaccgcagaccttggtaagagggcatcaattttttaatcgctggggtgtttggggggtatttattgggcgattttttgggccttttcgggcaatagtgcctttagttgcgggtatttgtgctatgccacaacgctattttcagctggcgaatttggcttctgcgatgatctgggcatttggtattctggctccaggggcgtttggcctgcaatggctggcgaaatggataggataa

SEQ ID NO: 294146 - DNA, 783 bp, Proteus mirabilis
atgactgatatcttacaaacacatccttcggtgttgcctttaacaggtgggattaactttcgtgatctagggggaaaaaagctcagtaatggcggtattatcaaacccggcttactctttcgctccggttcactggatagattaacggataccgatcaagcgcttcttattgataaaaatctttttcaaatcttagactatcgtgacacaggtgaaattgttgataagccggatcgagtatgggaaggggcacaatattaccatgctccagccaatccattatcgaaagaagtgtctgctaaccttgaaaaactcaccccagaaatactggaacagtttgatgctaaagcatttatgtttcagctatataaattactacctattaataatccggcttataaacagttggcaacgttgttgaagcaaccagaaaaaggcggtgttatacaacattgtgcagtaggtaaagatagaacgggggtgggctctgctttagttctatttgccttaggggcctcattagatgtggtgatggaagattacttactcaccaatgaaacattagcgcctttccgcgcttatcttttagaagagcatgctaaaacactgagtgaaaatgtggtgaataaatttgcgtatgtttattcagtacaagaagagtttctgcaaacagcccttgccagtattaatcaacactatggcaatatcgatacttggcttgaaaaagatattggcttggatgcgcaaagtagagaaagcttacaaaactattttctcgaatag

SEQ ID NO: 294147 - DNA, 759 bp, Proteus mirabilis
atgtctgatgtatttcacttaggtttaaccaaaaatgacctacagggtgccactttagcaattgttccaggtgatcctaagcgtgttgaaaaaattgccaaattaatggataacccagttcatctggcctctttacgtgagtacacctcatggcgtggtgaaattgatggaaaagcagtgctcgtttgttctacagggatcggtggtccatcaacctcaattgcagtggaagaattagcacaattaggtattcgtactttcttacgtattggtacaacgggcgctattcaagagcacatcaatgttggtgacatcttagtaaccacagcagcggttcgtttagatggcgcaagtttgcactttgcaccaatggaattccctgcagtgtctgactttgaatgtatgaatgcactgtataaagcggctaaagacaatggttcaacggttcacgttggtgttacagcctcttctgataccttctacccaggccaagagcgttacgacacctatacaggtcgagtcgttcgtcgttttaaaggctctatgaaagagtggcaagaaatgggtgtgatgaactatgaaatggaatccgctacattattaactatgtgtgcaagccaaggcttacgtgcaggtatggttgcaggtgttattgttaaccgtactcaacaagagatccccgatgctgaattactgaagaaaactgaaaataatgcattaggtatcgtgattgaagctgctcgcactttaatgaaataa

SEQ ID NO: 294148 - DNA, 393 bp, Proteus mirabilis
atgagcttatttaaccaaatcgcaagcctgttgggcggtgagaaaattaatcaattcaaaacagtactcgaatgggtagaaacccaagggggaattgaaggcttggttaaacagtttaatagcgcaggattaagtgaactgatccaatcttggattagcacaggcagtaatttacctattaatgccgagcaaatcgtacaagttttttcatcgccagtgattaatgaattggctgcaaagatcaatatgaataccgctgaagcctctgatatggctgcacaatatttgcccaaattggttgataaactcacgccagaaggtgttatccccaaagagttagatttaatgagcgccggtatggatatgcttaaagcaaaaatctttggtggctaa

SEQ ID NO: 294149 - DNA, 813 bp, Proteus mirabilis
gtgcaaaatggtattcacctgtcagaaaaaatattaaatgcatttcctactcgagccttaacattatctccattaaaaggggatggcggtttattccgtaccttatttttagtgattgcaatgttagggatgacagtatttagtgcttatcaaattcctaatattgtttatgattatcaaattagtaaaaaccccgtgtttattgatgccgatgttgatggctcttgccgttcaaaactatttgttttaaccaattgtagtgttgacttacgctataaaggtaacgaggtttcacgaaattttacttttcttgattttggcaataaagatatattggttgagccagtagcagatgaaaacgatctgactaaaatgaccgtcgatgtggcaattgataatatttggttacgcttaattagtgcattagtttttactgcattatttgctttttgcgtgatctttttcatttatcgtcaaatgatcagcaataaagtcaaaaaagcattgctttcagtaggcaccaaacctttaaaattaacggctatccccgctaaggtcgttgtgagtaataaacaatttattgctacttataaaaccaatgttgccggaaaagagacttcaattacttattcaggtaataagaaaacgccacccattacattagaaatggaaggcaaaacttatgttttggcggtgtacgagccacaacaaaatattccttatgtattagatgttcctttagctcgaattcaagcaacagaagaagaaaaacaacgttttcatgaggcattaatagaggaaggtattctctaa

SEQ ID NO: 294150 - DNA, 2274 bp, Proteus mirabilis
atgacaattcgcaatcacacattaggtttcccacgtattggcttaaatagagagctaaaaaaggcacaagagagctattgggctggtgatctttctcaggcagaacttctggcagttggtaaagaattacgcgctcgtcattggcaacagcaagctaatgcaggagtcgaattattacccgttggcgattttgcttggtacgaccaagtcttgggtactagtctcctattaggcaatataccgccacgccatcgtaatgaagatggtcgcctagatcttgatactctatttcgagtggcgagaggcagagcaccaacgggtaaacctgcggccgcctcagaaatgacaaaatggtttaatactaactatcactatatcgtgccagaatttcagcaaggacaatcatttacactggcgtggcaacagctactggatgaagtcgatgaggctttagcattaggtcataatgtgaaaccggtacttttggggccgatcacctacttatggttaggaaaagttaaaggacctgagtttgatagattgtcactgttagacgctattttacctgtttatcagcaagtattgagtcagttacagcaaaaaggtatcgaatgggtacaaattgatgagcctgcactggttcttgatttacccattgagtggcaaaatgcttatcaagttgcttatcaagcattgactggacaggttaaactattattgactacctattttgatggtattactcatcatcttgatattattaaaaacttaccggtaaatgggctacatattgatctatgtgcaggacaggacgcattgcaagttatacaccaagcattgcctaaagactgggtgttatcgttaggggtcattaatggtcgcaacgtctggaaagcggatctaactacccgttatcaacaagtagttgcattaaaaggtaagcgtccattatggattggcacatcatgctctttgttgcatagtccaattgatttaagtgcggagactaagcttgatgatgaagtgaaaagctggtttgcctttgcggtgcaaaaatgtgcagaagtggcgttactcgcaaaagcattaaatgcaccagaaggtgaatatgacgaacaacttgcccaatacagtgcccccattcgtcaacgtgaacattctagtcgtgtacataatgcaaaagtggccgcacgcttgcaggcgattaatgcacaagacagtgaaagaacatcgccttatcaacaacgagctaaagtgcaacgcgctcggtttaatctccctctatggccaacgacaaccataggttcattcccacaaactaccgagatccgcacagtacgtttagactttaaaaaagggcgtattgataccactgcttatcgcactaatattagcgagcatattaagcaagccatagatgaacaagagcgcttagggcttgatgtgttggttcatggtgaagctgagcgtaatgacatggttgaatattttggcgagcattttgaaggttatgtctttactcaaaatggctgggtacaaagctacggctcccgctgcgtaaaaccgccggtgatcattggtgatattagccgtcctgcaccgattacggtagattgggcgacttatgctcaatcattaaccgataagccagttaagggtatgttaactgggccggtgactattttatgttggtctttcccgcgtgaggatgtcagccgtgaaactatcgctaaacaaattgcgttagcgttacgtgatgaggtggatgatttacaaaaagccggtatcggtattattcagatagatgagcctgcattacgcgaaggattaccgttacgtcgtgatgagtggcaagcatacctagattgggctgttgatgcctttaagctcagtgcagctatcgctgatgatgagacacaaattcatacacatatgtgttattgcgagtttaatgacattatggaggcgattgccgcattggatgcggatgtgatcaccattgaaacatcacgctcagatatggagttattagaagcctttgaacattttgattatccaaatgaaattggtcctggggtatacgatattcattcgcctaatgtaccgaatgtagaatggattgtaggattgttaagaaaagcgcaatcgcgtatccctgcggaacgtttatgggtaaatccagattgtggtttaaaaacgcgggggtggagtgaaacccgtgcagcattggcaaatatggttgaagcggctagatatttacgccagaacgtataa

SEQ ID NO: 294151 - DNA, 954 bp, Proteus mirabilis
atgatagaaataaaacacttaaaaacgatattggcacttaagcaaacaggctctcttgccaatgcggcaaatcagttacatcaaacacaatccgcactctctcaccagtttagtgaattagagcatcgtcttggttatcgtatttttgtccgtaaaagccaaccactacgatttacaccacaaggcgaagtgttattaagattagcgcaagaagtcctacccattgtgcgccgagcgatagaagagtgtaatgagccgggtaatgctcatttaaatattgctattgaatgccatagctgtattcaatggttaacacccgcattacagcaatatcgccaaacatggccggatgtgaatgtcgacttccattcaggtgtcacttttgatccacaaccggctttattacaacgagaattagatgtcgtactcacttctgatatcttggataaccaacgcctgcactataccgcgttgtttgattatgaagttaagcttgtgttatctccggatcacccgctggctaatcgcttacatattcaaccacaagatttgatctcagaaacactgtttatctatcccgtccaaagagagcgttttgatatttggcgtcattttttacagcccgcagggatcacaccacattttaaacatgtagataacaccttacttcttattcaaatggtggcagcaggaatgggtatagcggcactgccgcactgggccgtagagaattttgaaaaacaaggattagtggtcacaaagaccttaggagaaggattatggagccggctatatgcagctaaccgtacaggtgagcaacatcaaccggcaatacgagagtttatacgcttagcaggtcaacatgccgttaatcatctgccttttgtaaaacaggttggtgtatccaacgccgatggaaccaaagtgatgcaacaatcaggctcgcgcctatga

SEQ ID NO: 294152 - DNA, 873 bp, Proteus mirabilis
atgtggctactggttattacaacgttgttatgggcggcttcttttagtctgattggtgaatatcttgcaggtcaggttgatagttggatctcagtattgattagagtggtgttagctgccattgtctttttgcctttcctacgttggaaaggcattcgccttaaagtgattttattgtatatgggagtaggcgcatgccaattgggtattatgtacctgtttgtgttccacgcttataactatttaaccgtagctgagtttttactctttactgtattaacaccactttatgtcaccttaatttatgatctacttgaaagacaacgtttacgttggggctatgcctttagcgcactactggcggtattaggggcggccattattcgctatgatcatcttagtgatgacttctggctgggattattattggttcagttagccaatattttcttcgccgtaggacaagtaggctataaacgattaatggaaatgcatccacttcctcaacatcatgcattctcttggttttatatcggggcggtagtggttgtgttagtcggctcattatgttttgccgattggcaaaaaatgccaaccacatcgttacagtggggggtattgctttggttaggtattggtgcttctggaataggctattttatgtggaactatggggcgacacaggtagatgctggaacccttgcgattatgaataatatgatggttccagcgggattattagtgaacttctctatttggcaacagcatcctaattggccaagtttcatcataggcgcgagcctgattgttgcatcactttggttccatcggcgttggatacaccaacctgttttacaaaaggcagatgattaa

SEQ ID NO: 294153 - DNA, 1650 bp, Proteus mirabilis
atggaaattttctttactattttaattttaatattggtagtttctgtttcaggtgtcattaccaaagttattccttttcgcattccattaccattaatccagattgtgatcggggcacttttggcttggcctcagtttggtttacatgtcacctttgatcctgaactcttcttagttttactgatccctcctttactttttgttgatggatggaaaacccccacacgtgaatttatccaaaatggtcgagagatctttatccttgtgctggttttggtaatggtgacagtagtaggtattggttaccttatttactggataatgcctagtattccacttatttctgcgttcgcgctcgccgcggttctctcgccaactgatgcggtggcattatcctcgattgtcggtaaggggcgaataccgaagcggatcatgggggttttagaaggcgaagccttaatgaatgatgcttcgggtctggtggcgctgaaatttgccgttgctgtggctatgggcacgatgatatttaccgtgggtggcgcaacctttgagttttttaaagtggcaataggcggtttattagcgggtattgcggtaacgttagtctatagtaaatctctgcgattgatgagccgttggagtggtgatgatcctgccactcaaattgtctttatgctgctgttgccttttgcttcttatttgattgctgaacatattggcttttccgggatccttgctgccgtggccgcaggtatgactatcagtaaatcaggtgtgatccgcaatgcaccattggcgatgcgcttgcgtgcagatagtgtctggtcaatgttagagtttgtctttaacggactggtctttattatgctgggtttacagcttcctgttatttggacaagctcggttattcaagctgatctcgatcctgaagttgaagtatggatgctgtttgccgccgtctttgttatctattttgcgttactgattttacgttttacatggttatggctaatgaagaaaatcagccatctctttatgaaaaaacatccccttgatttcgccacttatacgacgagagaattatggctgtcttcttttgccggggtacgtggtgctatcaccttagccggtgcgctctctataccactatttttaactgatggcagtactttccctgggcgctatcagataatctttatcgcggctggggtgatcctattatcgattttggtcggtattatttcattacctttcttactaaaagggattaaagctaccgataaagaagcggataaaaatgaagtacgttatgccaagaaagtcatggcagaagtcgctattgttagcctcaataagatggaagagcgtttagctgcaagtacagaagagcaacttgatgcggaagaaattaatgaagtagcttctcgagttgccggttatttaagacgacgtaccgcggatcaggacgagatgatgcacaatatgttggtggaagatctggaaagacgttttcgcctaacggcattgcgtgcagagcgtggagagctttatcacttacgtgcaacgcgtaaaattagtaacgaaacactacaacttttgcttcatgaattagatttaatggaagcgctgttagttgagaaagacagttaa

SEQ ID NO: 294154 - DNA, 504 bp, Proteus mirabilis
atgcatcagatagaaatacgacatggtgagcctgaagatgctatagcaatacagcaattgtatacacatccagacttatatatttgtacttgtcagttcccttatccatcagtcactatgtggaaaaaaaggctaattgaattttctgaacaaaatattccacattttgttgcttcttttgacggtcaaatcgcaggtcatttggcgttgatcatcgacaatcatcctcgtcgtcggcatatcgtcagctttggtattggtgttggtgctgagttttcaggaaaaggtataggtaaagcactcattaatacggcaattgattatgcttttaattggttggctgcaacacgtatcgagctagaagtttatgctgataatgaaagaggccttcatttgtataaaaaattaggttttgaagtggaaggcattcgtcgtaatgcagccttcagagaaggtaaatattgtgatgttgtgatgatggctcagctaaaaaatatcgaataa

SEQ ID NO: 294155 - DNA, 1347 bp, Proteus mirabilis
atgtctgctaatcaatcagcaaccacaggtaaactggataattattttaagcttaccgcccggggcactacggttcgtaaagagatgatcgccggtttaacaacctttttggcgatggtctattccgttattgtcgtacccagtatgctagggcaagcggggttcccccacacggcggtatttatcgcaacctgtttagtggcaggatttggttctctgttaatgggattgtgggcaaatctacctatggcgattggttgtgccatttcattaacggcgtttaccgcctttagtttggtacttggtcaacatatctctgtacctgttgctttgggggcggtgtttttgatggggtgcctatttaccctattttctttaacagggatcagaacgtggatcttaaaaaatattccgattggtatcgctcatggcgccggtattggtatcgggctatttttacttttgatcgcagccaatagtgttgggttagtggtgaaaaatccattagccggattacctgttgcgatgggagaatttacttctttttcagtattaatgtcattggccggtcttgctgctatttttggtctagaaaaacgtaaagttcccggtggtgtgttattagtcattattgcgatttcgattattggattgatttttgatcctaacgtgaaataccaagggttctttaaaatgccacaattaggcgaagagggccttgcactattatttgccatggatattaaaggcgcattacaaccacttgttttacctagtgtattagctttagtgatgacggctatttttgatgcgacaggaaccattcgcgcagtggcgggacaagctaatttacttgataaacgaggacaaattatcaatggtggtaaagcgttaacttctgattccgtgagcagtatatttgctggggcaattggtgcagcacctgcagcagtatatgttgagtctgcagcgggtactgcagctggtggtaaaacagggctcactgcaactgtggtcggtattctctttttattgatcctctttttatcaccactatcttatttagttcccccctatgcgacagcccctgcattaatgtatgtgggtttattgatgttaggtaatgtcactaagttagattttagtgattttgtcgatgcgatgtcaggtatggtgtgcgcggtatttatcgtattaacgtgtaatattgttacaggcattatgttgggttttggctgtttagtgattggccgtatttttgccggtgagtggcgtaaacttaatattggtacagttctaattgctattgctttagtggcattttatgccggacactgggcaatttaa

SEQ ID NO: 294156 - DNA, 1188 bp, Proteus mirabilis
atgttgcaacaaaattatcgtcagtccgagctttttgctattactactattacagtcagtattgcggtgatagggattgttattggattaactattccgatggtggctttacggctaaacttggcggggatcagtgaatctattattggtctgatttcagccgcacctgcaatgggaatgttaatcatctcaccctttgcacgctatattgtgcaatggcttggtaaacgtttagcgatgttattagcaacgattatatcagccattagtctattgcctttaatggggagtttgccattagaattcctgttcccattacgactaatcaccgggattgccagtggtgtgatgatctgtttgggggagacatggatcaatgaacttgtaccggataataagcgaggtcgtattttagcgatttatacgaccgtgtttactatcagccagttgctaggcccttcaattattgcgttatatggcgttgctgataaaacaccgatcttaattagcgtactgcttcatattatctctatcgtgctatttttaatgatggatcagaaagtgggcgataaattagctaaagactcagaagagtcgcacttttctattcttcgttttattaaagtggcgcctgcgatatgtggtggcattatcttttttgcattttttgatggcacagtgttgtctatgttccctatttatgggctaagtgttggtcatagtgaagcgattgccgccatgatgatcagtgctattttggcgggagatgccataatgcaaatgccatttggttggcttgctgatcatatgaatagaacacggctataccgaatttgtggagtcattacattattagcaagcttattattgcccattgctatgccacatactttagttatttggccactattattagtgcttggtgcaacggcgggagccatttataccattgcattggtacaaattgggcaatacttttcaggaaatgatctgatgatagcaaatgcttcagcggcgatgttatggggcattggtaatctttctggtcccattttagccggtgctatgtctgaaatctctccatctgcgttaccttttttattggtggttatgacgggattatttttagtttcgacgatggatcgctttaacttgcatgtcgacactctaaatcgtcatacatcataa

SEQ ID NO: 294157 - DNA, 579 bp, Proteus mirabilis
atgaacccacaatcaccgaaaaagacaaacgaataccttggtaataaggttaagcagttaagacaatctcgaaacttgtcacttaatgagttatcaagaaaatcaggcatatctaaagcggcattgtccaaattagagtctggcgattctaatcctcgcatcgataccttagaagctatcgcgatagcccttggatttccattaggtgatttatttagttttacccgcgaagaatatcctcgcttagagcgacataagcctatcgttggcgactatgcacaagaatttaaattccgtattggcatcggcaatattactgaaatttggcatattgagatgaagcacggggcaattattaatagcccagcccatgccgacggcacccaagagcatattatggtctattctggcaaactgatgatgcgttttgctaacgatgaaaccgtattattagaaaccggcgatttttatgcctttcatggtaatgcgccacactcttatatttgtgtggaaggccatatgcgtgcatcagttatcatgtctagccccaatcaacaacactatcatcatcgtccttaa

SEQ ID NO: 294158 - DNA, 897 bp, Proteus mirabilis
atgagtgcaggccacgagcacggtgatgtcaaagcgctacctgaatcacgtctgttaattgcttttgcattaacaggctcttttatggtgattgagtttattggtggctacttaacagaaagtttagccttgatttctgatgcaatgcatatgatgacagatgcatttgcactcttacttgctcttatcgcgatccacgcaggtagaaaagcagcagatctattcagaacttatggctatgctcgttttgaaatattggctgctgcgatgaatgcactgatcttaatggcggtggctttttatattctttatgaggcttatcaacgactctcttcccctcctgacattcagtctatgggtatgcttgttgtggcaatagcagggcttatcattaattttatctcaatgaaaatgctcaccagtgcaaaagatgaaagcttaaacgttaaaggggcttatcttgaagtgtgggcggatatgttaggctcagtgggcgtcattattggggcggtaattatttggctaaccggttggcaattagttgattctattattgcggtattaatcggctttatggtctttccgcgcacgtggatcttattaaaagagtgcctgaatattttattagaaggcgtgcctaaaggcattaatttaactgaggtaacagacaccattaataataccgcaggggtggctagctcccatgatttacatttatgggcactgacgcaaagcaagttgatcctcagtggtcatattgtctatcaacccaatgtagatagtgaagcattacgccttactattgataagcaactacgtgaacaatttcatatcaatcatattaccttacagatggaaagtgaggataaacaacatctggaagataatcatcattag

SEQ ID NO: 294159 - DNA, 285 bp, Proteus mirabilis
atgtcactacaatcacaacctatcgcactagaacttattgttcgtaaccatcccggtgtgatgacccatatttgtgggctatttgcgcgtcgtgcatttaacgtcgatggtattttatgtttaccaatgaaaaacagcgataaaagtcgtatttggttattagtacaaaaagatgagcgtttaatgcagatggtgagtcaagtggaaaaacttgaggacgtaaaagaagtgcgttttagtgatgatctgcgcgtttttgaacagatggaaagttatttaaattaa

SEQ ID NO: 294160 - DNA, 1695 bp, Proteus mirabilis
atgggtgctcaacaagataatgccacaggaaaaaccttcactggtgcgcaattaattgtttatttactggaacggcaaggtatcactacggttgcggggatccccggcggagccgctcttcctttgtatgatgcattaagccaaagtcagtctattcgccatattttgacacgtcatgaacaaggggcgggttttattgcccaaggtatggctagagcaaatggtcagcctgcggtgtgtattgcctcaagtggaccgggggcgacaaacttagttacagccattgctgatgcaaaattagactcaattcctttggtttgcattacggggcaagtctcttcagccatgattgggactgatgcgtttcaagaagttgatacctatgggatgtctattcctattaccaaacacaactatttagtccgcgatatcgcacagttgccggaaattatctgtgatgcgtttcgtttggcaatgtcaggtcgccctggacctgtatgggttgatgtacctaaagatattcaacaagcgactatcaccttagataaattgccaccgataccacaaaaagatgcagctccagcctttaataccgatttggtgatccaagccgcgcaaatgattaaccaagcgaaaaatcctgtgctttatttagggggcggtattattagctctgaagcgtgtaaagaagcgattgaattggcggagaaaaatagcctacccaccacgatgacgttaatgggattaggtttaatgccaccaacacacccgctatatttagggatgttaggtatgcatgcggcacggagtaccaactttattttagaagaagccgatctgctgatcgtattgggggcgcgatttgatgatagggcaattggtaaagcagaaaagttttgccccaatgcgaagatcattcatgttgatattgatagggcagagataagtaagatcaaacgtcctgatattgccattcatgcagatgctaaagcggtgctgtcgctgttattacctttaattaatattaatcagcgcaacgaatggatagatagagttaataccttaaaacaggaatatcccttagaaatgaaaaactcacacaatattcttagcggttacggcatcgtacttgctgcggcaaattgtgttgatgatgaagcgattattaccaccgatgtagggcagcatcagatgtgggttgctcaagcttatccactgaatcgaccgcgccaatggttaacatcaggaggcttggggacgatgggatttgggttgccggcagcgataggggccgcattggcagagccaaataaaaagatcctctgtttttcaggggatggtagcatcatgatgaatattcaggagttagcaacagccgctgagcatcagttagatgtaaagattattttgataaataatcaagcattagggttagtacaccaacaacaaacactcttttttgatgagcgtatttatgccgcagcctacccttatcaaacggattttattcgtattgctcaaggatttgggttggatacttgtgatttaaatcaagaagcagatcctcaggcggcgctacaagcggcaattgctaaacctgggccttgtttaattcatgccatgattgatattaacgaaaaagtatttccaatggttccgccgggggcggcaaatatcgagatgataggagcttaa

SEQ ID NO: 294161 - DNA, 789 bp, Proteus mirabilis
atgttatttatcaccatattagctgttggtgcggcgattggcttaattattagcacaacgggggtaggtggtggtgttattgttttacctatattaacgtatttctttggtatgaatgcattaatggcggtggcaaccgcaaatttactttcaatgttgatgaaagtgacatcctcatatatgcatttccgtttggggaatattccctttaaacgagccatgatagtcctcggcattatgttgccaagtacttttttagcgagtttactcgtcaattatttaggttcattaacgcaatatcagcagcaagttgagtgggggattaatgcgctggtggtggctgccattattttttctctctttttgtttattcaaagaatgtttttttcttcacctgtgatagctaaacagataaccccattagcgcctcttaatattaaggcactgttattgccggcgattgcagcaggtgttgttttaggtgccacaggggtcggtggtggtgtggtggtgttacctttattattgcgttacgccaatctatcgataaaacaagcgataggtacttcgatttttacgaccactctattatcaggctcttctgcattggcttatatgcaagatggccataccgatatccatttagcattgttgctgtttcttggctctttgatctctattcctctatcaaaatggctattgattaaaatgccggatagggtatttcagtatgcaacgttgtttttaattttatgcagcgctttcatgatgttggcgagattgttttaa

SEQ ID NO: 294162 - DNA, 852 bp, Proteus mirabilis
atgtcaacactgactaagaaacttgaaaatttgcgcttacaaggcaaagggacagagcaacgtctcgcccactatttattagaaaatagcgataatattgccagtatgaatgccgcagaattggcacaaaaagccggtgtcagtagtgcttctgttatccgtttttcccgccaaatggggtatggcggttatcctgaatttaaaattgattatctctcagaggaaaaacaacaaaaaagcagtagtgatattctttatgccaatttagccaaaacagactcgactgagcagattattgctaaaacaggacatctatttactaccgccattcaggattcgatagcgttactggatgcggcgacgatagatttactcgctgagaaaatgatcagcgctaaacggatcgttttatttggtgtgggcgcatctgcgatcgttgcgagcgatatcttccataaactgatccgagtgaataaaaacaccttatttagtgcagatctccatgcgcaacttgcttattcagcgaatttatccgcggatgatttggcgattgctgttactgcaagaggcaatactgcggatattaatcgaatgctgaaagcggcaaaacaagaaggctgtatcacagtggctttaacacgttttgggcaagatgaagctacgcgcttagcgaattacacattaccttatttttatgatgagcaacattcacaattgggggtgatcacaccgcaagtattgcaaatggtcgcttttgatgtgctgttttttaaatatatgacactggcaaaaggctcagcggaaaaagcgctattaaaagggcgacaagctgtaatgcaaggaaatcaataa

SEQ ID NO: 294163 - DNA, 1365 bp, Proteus mirabilis
atggctaataaaatagaacatctcgacaccttagcatcagaaatagaaaaacaggctggtgggtttagcaatatcgcaaccttaacacattgcatgacccgtattcgtttgatcttaaaagatagttcgctatttaataccgaagcattaaaacaagtcgaaggtgtcaaaggcgtggtatttaatggcgagcaacatcaagtcatagtaggaatgggaacggccgccaaagtttattcaatcatgaataaacgtatgcaaaaaaacacagataatagcgaagaagcccctgcgtcaacaccagtgaaaaaagggttttccatacgccgtatgctaaatacgttggcggctatttttgttcctactatcccagcattaattggctgtggtttaattatggggctaattaatattattcgtttagtggcacccggcttagttgatcagtttcctgaactctttaagctatttaaactgatcggaagcaccgtatttgcttatctctctattatgataggtataaatacggctaaagagttaggggcttcaacctccataggtgctgttatggcgggattattagccatgccgggactggctgatatcacattatttggtgagaaattacagcctaatagtggtgggatcttcgcggtcttaatggtggtggtattttcttcaaaattagaactatggtttcgcagtattgtaaaagagagtcttgatcttattttaaccccctttgtcactattttagtttctgcgttagtggcaattatggtattccaacctataggtcattatctgaatcaactattagcgcaaggcgtatccttatcactattaaatcatggtggcggtgcggttgtgacaggcgcagcgttagggggcagtttcttattcttattactaaccggtctacaccaaggtttaataccgatccacactgaaattttaaatacctttgggttaaattacctattccctattttagcaatgggcggaatggggcaagtaggctcttgtttctgggtttatttacgtactaaaaaccaacgcttaaagaaaacgttaatgggtgcgttgcctgtcggaattttcggcgtgggtgagcctttattatttggtgtctctttacctttaggtaagccctttattgcaggttgtattggcggggctgcgggtggtgcattaatggcttattttcaggttgggatcattattccatttggtactgctgggttatcattaattccactggtgggggatgggcagatcatcaaattccttatcgcagtattgggggcttgggttgtcggttttattgccagtatattaatcggatttaccgatccagaaaaataa

SEQ ID NO: 294164 - DNA, 915 bp, Proteus mirabilis
atgaaagatgatgcattgagtttatgtcttcaaaatgaaagtaaccaagagaccacacaattttctgagctaagtaccttagcgttagtttcgttaattaatagtgccgatatcaccgtggcctatgccgtaaagaaagaattacccgcaatcgcgaaagccgtagacaaaatttgtgaacgtctacgtcaagggggacgcattttttatgtcggcgcaggaactagtggccgattagcggtattagatagcgcggaatgtccgcctacttttggcgtttctccctcactggtacaagccattattgctggtgggcatgatgctatgcttcaagccgttgagaatattgaagataatcaacaagctgctatcgaagagttgcaacgccgtgaggtaaattctaacgatgtcgttattggtatcgctgccagtggtcgtacgccatttacagtggctgcattacagtatgcaaagcagatcaatgcattaacgctctcaattactacccgcggtaaaggtatgatgagtgaaatagccgatttatccatcgcgccagatgtcggcgccgaagtgttaacaggctcgacaagaatgaaaagtggcacggctcaaaaaatgatcttaggtatgctaagtaccagtgtaatgactcgtttaggtaaggtgcataaaaacctgatggtcgatgtggtggccagtaatgaaaaattacagcgacgtgctgaaggtattgtgagtgaagtgtgtgggatcacaacacaaaaagcagcggagttattaaaaatggttaattatcatccgcgaaaagccattttaatgtatgagcttcatctgagtgtagagaaggttgagcaaatgacacaacgctatccttaccactctttacaacaacagttagccctatttaatgaataa

SEQ ID NO: 294165 - DNA, 921 bp, Proteus mirabilis
atggatatcgcagtgattggttcaaatatggtggatttgatcacctatatagataggatgccaaaagagggagaaacccttgaggcgccagcatttaagattgggtgcggcgggaaaggggcaaatcaagcggttgccgctgcaaaattaaattctaaggtgatgatgttaaccaaagtgggggatgatattttcgcagataacaccatcatgaatttagagtcttatggtattaatactcgttatgttgaaaaagtgcccggaaccaccagcggtgttgcacctatttttgttacctctcaatcatccaatagtattttgatcgtaaaaggcgcgaatcagcatctatctgctgaagatatcgatagagccgcggtgagtttaaaaaaatgtcgtatgattgtgctgcaattagaaatcccgcttgaaacggtctatcacgcgattgagtttggtaataaacatcatatcccagtattgtttaaccctgcaccagcatcgaaagctttagatctcactatcgccgcacaatgtgatttttttgtccctaatgagacagagctggaaattttaacgggtatgccaattaatacattggatgaaattcgagaagcagcctactttttactcgaaaaagggtttaaaaatatcattgttacattaggtgaaaaaggggcgttatgggtgaatggggaaattgagaaatatatccccgccattgaagttaatgccgttgacaccagcggtgctggagatgcttttattggctgtttttctcattactatgtgcataccggcaatattgaagaagcgttaaataaagcggttatgttttcgggtttaagtgtcacaggaaaaggcactcaatcttcttatcctagtattgaagaatttagcgaatttttaagctcagcaaaatag

SEQ ID NO: 294166 - DNA, 669 bp, Proteus mirabilis
atgcgtccattagctaattatatcgatcatactctacttgctgcagatacaactgaagcacaaatcaaacaattatgtgctgaagctgttgaacacggtttcttctctgtgtgtattaacacttcttatatccctttagcaagaacttgcctaaccggaagtgatgttaaagtatgctgtgttatcgacttcccatttggtgcaggcctaacagcaaccaaagcatttgaagcggcagaagctattcgccaaggtgctcaagaagtcgatatggttatcaacattggcatgttaaaaagtggtcgttttgattttgtaaaacaagatattgccgcggtaaaagccgcttgcggaaatacaacactaaaagttattctagaaacatgcctattaactgacgacgaagtacgtttagtttgtgaaatgtgttgcgaagtcggtgttgattttgttaaaacatcaactggatacagtacaatgggtgccacagaacaccatgtcgctttaatgcgtcaaactgtcggtgacaaaatgggcgtaaaagcgtcaggtggtgtacgtgatcgccaaacagccttaaagatgatcaaagcgggggcaacacgtattggtgcaagtgccagtgttgcgattgtaacagattcagatgcaccagaatcaaattactaa

SEQ ID NO: 294167 - DNA, 777 bp, Proteus mirabilis
gtgatagagaccaaacagcatgaacgtttgcgtcgccttagcgaatgcataaaacgctcaggccgcatccatctcaaagatgccgcgaggatccttgaagtatctgaaatgaccattcgtcgtgatctcagttcagatgttgaaaacccctatccgatgtcactgcttggtggctatattgtcgcgttggcacaacctcatagtaacctaatcacatcgactagtgatattatcaccccggatcaaacccaagaattacatattcctaatcttgctgcgggcatggtgtctgaaggtgatgtactattttttgataatggccaacttattccgacattaattgagcttattcctgagagtttacactttactggtatttgttattcgcaccgcgttttcctggcattaagccgaaagaaaaatgcgaccgtactactgtgtggtggtgaatatcgccctaaaagcgactcattttataatcccctccagccttgttaccttgataacataaacccgaaaaaagcctttatttccgcagagggtgtccacctcgattttggtgtttcttgctacaacatcgatgatcttcatatgaagagaaaagcgatggataaatcgattcgcaagatcttactcaccaaataccacgccttcgatgaaaccgccacaggcaatatgggtgatttagcgcaatttgatgtcgtgatcaccgatagaaaattaacagatgattacgaagcctattgccgaaaaagctcagttaaaattatttattaa

SEQ ID NO: 294168 - DNA, 1137 bp, Proteus mirabilis
atggacaagtgtgttcattatttatctgatcgcgtttgttatatcgcctcagataaaacttggattgaaagtaaagcaatccaacaactagtaacaaccgctcaacttcctgaaatggcttatgtcactggcatgccagacttacatcccggtcgtggttatcccattggagcagcttttttttctgttaaccgtttttaccctgctttagtcggtaatgacattggctgtggtatgacactgtttcaaacagaatttaaccatagcaaactcaatttagataaaatagaaaaaaaattgagcgaaatgagtgatatcgcgcccatcgaatggttgatagataatttacctgcagatatgcaaaatcatccatttgctcactcattaggctctattggtggtggaaatcattttgctgaattccaacaaattgaccaagttattaatcaaacattgtttacaaacagtggtattaataaaaaacaattattgctattggtgcatagtggttcacgtggtttagggcaatctattttacgtgctcacacagagcaatttggccatcaaggattggtcgcgaatacagacgctgccaatgactacttacaagcccatgaccatgctcttaattatgctaagctcaatcgccacttgattggccatagaatgatggaacaaattcatacacaaggaacggttattactgatgttaaccataatctggtagagccttgcgaattatataatcaacaaggatggttacatcgcaaaggggcgactcccgctcatcacgaaattgtggttattcctggttcacgtggtgatcacagttatctcgttaagcctattatctctgaattaagccttcattctctaccacatggtgcgggtagaaagtggatgcgaactgagtgtaaaggccgtttatcacatcgatttacgccattacagctctcacgcacagcactaggtagccgtattatttgtgctaataaacaattaatttatgaggaagcgcctcaatcgtataaatcaattgaaactgttatagaaagtatgaggagtcttggtttaattgaggttatcgcccgcttaaaaccggttattacttataaaaccagtggggagatagcataa

SEQ ID NO: 294169 - DNA, 612 bp, Proteus mirabilis
atgttattacaattttcttcagcacaaggccccgaagaatgctgtatagcggtagaaaaaacattgaattattttctaaccgtcacagagcaacggcaagttgatgtgataattcttgagcaagagccatctcgttatggtttaaagtcagtattagtatcgcttaaaggtgcagaggctaaagctatcgcacaacaatggtcaggcactgtgcaatggcaatgtacaagtactttaagacctaaacataaacgcaaaaattggtttatcggtatcgcttattttgacccaccacaagaaatccaagacaccgaaattttatttgaaaccatgcgtgccaatggccccggaggacaacatgttaataaaacgagttcagctgtcagagcgacgcatattgcaacaggcattagcgtcaagatccagtctcagcgaagccaacatgctaataaaaaattagcgaaacagcttattgcttggcatctaactcattatctatcccaacagcaagcttcatttaataaccagcgacacctagctcatcaccgagtgatccgtggtaatgcaactcattgtttttatggacgtgagtttttaccaataacgaaataa

SEQ ID NO: 294170 - DNA, 258 bp, Proteus mirabilis
atgatgatcaatacagtggtagggaaaagaatacaaaatagaagaaaagaattaaatatatcaagttcgaaaattgcattacagttagggatgacagagcaatattatctaaaattagaaaatggttatactaagataaccgttgatgaattaatatgtattgcgattattttgaaagtgtcaccacaaagtttattactaaaatcaactgttagtcagcaaaataaggatagccaattaaataattattatcactaa

SEQ ID NO: 294171 - DNA, 1323 bp, Proteus mirabilis
atgaaagaacaattatcttcctactggaaaatattaattgaagctgttaagcaacaagtgaagccagctttaggttgtaccgaacccatttcacttgcattagctgctgccactgcagctcgttatctgcaacataatatcacccgtattagcgcagaggtttctcctaacttaatgaaaaacggaatgggagtgactgtaccgggcacgggtatggtgggattatctattgcggctagtttaggggctgttgctggagatagtgaagcaggtctagaagtattaaaaaatgccacaccagaacaagttgagttgagtaaaaatctattaaattcaggcatagtctgcgtatcaataaaaaaagcctgccaagaggtgctttactctgaggttaccgttgaagatggtgaaaacagtgccaccgtcattattgcaggtgatcatactaatattgttaaaattatccataatggtcaggtagtgcttgataaattatcatcacaatctgaacaaacggcctcgccttgccaaattaagcaagccttaaccaacactaacacacgagaaatctatcagtttattactcaagctcctgtagaagaaatttcttttattttgcaatcggcgcaattaaatgacgcattatcaaaagaaggcttgaacaatacttatggcttgcatattggtcaaaccttacaacgccagcaacaacgtggcttgttagctaaagatctgctttctgaaattatgatccgcacttcagcggcttctgatgcacgtatgggcggtgccgtactcccagcaatgagtaactcaggttcaggaaatcaaggtattgcagctacaatgcctgttgtggtggttgctgaatatttacaggttagtgaagaaaaaatggcaagagcattaatgctttcacatttattagccatttatattcaccacaaattcccggcactttccgcactatgtgccgcaacaaccgcatcaatgggagctgctggtgctattgcgtggctaatggaagaacgctatgaacccatggcaatggcaattagtagtatgattggcgatattagtggcgtgatttgtgatggtgcctctaacagttgtgcgatgaaagtgtcgacaggagcaagtgccgcttataaagcggtattaatggcgctagatgatacctgcgtgacgggtaatgacggcattgtcactcatgatgttgatatgacaatcgagaatctttgtgcattagctagtcgagcaatgcaacatactgatgtacaaattattgaaattatggaatataaagctgttgctaatggctaa

SEQ ID NO: 294172 - DNA, 978 bp, Proteus mirabilis
atggaacctattgcagtaacaatattgactggctttttaggatcgggaaaaacaacgcttttacgccatatgctcaatgaggagcatggctataaaattgcggtgattgaaaatgaatttggtgaagtgcctatcgatgatgaaattattggtgatagagcaacacaaataaaaacactcaccaatggttgtatctgttgtagtaaatctaatgagcttgaagatactttgctcgatctctgcgatagtcttgatcgtggtgacattgtgtttgatcgcctagtgattgagtgtacagggatggctgatccggggcctatcacacaaacatttttttctcatgaagtgatctgccaacgctatttattagatggcattattacactggttgatacaatccatgctcagcaacagttagatcaatttgctattgctcaatctcaaattggttatgcggatcgcattctattaactaaaacagatattcaacctgcgagccaacaattacttgctcgtttaagacgtattaatgctagagcgcctacctatacggtgatcaatgggcaaatagatttagcactattatttaacgtaaaaggctttatgttgaatgatactttagaggtcaagcaacccctgtttcgttttcagccagaaaaacaagatgatattcagtctattgtactaaattttgattatcccgttgagttacaagcagtctctgatgttatggagtctttgttattgagctttgccgataacttattacgttataaagggatattaaatattaaagatagtcctaaccggttgttattccaaggagtgcaacgattatatagcgctgattgggatagaccttggcaagagaatgaaactcgtcaaagcaccttagtctttattggtattcatctgcctgaagaagaaataaaagccagtttcgatgcgttaatgcataacactaaagaatatgagtaa

SEQ ID NO: 294173 - DNA, 207 bp, Proteus mirabilis
atgtttggtaatttagggcaagctggaaaatatctaggacaagccgctcgtatgttaataggtattcctgattatgataactatgtgcagcacatgaaggacaaccatcctgataaaccagtgatgacctataacgagtttttccgtgaacgtcaggaagcccgttatggtggcggtgatggtaaaggtggtttccgctgttgctaa

SEQ ID NO: 294174 - DNA, 2151 bp, Proteus mirabilis
atgaacaaaaatacatttcttaagcacataccttgggtgatcctagggattattggtgctttttgtctgtcagtggttgcactacgccgtggtgaacacgtcagtgcattatggatagttgttgcttctgttgcggtctacttagtcgcttatcgttattacagtctttatattgctcaaaaagtaatgaagctcgatcctactcgagccactccttcagtaattaataatgatggtttgaactatgttccaactaatcgttatgtcctctttggtcaccactttgccgctattgcgggtgctggaccacttgttgggccagtattggctgcccaaatgggttatttacccggtacactgtggttattagctggggtggtgcttgctggagccgtacaagactttatggtgctgtttatttcgacgcgccgtaatggtaactctctcggtgagatgataaagaaagagatggggcctgtaccgggaactatcgcgctgttcggttgtttccttatcatgatcatcattcttgcggtgctagccctgattgtagtgaaagcattagcagaaagtccttggggagtattcaccgtctgttcaacagtacctattgccctatttatggggatctatatgcgctatattcgcccaggtcgtgtgggtgaagtttctgttattggtattgttttactgattgccgctatttggtttggtggcgttatcgcgagtgatccttactggggaccagcattaacctttaaagacaccactattacttttgggttgattggttatgcgtttatctctgctttactaccagtatggctgattttagcccctcgtgattatttagcgactttcctaaaaattggtgtaattgttggtttagctatcgggattgttattcttaatcctgagttaaaaatgcccgcgatgacccaatatattgatggtacaggaccattatggaaaggggctctattcccattcttatttattactattgcttgtggtgcagtttctggtttccacgcactgattgcatcaggtacaacgcctaaattgatcgccaatgaaatggatgcgcgttttatcggttatggtgcaatgttaatggaatcatttgttgcgatcatggcattagtggctgcctctattattgaaccgggtctctattttgcgatgaatacaccgcctgccggattaggcattacaatgccaaatctgcatgagttagggggtgaaaacaccgcaatgattatggatcaattaaaagatgtcaccgtacacgcggctgcgacagttagctcatggggctttgttatctcgcctgatgagattttacaaaccgccaaagatataggtgagccttctgtactcaatcgtgctggtggtgcacctacattagcggtgggtattgctatggtgttccataaaattttacctgcggcagatatgggcttctggtatcactttgggatcttatttgaagcactctttattttaacagcattagatgcaggaactcgttctggtcgttttatgctgcaagacttgttaggtaattttatcccatacttgaagaaaacagactcttttattgctggtgttatcggtacagcaggttgtgtcggtttatggggttatctattgtaccaaggtgttgttgacccactgggtggtgttaagagcttatggccactgtttgggatctccaatcagatgttagcggctgttgcacttgttttaggtacggtcatcttaatcaagatgaagagaacgaaatacatctgggtaaccgttattcctgcagtatggttattaatttgtacaacatgggcgctaggattaaaactgctcagtaatgatccgcaaatggaaggtttcttctatcttgctaatgagtacaaagcgaaaatcttagccggtggggcagatcttactgccgcagaaatcaccaatatgaatcacattgtgattaataactacaccaatgcaggtttaagtattctgttcttagtggttgtttacagcattattttctacggtatccgtaccgcaatgaaagcacgtaaaaatccgaaagagtcagcacaagaaacaccatatgtacctatgccaaaagatgtgaagatatcttcaggtcattaa

SEQ ID NO: 294175 - DNA, 606 bp, Proteus mirabilis
atgcaaactagccctcttcttgaatcattaatggaagcgttgcgttgtttacccggcgtcgggccaaaatcagcgcaacgaatggcttttcatctgcttcaacgtgatagaagcggaggaatgcgacttgcacaagcattaacgcgtgcaatgtctgaaattggtcactgttgtgattgtcgaacatttactgaagaagagcgttgtacgatctgtgctaatgctcgacgtcagcaaaatggtcagatatgcgtagtggaaagcccggcagatattcatgctatcgagcagacagggcagtttgcaggtcgatactttgtgttaatgggacatctatctccgctagatggcattggtcccatggatattggcttagatagacttgaagagcgtctaagccaagagtctatatcagaagtgattttagccaccaatcctacggtggaaggtgaagctacagcaaactatattgctgagatatgcgctcaatatgatattgctgctagcagaatagcacatggcgtgcctgttggtggtgaattagaaatggtggatggtaccacgttgtcacactctatcgcgggacgccagaagatccactattaa

SEQ ID NO: 294176 - DNA, 330 bp, Proteus mirabilis
atgttcggaaaaggtggtttgggcaatctgatgaaacaggcccaacagatgcaagaaaaaatgcagcaaatgcaagaagagatcgcaaacttagaagtcaccggtgaatctggtgctggcttagtgaagatcactatcaatggtgctcataattgccgtcgtgttgaaatagatcctagtctgctagaagatgacaaagagatgttagaagatctgattgctgccgcctttaatgatgctgcacgtcgcattgaagagacacaaaaagagaagatggcatcagtctctaatggtatgcaattgccaccaggctttaagatgccattctaa

SEQ ID NO: 294177 - DNA, 1977 bp, Proteus mirabilis
atgagctatcaggtacttgcccgaaagtggcgcccacaaacttttaacgatgttgtcggtcaacgtcatgttttgaccgcattggctaatggtcttgatcaccaaaggttacatcatgcttatcttttttctggcactcgcggtgttggaaaaacgacgatcgcccgtctatttgctaaagggctgaattgcgaaacaggcataaccagtaaaccttgtggtaaatgtgctaattgccttgagatagagcaagggcgttttgttgatttaatagaaatcgatgcggcatcaagaacgaaagttgaagatacacgagagctactcgataatgttcaatatgcgccggctcgtggtcgttttaaagtctatcttattgacgaagtgcatatgctttctcgtcatagttttaatgcgttacttaaaacgttagaagagccacctgaacacgttaaattcctgttggctaccacagatcctcaaaaactacctgttactatcttatctcgttgtttgcaatttcacctgcgggcacttgatgttgaccaaatagcgacacagcttgagaaagtactatccgcagaacacattgaaaatgatgtgcgagcacgccaattaattgcccgtgcagcagatggaagtatgcgtgacgcattaagcctaaccgaccaagcaattgcgagtggcgaaggtattgtaagtacagaagtcgttagtcgtatgctaggcacgattgatgatgcacaaccattagcactgattgaagctttagtaaaagcagatggccaacaagtgatgtcgttggttaatgaggttgctttaagaggaacggattgggaaaactttttagtcgaaacgctctcattattacatcaaattgcgatgttacaacttttgccgagtgaaaataatccccaagagcaatttacacaagagcgtttacgtttattagccaaatcagtgtcgccacaagatttacaactttattatcaaactttattagttgggcgaaaagagctggcttatgcgccagacagacgtatgggtgtagaaatgacccttctcagggcgcttgcttttcatcctaaaactgtcattgatgaaatccctacggctcctttagcgcaaacattgcctttagcatcacagccgaatcaacagcgagttgaaacatcggcgcctcaagtgagaagcaatatggcaacggcgacacccaaagtatcaccgtcgccagaaaacagtgctgcattaggaaatagccctgcggcacaactgttaagagcacggcaagccataaggggagctgagcaagaaacgccaccaaaaaagcctcaaccggcgacgcctaaacaggctaagccggctgctagtgcattagagcggctagcagccgtcagtgaaaaacgccagcaaagggttaatgaaaaacggtcatctgttgcagtcgagaaaaagaaaaaagaagcttatcaatggaagccacaaaatccacaggcacaagtaactgagcccgtggtctcttcaccgaaagagatcaaagaagttcttgagtatgaaaaaacgcctgaattagccgctaaaattgcgcaagagtcgcaacagcgggacgagtgggcggcggaaatagctaaaatgccattgccgaagttagtgcagcagttagcgttaaatgcctataaagagacggtcggtgaagaaacgatcattttgcatttacgcagtaagcagaaacatttaaattcagcaaatgcactacgaacactgacaaatgcgctaagtgaattgcatggaaaagcaatttcactcacaattatagaagatgataatctaacggttaaaacgccgttagaatggcgacaagccatttatgaagagaagttggcgttagcgcgtcaatcgattactacggataaaaccattcagacattacagcactattttgatgctgaattggatgaagagagtatccggcctgtttaa

SEQ ID NO: 294178 - DNA, 564 bp, Proteus mirabilis
atggcactgattatgactgctaacgcgcaacaactgcaatttattaaagacagcattgaaaccattcctgattaccctaaagaagggatcttattccgtgatattacgacattactggataatcccgcggcatatcaggcaacgattgatttattagttgagcactatcaaggtcagggtatcactaaagttgtaggtaccgaagcccgcgggttcttatttggtgccccagttgctttacgtttaggtgtgggttttgtgccagtgcgtaaaaaaggtaaattgcctcgtgagacgcttagtgaaacttatgatctagagtacggtacagatacattagagatccataaagacagcattacggataaagataaagtattaatggttgatgacttattagcaactggtggtactatcgaagcgactgctcgtcttattcgtcgtttaggtggaactgtaacagaagctgcatttattatctgtttacctgatttaggcggtattgagcgtctagaaaaagaagggatccatagcttcacattagttaatttcccagggcattaa

SEQ ID NO: 294179 - DNA, 543 bp, Proteus mirabilis
atgaaaaaaacagatccattgagtttgtttaaaaaacagatcgacaatctcgccgaaaccttagcgccaattgcaaacaaaaaaattgcagcaccttgcttcgacacagcactatttcaccaccgtagtgattctcttggtggttatatgcaacagatccgcgataattttactcagttaataacttgtgttgaggcacaacgtagccagcaagttaagtttctggcaacacaaatcctacaacaaattgaagcattaactcgtgaattatcgacacaaacactaagaaagcaagaaaaccagcttagtcaacgcaaaaaaagtgtcgatttataccaaaaacttgcccaacatcaggattacgagcgccgattacagtcgatgatccaagatagagagcttgctttaactcaagcacaaggctttgtacgccaacaagaattacaaaaagagattgctgctcttgaaaatcgcctagcgcgttgtaaaagtgccctagtttctatagaaaagagtattgaacgacaagaagataaatattaa

SEQ ID NO: 294180 - DNA, 156 bp, Proteus mirabilis
atggaattaaaagatgcccctaaatcagttcagttagcggttgatttgatttacttatttgaaaccaatcatattgatcccaacaccgtacttgaggcactggaaattgtgcgagttgattatgagaaaaaacgagataatcaaaccgctaactaa

SEQ ID NO: 294181 - DNA, 3429 bp, Proteus mirabilis
atgcgtggatctaacgtttttattcgattaaatcattttatttcgacaatatttattgtctctatcctctttgttttgttaggaaatatactttttaccccggctaaagcagaaacagtcagcaataatttacccaccaaagaaagtattcaaaaccagcttaatttattaaataaacgtagtgacttaagtgccgaagataaactcactattggtgatctagagcaggcattgctacttcttgataatattcaacaactagagaaaaaagcagacgactataataagacagtagagcaattaccagaaaagctacgcagtattcaaaatcaattaagtcaattaaaacagaaaatagcaaacaaagaagttgatgactaccgtcaatctttagagagtctaccgcttgcaactttagagtcgcaattagaagaggttttacaatccttagcgaaagcacaggaagatttagccaattacagtaatgagcttattgttttacaaacgcaaccagaaagggcgcaatctgttttatttaataactcagaaagattgcaacaaatacgaattgcattaaataaaagcagtgcagataaagctcaaatgcgatcttcttctgtgcaacttttacaattagaacaatattatttgcaacaacaaaacagttttcaaaaacgaacactgcaatctaatgtacagctacaaagcttattacaattacagcgtgattatagttcagcctatattgacctctctcaagagcatgctcaactactgcaagagatcttaagtgataaacgtttagacagttcagaagaggttgccaaagaggcgcagacggcagagctgagtaatcaggcgattaaaaataacgctttttatttagctcaagctgatattaataaaaaactcagcgataagctgattattactacacaaaataataatgagttaaatcgccatagtttaatggtcaaaaaccgcctagatagagctatccaatcagagcgcaatcttaaagagcaaattgatgtattgaaagggagtctgttgctctctcgtattctatttgaagagcaaattgagctacctgatgatatctttatcaataagttaccggataaaattgctgacttacgtttagaacagtttgaaatcaataaacaaagagatcagatttttcagccgaatctctatatcgaccaattaatgcaagagtaccaagccgcacatccggaaattactgataaaaatgagctaaaagagctacataatgcattattacaactgattgatgcgcgacgagatctactggataagctcaataatcaactgggtagccaaatttctgaatctattaatttacagatggatcagcaacagctacgtagtgtggtgagttcattagaaagcaccttagcgcaacaaatattctgggtaagcagtaataaaccgattaacctcagttggttctcaacctttccagagcaggcagtggctgaatttcaaagttttaaactcaactggtcaaatgaaaatctgttgaccggggctaaaaaatcatatcctgtgctgattgcgctagttttgttcagtagcatactgatttggcaacgtaaaaaatttgataagcagtttgataaattaagtgctgatattaataagcttaataaagatacgcagttacatactccattggctttagggattgttttcttaaaaacattacccctttcttgtattgtgttagcgataggatattggctaattaatagctttaatgtgcaacaagagtttatctggtcttttacttggcagtttgcggtattttggctgatgtttgagtggtcttatcgtttaatgtcggataatggagtggccgttaatcactttaagatccccctagagcgagtacaacaaaatcgtaaacgtttattacgtttatcgcttcccatgttgccaattattttactttccgcttatggtattaataacccattattgttagttggcgatgtgattggtcaattagtgacaattatttcactcttttttattagtctgtgtgcattacctttttgtcgtgaaatgtggcaagaaaagggtaatcatgttgtgagaacagtggttatcaccttattaactttctcgcctttacttttaatggggttagttatttttggttattattacaccgcactacgtttagccaatcgttggattgatagtttatatctacttatgttgtggtttattgcttaccacgcgagtttacgcggccttactgttgctgcaagacgactggcgtatcgtcgagcgctagagcgccgacaagcgatgcttaaagagaaaaaagagggagacgataacactctcgagccaatccaagagccaccgatggatatggagcagataaaccaacaatcattaagattaaccacaatgatcttatttattatctttgcttccagtttttatggtatttggtctgactttattacaatctttacttacttagatggtattacgctttggcattataatttgcctacagagttaggtaatgtggttaaagcagtgacggttgcggacttactcctctcttttgccattatggctatctcttggtttatgataagaaacctaccgggtttactcgaagttcttattctttcaagaattaaattacagcaaggcgcttcttacgccattacgactattctgacctatattatcattgcgataggtacaattgtttcgctggggatattaggcgtagcatgggaaaaactacaatggttggcggcagccttaacggttggtttagggtttggtttacaagaaatattcgctaactttgtttcagggataattatcttatttgaaaggccggtcagaattggtgatacggtgacaattggctcttattctggaacagtgagtcgtattcgtatccgagcaaccacggtaacggactttgatcgcaaagaggttattatcccgaataaagcctttgtgactgaacgactgatcaactggacattatctgatactgtcacacgtattatcattcaagtcggtgttgcttatggttctgatctggataaagtgaaaaccattttaatgaaagcagcaaaagataatcccaaagtgatgactgagccagagcctgtggtgctgtttaccgaatttggggctagcacgctaaatcatgaattacgtttttatgttagaacgcttggggataggaatactgctatcgacgaagtcaaccgcgctattgataaactttgcaatgaaaatgatatcaatatcgcgtttaaccaattagaagtgtatctgcataataaacaaggggaagaagtgcaagaaataaaaaaaggccctcttgatggttcaacacctgaagcgaatacgccatttaattaa

SEQ ID NO: 294182 - DNA, 354 bp, Proteus mirabilis
atgagcaaagtattagtgattgcaaatggtgcagcatacggtaatgaatcattatttaacgcactgcgtttatctattactttaaaagagcaacatccagaaacgcaattaaatatctttttaatgtctgatgcggtaaccggtgcactggctcatcagcaacccaaagaaggttacaacctccaacaaatgttagaaattttaacggcacaaaacgtccctgttaagttatgcaaaacctgtacagatactcgtggtatcagtgaattacctttagtggatggtgctgaacttgggacattggtggacttagcacaatggactctcgacgcggataagattttgactttctga

SEQ ID NO: 294183 - DNA, 645 bp, Proteus mirabilis
atggcacgaaaaactaaacgccaagcacaagagacaagacagcagattattgatgctgcacttaggctatttactgtgcaaggtgtttctgccacatcactttcagatattgcaaccgaggccggagtaactcgaggtgcaatatattggcactttaagaataaagtggatttatttactgaagcgtgtgaactcaccgacttaaaaatagaatcattagaattagagtatcaatcaaaatatccagatgatccactatttgtattaagagaattgcttatttacatattgacatcaattgtcgaagatccgaaacataatgcacttctagaaatatatttccataagtgcgaatttgttggtgaaatgacaccaattgttgaaatccgccgagaattatgtgcagccgattactctagaatagagcaatctttatctcgctgtatcgaaaaaaaacaactcccagccaaccttgatttaagaagagctgcgattatgttaagagctatgatgacagggcttgctgaaaattggttattttcaccagaaagtttttctattaaagaggaaagtcaatatttggttgatagttttattgatatgattaagcatagcgtaaatatgagaatatcggcgctatcttaa

SEQ ID NO: 294184 - DNA, 1191 bp, Proteus mirabilis
atgcgaaaaaacagaggggttttgcctctggctctgttagtgctttcaggcagcttggttattgctggatgtggcgacaaaaatcagtctgctggaggtccacctcctgctcctgctgtaggtgttgttacattagatgcgaaaccactgactatcacaacagacttacctggtcgtacatctgcttatcgtatcgcagaggttcgccctcaggttggcggcatcatcttaaaacgcaattacaccgaaggtagttatgtagaagcaggaacatctttgtaccaaatcgatcctgctatttttcaagctacattaaacagtgctcaagctgatttagcaaaagcgaaagcgaatgctgaaattgctcgcctaactgtagagcgctataaacctctactcggcaccaattatgtcagtaaacaagattttgataccgcaacatctcagtacgctcaagctgttgctgcagtaaaagcagctgaagctacagtgactaatgcaaaaattaatcttgaatataccaaagtcaccgcaccaatttctggccgttcaggtaaatcaacggtaacagaaggcgcattagttgcacctggtcagcaagtggctttaacaaccgttcagcaaatcgatccgatttatgtcgatgtgacacaatcgagtgaagattatctgaaattaaaaaatgaaattgaaagtggcattgttcgtcaagagcaaggtaaacctgttgttcacttaaccttaaccaatggtcaatcctacgctcaaaaaggtcatttagaattttctgatgtgaccgttgatgaatccacaggctctatcactatgcgtgcaatcgtacctaatccaaatggtgaattactgcctggtatgtttgttcgtacaaaattagaaaatggtattcgtcaaaatgctattttgatcccacaacaagctgttattcgtactcctcgtggtgaagcaacaaccatggtcgttaataaagacaacgtggttgaagtgcgtactattgaagtatcacaagcagttggtaataagtggctagtgaatagtggtgttcaggttggtgaccgcgttatcgtttcggggctacaaaaagcaaaacctgaaatgaaggttacgccacaagaagaaaatttagatgcaacagcatcaactgaaaaatctgaaccagcgaaggatcctcaataa

SEQ ID NO: 294185 - DNA, 3159 bp, Proteus mirabilis
atgcctaagttttttatagacagaccaatatttgcgtgggtaattgccataattaccatgcttgctggtcttttggcactcatcaaactgcctgttgcacaatatccaacgattgcaccgccagcgatttccatctctgcggtctatccaggagctgatgcaaccacggtacagaatactgtaacccaagttatcgaacagaatatgaatggtatcgataacatggtttatatgtcttcaaccagtgattctgcaggtatgatgaatatcacgctgacctttgaagctggtactgaccctgatattgcgcaagtccaagtgcaaaataaattgcaattggcaatgcctcttttacctcaggaagtacaacaacaagggattagtgtcgataaatcttctagttcattcttaatggttgcaggttttatctctggtgatggctcgatgtcacaagatgacatcgccgactatgtaggtgcaacaattaaagatccattaagccgtgtcacaggggtgggtgaaacgcagttatttggtacacaatacgcaatgcgtatttggttagatccagataaactggtgaaatataacatgaccacacttgatgttattaatgcgattaaatcgcaaaataaccaagtggcggcaggtcaattaggtggtacgccaccagtgcctggtcagcgtttaaatgtatctatcattgcgcaaactcgacttaatacacctgagcaatttgctgatattctgatgaaagtcaatcaagacggttcacaggttaagctaaaagatctgggtattgttgagatgggggctgaaaactacagcacgattgctcgctttaatggcttacctgcagcaggtattggtattaaactggcaacaggtgctaacgcccttgataccgcaacagcagtacgtgcggcactggctgatatggagccattcttcccttctggattagaggtcgtttatccttacgatacaacaccatttgttaagatctctatttttgaagtggttaaaacgctcgttgaagccattatgctggtgtttgtagtcatgtatctgttcttacagaacttccgtgctacattaatcccaaccattgctgtgcccgtcgtattattagggactttcgccatattgtccgcgtttggctattcgataaacaccttgacgatgttcgcgatggtactagccatcggtctactggttgatgatgctatcgttgtagtagaaaacgttgaacgtgtgatgcaagaggaaggactgtcacctaaagaagcgacacgtaagtctatgggacaaatccaaggtgcattggtgggtattgccctcgtgttatctgcggtatttattccaatggcattctttggtggttcaacgggtgcgatttaccgacagttctcagttactattgtatcagcgatggtgctgtctgttttcgtggcattgattttaacccctgcactttgtgcgacattgttaaaaccaatcccgaaaggcagccatggtgtacaaacaggtttctttggttggtttaaccgcgtttttgaaaaaagtagccaccactatacagacagtgtttctcgtacactgcgaggtacaggtcgttacttactgatctacgtcttacttgttgctgctatggcaattatgtttgtgcgtttaccggcgtctttcttaccagaagaagaccaaggggtattactgacaatggttcagttgcccgctggatcaacccaagagcaaactcaagacgtattagcacaagtcaatgactactttaatactaaagaaaaagatgtggttaagtcggtctttaccgtcagcggctttggttttggtggtcaaggtcaaaacatggggcttgctttcgtcgtattaaatgattgggatgagcgtaaatcagaccaagacaaagtccctgctattgtcggtcgtgctaaccaagctctttctcaaattaaagaagcctttgtttactcctttaatattccagcgattgttgagttaggctctgcaggtggttttgaattcgagttaatcgataatgccaacctgggacacgaaaaactcatggaagcaagaaaccaattgcttggaatggcagcacaagagccacaaatgttgacgggtgtgcgtcctaacggtcaagaagatacctctcagtatcgtctttatatcgacttagaaaaagcacaagctcaaggtgttgcggtcagtgatatctactcaacattaggtacgatgtttggtggtagctacgttaacgactttatcgaccgtggtcgtgtgaagaaagtttacgttcaagcagaatcacaattccgcatgttgccacaagatattgctaatctttatgttcgtaacaatgcgggtcagatggtgcctttctcatccttcattgatactagtaaagatccttggttatatggctcaccacgtttagagcgttataatggtttaccagctgtccagatccaaggtagtgcaacaccgggacaaagtagtggtgatgcaatgctaatgatggaacaactcgccagcaaattaccaagtggtattggctacgagtggacgggtatgtcataccaagaacgtctatcaggtaaccaagcgccagcactgtatactatttcattaattgtagtattcctttgtttggcggcactctatgagagttggtcagtgcctttctcagttatgttagtcgtacctttaggggtcattggtgcattagcatttactacattgagagggcttgaaaacgacgtttactttaaggttgggctacttaccaccattgggttatcggcgaagaacgccatattgattgtcgaattcgccaaagacttaatggaaaaagagggtaaagggctagtagaagcgacgttagactccgttagaatgcgtctacgtccaattctaatgacatcgttagcctttatgcttggggttattcctctggtattaagtaacggtgcaggctccggtgcgcaaaactcagtaggtacaggggtattcggtggtatgattgccgcgacatcccttgctatttactttgttcctattttcttcgttgtgatccgcagaaggtttgcgaagaaaaacgaagacttagagcacccaaactatccgcaccaaactaagtaa

SEQ ID NO: 294186 - DNA, 363 bp, Proteus mirabilis
atggacgaatattcaccagaaaaaatagatttagctgaattgtcatttttatgtgaagagctattacagcaagcattaagctcattagataaaggtaccgcagtttggaacaatgatctaagtagcacaaaaagcgttgaccttaatgccctaattgatcacattatgggctttagttggctgtttaagataaaatatcctgataaacacgctattaacactttaatggaagagtgcatagaagagacttatcggttattcggtagtgactccatttcctactcggaattgaataattggaaagagttaaactattcactgttaacgcttatcgataaaaatcctaaaagttatatcaagtaa

SEQ ID NO: 294187 - DNA, 204 bp, Proteus mirabilis
atgactaaaacagactatctaatgcgtttaagaaaatgcacctcaatcgaaacccttgaaagagtgattgaaaagaacaaatatgaactgaccgatgatgagttagagctattttattcagctgcagaccatcgtttagcagagctaaccatgaacaaactttatgacaagatcccagcatctgtttggaaatttgtaagataa

SEQ ID NO: 294188 - DNA, 258 bp, Proteus mirabilis
atggcaggtgtcgtgtgtgccgggatgtcgctggcaaggccccacccaatttctgcattgcaatcccgctattttttatccagttactttcttcatcgtaatcgtatcgttgaacgtttgcatctaaacatatttctatttacatattgtttaattaatagtttttttaactatatttactctcaatatgggtttggtgaattaataagaaacagaatgcctttcacctattatcgcctacgcgttatagatgaataa

SEQ ID NO: 294189 - DNA, 876 bp, Proteus mirabilis
atgagccaggcattaaaaaaacttatcaacttaatggagcttgaaaaaatagaagaaggcctatttagaggtcaaagtgaagatttaggtttaccacaagtctttggtggacaagttgttggccaagctctttatgcggcaaaacaaacaattgctgataatcgctatgttaattcatttcacagctattttttacgacctggtgatagccataagcctattatttacgatgtggaatctatccgtgatggtggctcatttagtactcgtcgcgtcagtgctatccaacaaggtaagcctattttttatatgaccgtctctttccaagagtttgaagaaggctttgaacatcaagatatgatgcctgaagtcccttttccaaatgacttgatctctcaagatgagatattgaaaaaacttgccccaaaattacccgaacctctaagaacactcgcattaagagaaacaccttttgaagcacgccccgtgcaatattttagcccgtttggttatgaaaaagcacctgcggaacgttatgtttggtatcgtagtcgcggagaaatgccatctgatcctttcctacaccaatacttattaggttatatctctgattttgattttttacccacctcactgcaaccttatggtttaggttttatggatccgagtttacaagtggctaccatcgatcattccatgtggttccatcgcccatttcgtgttgatgactggttactttatgctattgaaagtccatcagcctcaggtggtcgcggatttgtgagaggaaaaatgtttaatatgagtgggcaactagttgcctcttctgttcaagaaggtgttatccgccaaaaacgaataaaatcaaacaaataa

SEQ ID NO: 294190 - DNA, 1299 bp, Proteus mirabilis
atgaaacgatttattagttatttttttacgttagcacttacatactttttattacctcagttagcgattggagccaccacaatagacatagataaagcggataacagttttatgctgatctgtagtgcattggtgttttttatgactattcccggtatcgcactcttttatggcgggttactacgcagtaagaatgtattatcactaatgacgcaagtgatgttgattttcagtgtagtgattatcctttggattatgtttggctatagtttggcgtttactgctggaaataagatttggggtgggtggtcacttacttttctaaataatatttcagtcgattctgttgctggtgcaattaatcaatatgtgcatgttgtatttcaaggctcttttgcggtgatcaccgtggccctcattgttggcgcattaggtgaacgtattcgtttttcagcactgcttatctttactgttatttggtttactttttcatatattcccattgcccatatggtatggggagaaggtggttggcttatcgatgatggagcattagattttgcgggaggaacggttgtccatattaatgccgctgtagcagcgcttgttggtgcttacttactaggtaaacgaggtgattatcaacatactgcgattaaaccacataatttacctatggtctttactggtacagcggtactttatattggttggtttggttttaatgcaggctctgcagggagtgctaatggtattgctgcattggcgtttttaaatacagttgtagctaccgcaggtgcagttcttgcgtggacatttgctgaatggctagtgagaaggaaaccttctatgttaggtagttgttcaggatgtattgcgggattagttgctattaccccagccgcgggaaccgtaggccctattggtgctttggttattggtattattgctggcatcatcgggctttggggggttgtggttcttaaacgttggttaaaagcagatgatgtctgtgatgtttttggtattcatggtacttgtggtattgcgggctgtttattaacgggcatatttacggcttcatttttagggggcattggttatagcgagcatatgacattaggtaagcaagtgctaactcaattatttagtgttgtgattacgcttatttggtcaagtgttgtggcttacattgcctttaaaattgccgataagctagtgggattgcgtgtctcacaagaagaagagcatgatggattagatataaccactcatggcgaaagagcgtacgagcagtaa

SEQ ID NO: 294191 - DNA, 339 bp, Proteus mirabilis
atgaaatatatcatcgcgattattaaaccatttaaattagaagatgtaagagagtcactctctgagcttgggattaacggaatgacaatcagtgaagtaaaaggatatgggcgacaaaaaggacatgccgagctttatcggggcgctgagtatgaggttaactttcttcctaaagtaaaaatagaattagcggtttgtgatgggcaattagagcctgtgctacaagccataagccaagttactgatactggtaaagtaggagatggcaaaatttttgttttagagttattgcaggcgatccgtattcgtacaggagagtctggtgaagaagccttgtag

SEQ ID NO: 294192 - DNA, 1788 bp, Proteus mirabilis
atgacgataaataataataaatccattaaaacgttattgccggccttaaaaagattattagcttatggcaaaacctatcgcaaaccgatgacattaggtgtggtgatgttatgggtggcagcgattgcagaagtgggtggacctttacttattagttattttattgatgctaaagtagcgactcatcaagttgaatggcgaggcgcattaggtcttgctgctgcttttattctattacaaattattgcggcactattgcactattaccaaacaatcgtctttaattatgccgctgttggggtggtacaacagttacgagcagatgtgatgagtgctgcgctaaaacagccattaagtgcatttgataatcagcctgtaggacagctgatttctcgtgttaccaatgatacagaaactatcaaagatctatttgttaacgtctttcctgctctatttcgtgctatagcattggtggttgtgatgttaatcgctatgtttctactcgaatggcaaatggcattagtggcgatgacgattttccctgcggttattggtgtgatgatgctttatcaacggctaagtacaccgattgtccgaaatgtgcgtcattatcttgccaatattaatgatggctttcatgaagtgattaatggtatgtcggttatccagcaatttcgtcaacaagctcgcttcggtaagagaatgtcagatgatagctggcaacattatcaagcacgtatgaaagcactaaaacttgatgggctactattgcgcccgttactcagtatgctctctgcattggtgctatgtggcttattgatactgtttggatatcaaggtagtgctgtgattggtgttggagtaatttatgcttttatcagctatttaggtcgtcttaatgaacctcttattactctgacgtctcaacaatctttattacaacaagcggttgtttccggtgaacgagtctttgagttaatggacgccccgatgcagcaatatggcaatgcaagctataccattaaccaaggagatatagccattaacggcttgtggtttgcgtatctaaaacagcagtgggtattaaaagagattaatcttgatatacctgctcgccactttgtcgcttttgtggggcatactggcagtggaaaaagtaccttagccagtttgcttatgggaaattatccatggcagaaaggacatatctacttagataaccatccattagaatgctattcccatcaggcattaagaagcggtattgcgatggtacagcaagatcctgttttattatcaggcactttgcgtgacaatattactttagggcgtcactgctctgaagctcacttatggcaagtattagcaactgtacaattaaatagctgggtaaaaacattacctgatggtttagaaacccccttaggtgaacagggtagtcgcttatccgcgggacaaaaacagttattagcattagctcgagtattattatttccaccccgtattcttatcttagatgaggcaacggcaaatatcgactcgggtacagagcaagctgttcaaaaagcccttacgcaaataagagaaaaaaccacattaattgttatcgctcatcgcctttcaaccattatcgatgctgacgaaattgttgtgcttcatcgtggtgagattgttgagcaaggtaaacatgcacaactattggcacaaaaaggtcgctattacaatatgtaccaattacaacaagttaaagagtcattacaagttcaagagccagccgttgttgagtga

SEQ ID NO: 294193 - DNA, 1746 bp, Proteus mirabilis
gtggctctattttcacagctcagttggtattttatcagcgaatggcgtcgttatgtcggtgctattttcttattgatggttatcgccgttctacaagtgatccctccgaaaatcgtcgggattattgttgatggtgttgatagccatagcctgtcttttcagcaaattatggggtggatcgggatcatggtattgatcgcccttgctgtctatttattacgttatatttggcgactgtggttatttggtgcttcttaccaactggcggtgaaattacgtatgcaaatctatcgccaacttagccttcaatcatcggctttttatcaacgctatcgcacgggtgatttaatcgcacgtaccactaatgatgttgataaagtcgtttttgccgcaggggaaggggtgttaacccttgttgactctatggtaatgggacttgcggtgttagtgatgatgagtattcagttaagttggcaattgacacttatctcattgttacctatgccattaatggcaatattaattaaacgctatggcgataaactacatcaccgctttaaaagtgcacaagcactattttcttcattgaataatcaagcgcaagaaagtttaagtagcattcgtatgatcaaatctttcggtcttgaacagcaacatgcttcacgttttgaaacggttgcaaaagagacgggtcgacaaaatatgcgagtggcaaaagtcgatgcattgtttgaccccacgatttttatggcaattggttttgctaacttacttgctgtggcgggaggaagttattttgttctcaatggcacgatgacattgggagaattaaccagttttgtaatgtatttagggcaaatgatttggcctatgttagcgctggcatggatgtttaatattgttgagcgtggtagtgcggcttatagcaggatcaatgcattactcaatgagcaaccggctatggttgatggtcaattatcaccaatgcatcaaaaaggaactttagcggtagatattaaagcgtttcattaccccaaacagcaagttgatgtactaaaaaacattcattttacactctctcctggtgagatgttgggtatttgcggtatgactggggcggggaaaagcactttgttagcgctgatccagcgcttatatgatgtcagtgaaggggatattcgttttcaatctgtccccctttaccaattaaaattggatgaatggcggggaagacttgctgttgtcaaccaaacaccgtttcttttttcggatacgattgccggaaatatagccttaggacgccctgatgctaccaaagaagagatagaggcagtagccaaaatcgccaatattcacgatgatattttaaatttacccgaaggatatctgactcaagttggtgaaaaaggggtcatgctctcggggggacaaaagcaacgtatttccattgctagagctttactgttagatgcggaaatcttgttattagatgatgcgttatcagccgttgatggacaaactgaataccagatcttacaaaatctggctcaatggcgtaaagagaaaaccattattattagtgctcaccgtttatctgcactggttgatgcaacaaatatattggtattaaaacaaggcgaaatcatagagcaaggtactcatcaaacacttattgcagtgccaggttggtatcaagatatgtaccattatcaacaactcgaggccgcattagatgacgataaataa

SEQ ID NO: 294194 - DNA, 462 bp, Proteus mirabilis
atgttagataagattgaccgaaaactattaacgctattacaggaagattcaagcctctcactgaatactttggcagaggcggttaacctaacctcaacaccttgctggaaacgattgaaaagactcgaggatgaagggtatattcgtaaacgtgttgcattactcgacagcgaaaaaattgggcttggcttaacagttattgttatgataagaacacagcaacataatagcgagtggtatgaacaatttgtatcattcgttaagcaaatgccagaagtactgacattctatcgaatggcgggtgagtgtgattatctaatgcatgttgaagttgtagacatgaaaagttatgaccaattttacaaacgcatggttaacggcgttcctgggcttattgacgtaacttctaactttgcaatggaaaaaattaaatacacaacggcaatgccgatacctgaataa

SEQ ID NO: 294195 - DNA, 699 bp, Proteus mirabilis
atgaaaaaaacggtcgttgtctttagtggtggacaagattcgacaacctgcctaatccaagcactagagcagtatgatgaagttcattgtattacatttaattatggacaacgtcataaagaagaaattgaggtagcacaaagagtcagtcaattattaggtgcaaccgcacataaagttttggatgtcagtttactcaatgaactcgctatcagcagcttaacacgtgacaatattcctgtgcctgattttaaacagagtgaacaaagcgatattcctagtacctttgtacctggtagaaatattttatttcttacattagcctccatttatgcttatcagattggtgctgaaagcgttattaccggcgtatgtgaaactgatttctcaggttatccagattgtcgcgatgagtttgttaaggctctaaatcatgcggtaaatttaggtattgctcgtgatattcagtttatcactccgttgatgtggttagataaagcgcaaacttgggcactcgctgactattacggtaagttagattttgtacgccacaacaccttaacttgttataacggtattcaaggtgatggttgtggtcaatgtgcagcttgccatttaagagagcgtggacttcatggctatttacaagacaaaaatgccgtcatggacgccatgaaaaataaagttggccttaaataa

SEQ ID NO: 294196 - DNA, 408 bp, Proteus mirabilis
atgagtacattaattaaagtttatggattccatttagatgtttttgagcatgtgaataatgcacgttaccttgaatttttagaacaagcgagatgggattggattgaacaacacttagatctcgcttggtttaaacggcatggtctagcactcgttgtcgcgaatattaatatcaactatcgtttgcccgctaatttaggcgatgaactaatcattagttgtgatattgcagaagtcggtattaaaagtggcgtgttgtctcaaaaaatagtgagaaaacaagatggtgcattgatttcagatgcattagtgacttttgtactcgttgatatcaatactaaaaaagcattaacacttacagatcagttacgagaaaaattggagtatgtacgccagtctgctgattag

SEQ ID NO: 294197 - DNA, 366 bp, Proteus mirabilis
atggataaaaaaacactatcagcatttatggcatcaatatgtttaacattaggtttagggttatcaccactctcttatgccgatgatatatcgccttcaacatcaaccatgttgattgaaaaaggggatcaaaaagagagtgctgtcagtgaggtaaacgctagtgcacaaggaaagttggatattaatagtgcaacacttgatgaattaatgacgctaaaagggatcggaaaagcaaaagcgcaagccattatcgattatcgagaaaaagtggggcgttttgcttcttttgatgatctcgccaaggtctttggtattggtatgaagcttattgaacaaaataaagatctaattattatcaactaa

SEQ ID NO: 294198 - DNA, 1878 bp, Proteus mirabilis
atgatggacaacattcgttcaactgctaataatccttttattaagatactattagctgtgatcatcctctctttcgtcctaactggtgtgggcggatatctctttagttctggtgttaatgatgccgctgaagttaacggttataaaataagtcgtgctcagttagagcaagcttatcaacaacgccgagcacaactacaaaaagacatgggtgacaattttgcttccctagcatcatcagatgagggacaaaaaatgatccgccaacaagcattgaatgtgctgattaaccaagctttgctggatcaatttgctcaagagttaggtatttctgctggcgaccagcaaatcagagacgcgatttttgcgctaccttatttccaaactgatggtaaatttgataacaaaaaatacgttgagttattaacggcgaataatattgacgctgatgcctttgctgaaggaattcgtcaaaatctgattaatcaacaattacgttattctattcaaggcactgactttgctttagagagcgaagttaaagactttgccggcttaatgctacaaagtcgtaatgtgcgtctcgcttcattagatattcagccattccttgaaaaagagacagtatcagatgaagaattaaaagccttttatgaccaaaatacctctatgtttatcgctccagcacaagttaaagtgagctatattcagttagaagcccaaaaagatttaagcaacatcactatttcagatgatgaagttaaagcttattacgatagtaatatcagtgaatttactgttcccggacaaaaaaaatacagtctacttgtcttagcagatgaaaccgctgcgaaagaagctgaagatgcgttgaaaaatggcgctgacttcgtcaccttagtaaaagaaaaatccattgatactttttctgctaaacaagatggttcattaggctggatcactattggtcaagagctaccagaattagcaaatgcgagtttgactgagaaggggcaaatttcacagccagttaaaatcagcaacggttatgctattttccgtcttgatgatattaaaccttcggtggtaaaaccttttgatgacattaaagctgacttattagtaaaaatgcgtgaaaacaaagccattgatgatttcttcgcattgcagcaaaaagtgagtcaagccgcttcaaatgataacgacacgctagcgacagcagcaaaagcagggaacgtcactgtaatcaatacagattggtttgatgaaaacaatgtaccagcagccttgaataacgaaaagttaacacagcttatctttggtggttcactggttgatgacaatggccctacaggcatgaactcagatatggttacccttggtaatgatagtgcttatattgttcgtgtcgaaggatataaacctgcatcaacccaaccattagataaagtacgtgacaaggttattacactggtcaaacagcaaaaagcttctcaagcgatgaatgcgcaagctcagaaactccttgcagccttaaaagaaggtaaaggagaggcggcattgaaagaagcaaatatctcgtttggtgaggtagaaagcgtggttcattcatcagccacagatccgatacaaagtgctatttttgctatgccaaaaccagcagaaggtaaaaaagagtacggtatgtctaatgtaccaggttcaaaagtggtcttaatccaattagatagtgtcactgatggtaagccaacggcagaacagcttgaatttatgactaatctctatcgcgcccaaatgggagaagaagctttacaacttatgctcagcgatttaagagaaaaagcaaaaatcgagatttttgataaagattatcaataa

SEQ ID NO: 294199 - DNA, 276 bp, Proteus mirabilis
gtgaataaaactcaactgatcgacaaaattgctgcgaatgcagatatcactaaagcggcagcgggtcgtgttgtagatgcaatggtagcttcaatcactgaatctttacaaaaaggtgatgacgttgcattagtgggcttcggtacatttaccgtacgtgatcgcgcagcacgtactggccgtaatccacaaacaggtaaagaaattcaaattgctgcggccaaagtgcctgcattccgtgcgggtaaaggtctaaaagacgcagtaaatcaataa

SEQ ID NO: 294200 - DNA, 2355 bp, Proteus mirabilis
atgaatcctgagcgtccagaacgtattgaaatacctgtattgccattacgtgatgtcgttgtatatccacatatggtgatcccgttgtttgttggtcgtgaaaaatctattcattgcttagaagctgcgatgaacgacaacaaacaaattatgctggttgcgcagaaagatgcatctactgacgaaccaggtgttaatgatcttttttctgtggggacagtggcttctgttttacagatgctgaaactgcctgacggaaccgtaaaagtgcttgttgaaggtattcgccgcgcaaaaattaccacattatctgataatggtgagtatttccaagctaaagcggaatatctagacacgcccgttgttgatgagcgtgaacaagaggtactaaatcgcacggcgatcaatcagtttgaaggttatatcaagctgaataaaaaaattccgccagaggtattagcctcattgcatgcgattgaagaatctgcgaagttagctgataccattgcttcgcatatgcctttgaaattaaaagataagcaagctgtgcttgaaatgtctgatgtaacagaacgcctagagtatttaatggcgatgatggaatcagaaatcgatctgctacaagttgaaaaacgcattcgtaaccgcgttaaaaagcagatggaaaaaagccagcgtgagtactacctcaatgagcagatgaaagcgatccaaaaagaattaggtgagatggatgatgcacctgatgaaatggagtcgttaaaacgcaaaattgaagcggcgaaaatgcccaaagaggcgagagaaaagacagaagctgaacttcagaaattaaaaatgatgtcgccaatgtctgctgaggcaacagtagtccgtagctatattgattggatggtacaagttccttggaatagccgtagcaaagtgaaaaaagacttagtgaaagcgcaggaagtacttgatacggatcattatggcttagaacgtgtgaaagagcgtattcttgaatatctcgcggttcagtctcgtgtcagcaaaattaaagggccaatcctgtgtttggtagggcctcctggggtaggtaaaacgtcgctaggtcaatctatcgcgaaagcgacagggcgtaaatatgtgcgtatggcattaggtggggtacgtgatgaagctgaaatccgtggtcaccgtcgtacttacattgggtcgatgcctggtaagttaatccaaaaaatggccaaagttggcgttaaaaacccgctatttttattagatgaaatcgacaagatgtcatcagatatgcgcggtgatccagcttcagcactattagaggtgttagatccagaacaaaatatcgcctttaatgaccactatcttgaagtggactacgacttatccgatgttatgtttgtggcgacatctaactccatgaacattccggcgccattactcgatcgtatggaagtgatccgcttatcgggttataccgaagatgaaaaactcaacattgcaaaacagcatctgttaccaaaacagattgaacgtaatgcactgaaagagaatgagctaacaatccacgatagcgcgattatgggcattattcgctattatacgcgtgaagcgggtgtacgtagcttagagcgtgaaatttctaaattatgtcgtaaagcggttaaacaactgctgatggatagtactatcaagcatattgaaatcgatgaaaataatctgaaagattatttaggtgtacgtaaagtcgattatggtcgtgctgatacagaaaatcgtattggtatggtaacagggcttgcttggacagaagttggtggtgacctactgacgattgaaacggcaagtgtaccgggtaaaggtaaactgaccttcactggctcgttaggtgaagttatgcaagagtcgattcaagcagcgatgactgtggttcgtgctcgagctgacaaactgggcattaatggcgacttctatgaaaaacgtgatattcatgtacacgtaccagaaggcgcgacgccaaaagatggtccaagtgcgggtattgcaatgtgtaccgcgttggtttccagtttaacgggtaatccagttcgttcagatgttgcaatgacgggagaaattaccttacgtggtcaagtattgccaatcggtggattaaaagaaaagttacttgcggcacatcgtggcggaattaagacagttcttatccctgatgaaaataaacgtgatttagaagaaattcctgaaaacattgttgctgatctggatattcacccagtgaaaacaattgaggaagttttaacgttagccctagagaaatcgccatttggcatcgaagtagtgactaacaaataa

SEQ ID NO: 294201 - DNA, 1272 bp, Proteus mirabilis
atgacagataagcgcaaagatagctctgggaagcttctgtattgctctttctgcggtaaaagccagcatgaagtaaagaaattaatcgctggcccgtcggtttatatttgtgatgaatgtgtcgacctttgtgttgatattattcgtgaagaaataaaagaattagcacctcatcatgaacgcagtgaattgccaacgccacatgaaatccgtaaacatcttgatgattatgttatcggtcaggagctggcgaaaaaagtattggcagttgccgtttataatcactataaacgtctgcgtaatggcgataaagccgatggtgttgagctagggaaaagtaatatcctgctgattggcccgacaggtagtggtaaaacattattagcagaaacgttagcacgttatcttgatgtaccttttaccatggccgatgcgacaacgctaacagaagcgggctatgtaggggaagatgttgaaaacatcattcaaaaactactacaaaaatgcgattacgatgtgcaaaaagcacaacgtggtattgtttatattgatgaaattgacaagatcactcgtaaatctgaaaacccatcaattacacgtgatgtttctggcgaaggtgtacagcaagcattattgaaattagttgaagggacagtagcttccgtacctcctcaaggcggacgtaaacatccacagcaagaattcttacaagtagatacttcgaagatcctctttatttgtggtggtgcttttgccggactggataaagtagttgcgcaacgtctaaatacccattcaggtattggttttggtgcagaagtgaaaagccaaaatgagaaagcgagtgaaggggagttattagcgcaagttgaaccagaagatctgattaaatttggtctgatccctgaatttattggtcgtttgcctgttgttgcaacattaggtgagctcaatgaagatgcgttaattcaaattctgcaagagcctaaaaatgccctgactaaacagtatcaagcattgtttaaattagaaggtgtagatttagagttccgtaaagatgcgttaaccgcgattgctaaaaaagcgatgtcgcgtaagacaggggcgcgtggtttacgttccattgtagaagctgcattacttgatacaatgtacgatcttccttcatttgaaaatgcagagaaagtggtcattgatgaaaatgtaatcaatgggaaatctgaaccgctgattatatatagtcaacctgaaaatcaggcatcgggtgaataa

SEQ ID NO: 294202 - DNA, 624 bp, Proteus mirabilis
atgtcatttaacgacacccaggaacaattcgcacctaatatggctttggtgccgatggttatagagcagacttcacgaggtgagcgctcttacgatatttattcacgtttattaaaagaacgtatcattttcctgactggccaagttgaagatcatatggccaatctcattgttgctcagatgttgtttttagaagctgagaacccagaaaaagatattaacctgtacattaattcaccgggtggtgtgatcactgcaggtatgtcgatttatgacacaatgcaatatatcaaagcggatgttagcactatttgtatgggacaagcttgttccatgggggcatttttattatctgcaggtgcaaaaggtaaacgtatttgtctacctaactcacgtgtcatgatccaccaacctttaggtggataccaaggccaagcgacagatattcaaatccacgctcaagaaattttgaaagtgaaatcgcgtatgaatgagttaatggctcaacatacggggaaatctattgaagaaatagaaagagatactgagcgtgatcgtttcttatccgctaacgaagcgttagaatatggtttagttgataaagtttatacacaacgcagctag

SEQ ID NO: 294203 - DNA, 1305 bp, Proteus mirabilis
atgcaagtttctgttgaaacgactcaaggcctagggcgtcgtgtcacaatcaccgtaccagccgctgatatccaaaaagctgtagacagcgaactgaaaaaagctgctaaaactgttcgcattgatggtttccgtaaaggacacgtaccaatgtctatggttaaacaacgttacggtatgtctgttctgaatgatgttctgggtgatctgatgcagcgtaatttcatcaacgctatcatcgaaaacaaagttaacccagtaggtgcacctgattacaaaccagagcaatacaaagaaggtgaagactttgtatactctgtagaattcgaagttttcccagaaatcgaactgaaagatctggaaagcattgaagtggtaaaacctatcgtgacagttaaagacgaagacgttgataacatgttagaaactctgcgtaaacaacaagccgagtggaaagataaagaaggtgaagttgcggcagaagatcgtgtaactgttgattttaatggttctattgacggtgaagaatttgaaggcggaaaagctgaagatttcgtactagcaatgggccaaggtcgtatgatcccaggtttcgaagaaggtcttatcggtcataaagcaggtgaagaattcactatcgatgtgactttcccagaagattaccacgctgaaaacttaaaaggtaaaaaagcacaatttgctatcaacctgaaaaaagtggaagagcgtgaactgccagaattaactgaagagttcatcaaacgcttcggtattgcagatggttcagttgatggtttacgtgccgaagtacgtaaaaacatggaacgtgagctgaaaaatgcgatccgtacacgtgttaaatcacaagttatcgatggcttagtgaaagctaacgaagttgacgtacctgcagctgcggtagatagcgaaattgaagttctgcaacgtcaagcagcacaacgtttcggtggtgatgaaaaacaagctctgcaattaccacgtgaattgttcgaagaacaagcaaaacgtcgtgttatcgttggattactgttaggtgaagtgatcaatagtaatgaactgaaagcagaagacgagcgtgtgaaagcgttgatcgacgaaatggcttcagcttatgaagatccatcagaagttgttgagttctacaataagaacgaacaactgatgaataacatccgtaatttagcattagaagagcaagcggtagaaaaaatcttagcaactgctaaagtaacggaaaaagaaactaacttcactgaactaatgaacgaagttcagatgggttaa

SEQ ID NO: 294204 - DNA, 309 bp, Proteus mirabilis
atgatccgtgatgatattgagaataagctgatttcacgcttttctccccattttttgcaagtcattaacgaaagccatcgtcataatgtacctgcaggctcggagagccattttaaagtcgttattgtgagtgacttatttaatgataaacgcagtgtgtcacgtcatcgtgatgtttatcaaacgttatctcatgaattagataatggcgttcatgctttagctctgcacacttttaccttgagcgagtgggatgaacaacaagataaagcattacactctccaggatgtcgtggtggaagccaataa

SEQ ID NO: 294205 - DNA, 579 bp, Proteus mirabilis
atgataaaaaatttactttgtgccgtgtttgcgctgacactgctggcaggatgtgcaacaccaagcaataaattatcgattgagccagtgatgtctgtaccaccatcagatccaactatgcgcccaattacacttagtatcaccagccaagataaacgaccttcgaaaaacttagcggaaatgagtcgtaatggtaagttagaggttttagtccccacacgtgatttagcttttctaatgcaagaaatcgttcaaaaacagatgatggcacgtggctatacttttggctctccagccgcagctgacgtaattgtggtgataaataaactgaacgcagatattagtgaaggaagtctacgccataatattagtgctaaagcagatatttccgttgttgtcagcatgcctaatggtagcacaaacactaaaacctatcgtactagctacaatgtacaaggcccatttggcgcatccaatgataaaatagcggcagcgattaataatgttttatctgagcttgtcagtgatatggcaaaagatccttccgtcagccaatacatcaaatctaacgctcgttaa

SEQ ID NO: 294206 - DNA, 1521 bp, Proteus mirabilis
atgcttcaagccgcctttaaacagaccacttggtataaatcttttattttactgttacttggtttcacttcgggcttaccccttgcattaacagcaggaaccttacaagcatggatgacagtagaaaatatcgatttaaaaacgattggttttttctcattggttggccaagcttacgtgtttaaattcctctggtcgccgtttatggatcgctatacaccttcattcttaggccgccgccggggatggatgttattaacacaaatcggtcttgtgttaggtattgcgggtatgggctttttaaaccctagccatcatttatggtggttagcctcgttagccgtcatcgtcgctttctgttctgcctcacaagacatcgtctttgatgcctataaaaccgatatcctaaaagccgatgaacgaggcacaggtgcagcagtctctgtgctgggctatcgaatagcgatgctggtttctgggggcatggcgctatggcttgcagataaatatattggctggcaaaacatgtactggctaatggctgccttaatgggcattggtattatcgccacgctattagctcaggagccagaaaccgccgtcaaacctccacgtacactctatgaagccgttatagagcctttatatgagtttttctctcgtaataatgcatggttaattttactacttattgtgctatacaaaatgggagatgcctttgcgttaagcttaagtaccacattccttattcgtggcgccggatttgatgcaggtgaagtgggattagtcaataaaacgcttggattggcagcaaccattgtcggagccttattaggcggtttattaatgcgccgttggactttattcaaagcgctgatgatctttggtattttgcaaggggggtcaaatatcggctattggtatttagctatctctgagcaaaatatttatagcatgggagcggtaatcgctttcgaaaatatttgtggtggtatgggaacggcggctttcgttgctctactaatgacactatgccatcaatctttttcagcaacacaattcgcccttctttccgccttagcggctatcggccgtgtctatgttggtcctgttgcaggctggtatgtagaatcccatggctgggaagcgttctatcttttctctattgttgcctctgttcccggtattattttgctgatgatcgctaaaaatacactcacttatacgcaaaaaactggcgaatttttacaacgaacattatttattaaacaataccgtttagcgatttatggtttactctttgccgtattactatttttgtgtagcttaatattacttattattaattcgttaccaaatttagagatgtttcagtcagttgattttatacaatctattaatagtgaattattaagcgagcttacttctacactcttcttatatggtgtcattattggcgccgttagcttaattatcgggactattttagattacttggcactgaaaaaaacagctaattaa

SEQ ID NO: 294207 - DNA, 1374 bp, Proteus mirabilis
gtgacctcatttgctgatcttcatgcacttcctgctgagcaacttactaatcttaatgagcttggctatttaacgatgactcccgtccaagaagcgtctttacctgctattcttgccgggaaagatgttcgagcccaagcaaaaaccggaagtggcaaaacagcagcttttggtttaggtttattgcaacgtattgatgcaaaacaatttaatactcaatcattagtattatgtccaactcgagaattagctgatcaagtcgctaatgagttacgtcgactggctcgttttctgcctaacattaaaattctgactctgtgtggtggggtgccttttagcattcaacgggattcattaattcatgctgctcatattattgtcgcgactccggggcgtttattagatcatttaaacaagcagactgtcacacttgctgatgtaaaaacattggtacttgatgaggcagatagaatgctggatatgggattttttgatgatattagcgacatcatttctcaaatgtcggcacaacgtcaaactttgctcttttctgcaacttggccggatgaaatcgctaaaattagtcgaaaaattcaacaagatcctgtcactattgagattaattcaccggatgaattgccagcggttgaacaacaattttatgagatctcccgttatggcaaattgggattattacaaaagcttttgagtcatcatcaacctaattcttgtgtggtattttgtaataccaaaagagattgccaagatgtgtatgaagctttgaccgaaagcaaccaaagtgtccttgcgttacatggcgatatggagcaaaaagagcgcgaccaaacattgatccgttttgctaatggtagctgtcgagtgttagtcgccacagatgtcgctgcgcgaggcttagatatcaaagcgctagaaatggtgattaattatgaattatcacacgatccggaagttcatatacatcgaattggacgaacagccagagcgggagaaagtggtttagcgattagtttttgcgcaccagaagagatccctcgcgccaatgctctggaagaaatgttgaatataaaactggattggcaatcagccccttcaggtttatcaatcacaccattggttgcgacaatggcaacactatgtattgatggcggtaaaaaagcaaaaatgcgtccaggggacatccttggtgcattaactggagatttagggtttagtggagaagatattggtaagataaatatccatccaactcatgcctatgtagcggtaaaacagtccattgctaaacaggtatggaaaagccttcaacaaggtaaaattaaaggtaaatcagtaaaagtcagactgtttagataa

SEQ ID NO: 294208 - DNA, 762 bp, Proteus mirabilis
atgataagaaaatcaattttattgtttattacaacaacatgcactttacctgcacaggctaattatctcggtggatttgctaatatcagtatcaattatcttgactggacgacacataccacccataaaacaggccaaacttcccataaagatgattttgcttatttagaacttgaagagggagcccacttttcatggggtgagttttatggcttttttgacttagaaaatccttttaataatcgacaaacacagcccggcgataatcagcgctataccgtcaaaggaactagtcgtatttatttagctgacagtggattaaacctttatggccatgtatatggtacttggtcactgcccggaaaagaatatggcggtaatttccatgaggttaatacactttatggtattgggtataacacacaattagcagatatctggtttaaaccttttatagctttacattatgtcgatcaaacttattattcaggaaataatggctatgtggttggttgggttgccggttacgattttaacctggtaaatcaaaaatttagcatcacaaattggcatgagatggagtttgatcgtaataaacgttatggcaatggcggaaaaaatggctttaatggagctgtcgctatttggtggcaccccaccgcttccattactacaggcattcaataccgctatgcttataaaaagttaagagaaaactttttacaagatggtgtgatctatagcttaaaatataacttctaa

SEQ ID NO: 294209 - DNA, 537 bp, Proteus mirabilis
gtgaaagacgccgtgatcctcgttgataaaaatgacaatgagctaggaaccatgcccaagctggaggcacatattactggtgccttacatagagccttttcattatttattttcaattctaagcaacaaatgttgatccaacaacgagcactgactaaatatcactctggcggtctatgggcgaatacttgttgtagccatcctttacccaatgaacctctatcacaagcaatacatcggcgtttaaatgaagaattaggtatgcagtgtgatatgcaacctattggtacgattttatataatgagaaagtcacggatgatcttattgagcatgagtttgatcatctttttttaggctttagtgataaaacaccacagtgtcatcccgatgaagttatggatcatcgttggatttcattaaacgagctttatcatgatgtagaaaaacatcctgaaaactatagtgcatggttctgccatatattaatggctcttggtatagagcagtttactcgatggagtaaaaatattacttag

SEQ ID NO: 294210 - DNA, 1104 bp, Proteus mirabilis
atgtcttctatattacctcgctctgtaacatcccctaaaaaattctttattggtagtcaattacttgcttctgttggtaattatatgaaagatttcggagataatgcttttattatcagcgatgaatttttcctagaaaaagtaaataaagaagctttgtcgtcaattaaagaaaatgggctatctggtttcgttgaaaaatttaattacgaatgtacagaagctgaagtggatcgcttgggtaaaattgttgttgaaaataaagcgaatgttattatcggtatcggtggcggtaaaacattagacgtatctaaagcggttgcttattatcatcacctccctgttattttattcccaacgattgcttctacagatgcgccttgtacggctctttctgttctttataaagaaaatggtgaatttgataaatacttatttttacctcagaaccctgatatggtgattgcggataccgcgattattgcttctgcaccacaacgcttcttctctgcaggtgtcggtgatgctttagccacttattttgaagcacgtgcttgctatcaagctgatggacttaatttagttaatcaacgtccatcacgtacaggtttaggtctagcacaattgtgttttgaaatattgagtgaaaatattgataaagcaatggatgctgtgcgccataaaattaccacacaagctttagagcaaactattgaagcgactatttatttaagtggtgtgggggctgaagcaggtggtttagcagccgctcatgcggtcaataatggtatgtctgcagttgcttccttacatcatgtgcaacatggtgaaaaagtggtatttggattattaacacaattagtgttagaaaatgcgccacaagaagaaattgatgaagttattcgtattatcaaagcggctgaattgccattaacgcttgaagatatgggaatgaaagagtttattgaaagtgaatggcgtaatgtagcgaaaattgcttgtgcagaaggtgataccatgggcaatatgcctatgaaagtgactgaagaagatgtctacaacgcaatgattgcagcgaatgcattagcgcatcgctataaataa

SEQ ID NO: 294211 - DNA, 930 bp, Proteus mirabilis
atgccaatcagagtaccagacgaactacccgcagtgagttgtttacgcaatgagaatgtctttgtcatgacatcaagtagagcgagtattcaagatattcgtcctttaaaagtactgttactcaatctgatgcccaaaaaaatagaaacagaaaatcaatttctacgattgctctctaatagtccattacaaattgatatccaattattgcgtattgattctcgtgttcccaaaaatacacctgttgagcatcttgatactttttattgtgattttgcccaaattaaagaacagaattttgatggcttgattgtaacgggagcaccattaggtttagttgaatttgaagatgtggcttattgggaggaaataaaagaaatcattacatgggcaaaagagcatgttacttcaacactttttatttgctgggccgctcaagcgggcctaaatattttatatgacttacctaaatataccttaaaacaaaaaatttctggggtatatcgtcatacaacatgtgatcctttcgcgttactgactcgtgggtttgatgaaacattctttgcccctcattcacgttatgctggttttcctgttgagtttattcaacaaaatacagatttagaaatattagcaacatcagagcaagcaggggcttacctattcgcatctaaagataaacgtgttgtctttgccacaggtcacccagaatacgatcccaatacattagctgacgaatatcatcgtgatgttaaagctggattagcaccacaactacctgaaaattattttcccgataataatcctaataaaaaacctcttgtatcttggcgtagtcatggccatttactctttgcaaattggctaaattattatgtttatcaaattacaccatttgatctggcacagatgaacccaactttagattaa

SEQ ID NO: 294212 - DNA, 1593 bp, Proteus mirabilis
atgtcacaatcattaactacagaagcattaagcttcacaaaaccttttgggatagctgaaaaagagatattaaatcatgatgttgagtcatttttgactaatttggtcagtcagttttcagaacgtcgtgacaccttattagcagaaagagaaatttggaaacaaaaagtggataatggaatgcttcctgattttatttcagaatcagattccattataaactcagaatggaaagtgaatccaattcctaaagacttgcaagatcgtcgggtcgaaattacaggccccgtagatcgtaaaatggtgatcaatgcattaaatgctaatgtaaaagtatttatggcagattttgaggattcacttgccccgacatgggataaggttattgatggccaaattaatttacgtgatgctgtcaaaggaacaatttcctataccaatgagcaaggcaagtgctatcaactaaaagcatcgcctgcggtgttaattgctcgagtcaggggattacacttgcctgagaagcatgtgctatggcagggaaaacctattcctgggtgcttgtttgattttgccttatatttttaccataactataaagcattacaggcaaagggcagcgggccttatttttacattcctaaattacaaacttggcaagaggcaaaatggtggagtgatgtttttcatttcactgaaaaacgcttcggtttagccagcggaactattaaagccacagtattaattgaaactttaccggcggtatttcaaatggaagagatcttattccatatgaaagagcatattgtgggccttaattgtggacgttgggattatatctttagctatatcaaaacgttgaagaattaccctgatcgcgtgttaccggatagacagggtattactatgactcaacctttcttaagtgcttattcccgactacttattcaaacttgtcataaacgtggtgcatttgcgatgggaggaatgtctgcttttatccccagtcgctctgcggagcaaaatggtgtcattttacaaaaggtatttgaggataaagagcttgaagcaactaatggccatgatggtacttggatagctcaccctggattagccgaaacagtgttatctgcgtttgatgcggtattaggagagcgagcaaaccaacttgatgtacaacgtaatgaaaagatcaccgcagaaatgttattggccccttgtgaaggtgaaagaaccgcaacaggaatgagagcgaatatccgcgttgctgtgcaatatattgaagcgtggatctcaggtaatggttgtgtgcctatttatgggctaatggaagatgccgccacggcagagatatctcgaacctctatttggcaatggatccgtcatcaaaaaccattatcagatggacagattgtaacaaaagcgctttttcgcaacatgttgaaagaagagctggaagttattcgccaagaagtgggtgatacccgctttgagcaaggtcgttttaaagaagcagcaaccttaatggataacattactacccaagatgaattagtcgattttctgactttaccgggttatcaacttttaaattaa

SEQ ID NO: 294213 - DNA, 1308 bp, Proteus mirabilis
atgtctatgagtagatcagagcagattgcccaattagaaaaagagtgggaacaacctcgctggaaagggatcaaacgtccttatagcgcagaagatgtcattaaattacgaggttccgttaaccctgaacataccttagcaagacgtggtgcgcaacggctttggtcatcattaaatggtaagtcgaagaagggatatgtcaatgcattaggtgctttaacaggagggcaagcattacagcaagctaaagcgggattagaagccatttatctatctggttggcaagtggcggctgatgcgaatactgctgccagtatgtaccctgatcaatctttatacccggtggactctgtacccaatgttgttcagcgtattaataatacgtttagacgagctgatcaaattcagtggtcaaatggtatcggccctcagcataaagattatattgattttttccttcctattgttgctgatgcagaagcgggttttggtggtgtacttaacgtatttgaattaatgaaagcaatgattgaggcgggtgcagcaggcgttcactttgaagatcagttagccgcagtgaaaaaatgcggtcatatgggcggaaaagtcttagtacctacgcaagaggctgtgcaaaagctggtggcagcacgtttagcggcagatgtttcggatgttcctaccttattagttgccagaactgatgcggatgcggccgatctcttaacttcagattgcgatccttacgatagttcatttttaactggtgagcgtaccgctgaaggttttttctgtactcatgcaggaattgatcaagccattagtcgagggcttgcttatgccccttatgccgatttggtctggtgtgagacttccacgccggatctgaaaatggcggctaaatttgccgaagcgatccatgataaatatcccggtaaaatgttagcgtataactgctctccatcttttaactggaaaaagaatcttgacgatagcacgatcgcccatttccaagatgagctttctgcgatggggtataaattccagtttatcactttagcgggtattcatagtatgtggttcaatatgttcgatttagcgcatgattacgctaaaggtgaaggtatgaaacactatgttgaaaaggtacaagaaaaagaatttgctgcactatcgaaaggctacaccttctcatctcatcaacaagaagtgggcaccggctattttgataaagtgacgacgattattcaaggtggtatgtcatctgttacggcattaactggctctactgaagagcaacaattctag

SEQ ID NO: 294214 - DNA, 1719 bp, Proteus mirabilis
atgacagctgaagatttagtcgctcaaacgatcttacaaggctttgatgcacaatatgggcgttttcttgagataacgtcaggtgctcaatatcgttttgagcaagcagattggcatggtattcaattggcgatgaaagagcgcatccgcttatacgataatcatgttggattagttgtggaacaacttagatgtatccgacatgatattgataaagaaagtgttttcttacaaaaagtcaaagagcgatacacacaattattacctaactatccccgttttgaaattgctgaaagtttttttaattcagtctattgccgtctatttcatcatcgagagcttaataaaaaaaacttattcgttttttcatcacaacctgcgtatcgttttgcgcaagcccctcgccctttatcaagaacgtttgttatacaaagtgatttacccgcattattgcaagatattttatcgcgcctacctttgcgtttaccgtggcaaaataaatcgcgagatattcaatttatttgccaaacgctctatgcgcaatttagccatgaggaattacaaaatgcagtatttcacattgctaatgagctattttaccgtaataaagcggcatggatgattggtaagatagcgataaataatcaattcattcccctgttattacctattcataatattgaacagcacttagttattgatacctgtttaacgacaacagatgaagccagtattgtttttggttttgctcgttcttattttatggtttatgcgccatttcccgcggcattagtaacatggttacgggatattctccctgaaaagtctattgcagagctctatatgtcgattggttgtcagaaacatggcaaaactgaatattaccgtgaataccttgcttttatgaatttttcatcggaacaatttattgaagctccgggggtaaaaggaatggtgatgctcgttttcacactgcctacttacgatagagtgtttaaagtgatcaaagataggtttgcgccacaaaaaacaatgactgcagagcgtgtcaaagagtgctatcgcttggtgaaagagcatgatcgtgttgggagaatggcggatacgcaagagtttgagaactttgttattgataaaaagcggatcagtaacgacttaatggcgatcttagaacaggagatccccaataaattagaagatctaggtgataagttactgatcagccatctgtatatggaacgccgtatgacgccacttaatatctatatggagcagtgtgacgataaacagttaaaagccgtggttgaagattatggccaagcacttaaagagttgattgccgcaaatatttttcctggtgatatgttatttaagaattttggcgtgacacgtcatcatcgagttattttttatgattatgatgaaataagttatatgacagatatgaatttccgtgctattcctcccgctcgctatcctgaagatgaactggccagtgagccttggtatagcgttgctgaaaatgatgtttttcctgaagagtttcgttactttttatgttgtgataagcaagtatgtcattattttgaagctcaacatcatgatcttctttcacctgaatactggcaacaacagcagcaaagaattaaacaagggtatattgaagatgtttacgcctatccacaaagtaaacgttttattgataacgatatcggttaa

SEQ ID NO: 294215 - DNA, 642 bp, Proteus mirabilis
atgaatcattggaatacaagtgcagagtctgtactaaaatcagggcccgttgttcctgttattgttattaatcatattgaagaagctgtacctgtcgcaaaagcgttagtcgccggtggggtaaaagttttagaagtgacactacgtacagactgcgctattgaagctattcgtcgcattgctaaagaagtaccagaagccattgttggtgcagggacagtgatcaaccctcaacaattagcccaagtcacagaagcgggtgcacaatttgccattagcccaggcttaaccgatgcgctattaaaagctgcggtagcaggctctattcctcttatccctggtatctcgactgtttctgaattaatgctaggtatgagttacggtttaaatgaatttaagtttttcccagcagaagctaatggtggcgttaaagcattaaaagcaattgcaggaccattctcacaagtacgtttctgcccaaccggcggtatttcgcctgaaaactaccgtaactaccttgcactggaaagtgtactttgtatcggtggctcttggttagttccgagtgatgctgtgaaagcaggagattatcaacgtattactgagctagcaaaagaagctgttgctggcgctcaacattaa

SEQ ID NO: 294216 - DNA, 1857 bp, Proteus mirabilis
atgaacccgaaaaatcatgaccagtttcagaacaacttcgccgcattaaacgaaaccgtacaacaagtgactgaacgtattgttgctcgctcacaaataactcgtcgcgcttatctgaaaaaaattgaagctgctaaaagccaaaccgtacaccgtgcccagttagcttgcggtaatttggctcatggttttgccgcctgtcaaagtgaagataaaaatttacttaagaatatggttcataatgatatcgccatcattactgcatataacgatatgttatccgctcataaaccttatgaagattatccacaaaaaattaaagcggcattgcatactgttggcgctgtaggtcaagtcgctggtggtgtgcctgcgatgtgtgatggtgtgacacaagggcaagatggaatggagctatcactgctaagtcgcgatgttattgccatgtctgcagctgtcgggttatctcataatatgtttgatggcgccctttatttagggatctgcgataaaatcgttccagggcttactatggcagcactgtcattcggtcatctgcctgcaatttttgtccctgcaggtccaatgaccagtggtttacccaataaagaaaaggtgcgtattcgccaactgtatgcagaaggcaaggtcgatcgtaatgctttattagaagcagaagcagcctcttaccatagtatgggaacttgtactttttatggtacagcaaactccaatcaaatggtgatggaagcaatgggcttacatttacctggctcctcttttgttcatccagatactccattacgtgaagcattaacagaagcggcagcaaaacaaattgtacgcttaacagaaaactcggggaattatttacctattggtcaattagttgacgaaaaggtgattgttaacggtattattgtgctgttagccacaggtggctcaacaaatctcaccatgcatttagtggcaatggcacgggcggcgggcattatgattaattgggatgatttttctcaattatcacaagttgtgccattaattgctcgtatttatcctaatggtccggcagatattaatcaattccaagcggcaggtggtcttgctcttattattcgtgaattactgaaaaaaggcttaattcatcgcgatgtcaatacggtggcaggatttggtattgaacgctataccttagagccgtggctaaatgaaggtaaacttgattggcgtgaaggtgcaatacaatctttagataaagatgtgattgccgatatcaatacgccattctcttcacacggcggaacacaggtgatggaaggtaatttaggtcgagcagtgatgaaaacgtcggcggtgcctgatgaaaataaaattattgaagcacctgctgttgtgtttaatagccaacatgatattgccgctaaatttagcgccggtgaattgaataaagattgtgtagtcgttgtgcgttatcaaggtccccaagccaatgggatgccagaattacataaactcatgcctcctttaggggtattgatggataaaggctataaagtggcattagtcacagatggccgtctttctggtgcatcaggtaaagttcctgccgctattcatgtaacaccagaggcggtaaacggtggactattagcaaaagtacaagatggtgacattattcgtgttaatggcaaaacaggtgaattaacactcttagttgatgaacaaaccttagaagctcgccaaaccgaaatacctgatctcagcgcaaacaatagcggttgcggtcgtgagttgttcgttaatttacgtcgccatttatcaggtgctgaacaaggtgcttgctgtattgatttttaa

SEQ ID NO: 294217 - DNA, 837 bp, Proteus mirabilis
atgaccgtctcccctaccaataaaaaagctcgtaagccaaaaacacccgcaactcaaagtactgcacaaggtggccccgttcagtcattaagccgtggcttaacattattggaatatatttccgaatctccaggcggtattgctttaactgatttagcttttcaagcaggactacccaattccactactcaccgcttacttactactttgcaacaacatggttttgtacgccaagtaggtgatttaggtttatgggtagtgggcactcatgcctttattgtcggtagtagctttctgcaaacccgtaacctactggttatggtgcaccctatattgcgtcaattaatggaagattcaggtgaaaccgttaatttggctattcttgatcaagttgaatttgatgcagtgattgtcgaccaagtacaatgtaatgcattaatgagaatgtctgccccaattggcggcaagttgccaatgcatgcatctggtgcaggtaaagcatttctatccactttaccggaaaataagttactcccccttttacagaaaaaaggtctgatggcctataccccttataccaaaaccttaccttccgcattaaaagagaatttagaacaagctcgtaaacaaggtttctcttttgatgatgaagagcatgcattaggtttgcgttgtattggcgcttgtatctatgatgaacaccaccagccttttgccgctatttcactctctggccccgtatctagaatgacagattcacgcattacggaattaggtgcactggtgataaaagcggctaagcagatcagccgtgaatatggtggtgtaaaaagttaa

SEQ ID NO: 294218 - DNA, 3672 bp, Proteus mirabilis
atgataactcagcagcttacgcaagcattagccaaacgtatcttagtccttgatggcgcaatgggaaccatgatccagcaatatcagctggcagaagaagattaccgaggtgaacgttttgcccattggcaatgtgatgttaaagggaataatgaccttttagtcttgacgcagccgcagatcattactgaaattcataatgcttattttgaagccggtgcagatatcgtcgaaacaaacacctttaatgcaacctctattgccatggctgattatcagatggaagggttatgtgcagaattgaatgaagaggctgctaaacttgccagagcctgtgctgataaatggagtgcattaacgccagataaaccacgttatgttgcaggggtattagggccgaccaatagaacagcatccatttctccggatgttaacgatcccgcgtttcgtaatatctcatttgatacattggtgatggcttatcgagaggcgatctgcggactcattaaaggaggggtggatttaattatggtggaaaccatttttgacaccctaaatgctaaagcggctatttttgcgattaaatgtgagtttgataatcttaatattgaattaccggtgatgatctcagggactatcactgatgcgtcaggtagaacattaacagggcaaaccacagaagccttttatcactcactacgtcatgccgacgcgttatcatttggtttaaattgtgcgctagggccaaaagaattacgccaatatattcaaactctctcccaaatatcagaaacttatgtcagtgctcaccctaatgctggcttacctaatgcctttggcggatatgatttagatgccaatgagatggcggaacaaatcaaggagtgggcgcaagctgggtttcttaatattgtcggtggttgttgtggcacaacccctgcccatattcaggctattgctcaagcggttgatggcatagcacctagaacattacctgtcattaaaaaagcctgtcgactctcaggtcttgagcctttggtcattgatgataattcgctgttcgtcaatgtgggggaacgaacgaatgtgacaggttcggctaaatttaaacgtttaataaaagaaggtaattaccaagaagcccttgatgttgctcgtcagcaagttgaaaacggtgctcaaatcatcgatatcaatatggatgaaggcatgttagatgcgatagaagcaatgacacgttttcttaatcttattgcgggtgaacccgatattgccaaagtcccgattatgattgactcgtcaaaatggcaagtcattgaggaaggattgaaatgtattcagggtaaaggaatagtcaattcgatttcgatgaaagagggggaagccctttttattgagcatgcaaaattagttcgtaagtatggtgctgcagttgttgtgatggcatttgatgaaatagggcaagcagatactcgagagcgaaaaatagaaatttgtcggcgtgcgtattatctattaactgaaaaagccggatttccaccagaagatattatttttgatcccaatatttttgctgtagcaacgggtattgctgaacataataattatgcagttgattttatagaagtttgtgcggatattaaatctcaactgccttatgctttaatttctggcggtgtttctaatgtgtcattctcttttcggggcaatgatcccgttcgggaagctatccactccgtttttctctattacgctgtaaaaaatggtatggatatggggattgtcaatgctgggcagctcgctatttatgactcattagcggatgaactacgtaatgcggtagaggatgttattttaaatcgccatgcagagagtactgataatttactggcactcgcagagcgttatcgtggtactaaaagtgaggaacagcactctacgcttgcgcaatggcgacaatgggaggtcgaaaagcgcctagagtacgcgttagtgaaagggatcaccgaatttatcattgaagatacagaagcgtgccgccaacaagcttcgagtcctatcgaagtgatagaagggccattaatgaatggcatgaacacagtgggcgatctgtttggtgaaggtaaaatgtttttaccccaagtagtaaaatcggcacgggtgatgaaacaggccgtagcttaccttgaaccttatattcaagcgacaaaaaaagcaggcagctcggcaggaaaagtgttactggcgacagtaaagggagatgtccacgacattggcaaaaatattgtcggagtggtgttgcaatgtaataactatgaaattatcgatctgggggtcatggtaccttgcgataaaatcttgcaaacagccattgacgaacatgttgatattattggattgtctggattgatcactccatcactggatgagatggtgaatgttgctaaggagatggaaagacgcggtttttctcttcctttaatgattggtggtgcgacaacatcgaaagcgcacacggcagtaaaaattgaacctaattacagccacccaaccgtttatgtgcagaatgcgtcaagaacggtcggggtggtcgctgcattattatcggccacacaaaaggctgattttgtcgctaaaacacgccgtgaatatgaagtggtacgtcagcagtatgcgagaaaaaaaccgcgtacgcctcccgtttccttagcgacagctcgtgccaatgcattgcagcttgactggcaacactatacgccacctaagccgaaccaattaggggtacaacaagttacagccaatattgaaactttacgtgagtatatcgactggacgcctttctttatgacttggtcattggcggggaaatatccacgtatattagaagatgaggttgtcggagaagaggcaagacgcgtttttgcagatgcgaatgccatgttggataaactcagccgtgaaaaattactgacaccgaaaggtatcgttggtctattccctgctaatcgccttggtgatgacattattatttaccaagatgaaacgcgacagcatgagttattacgttgttgccatttacgccaacaaacagaaaaaaaagagtaccctaactattgcttagcagactttattgcccctgtggatagtggtcttgctgactattttggtgcttttgcagttaccggcggtctagaagaagatgcactcgctaatgggtatgataatgctcatgatgattacaataaaattatggtaaaagcgctatccgatcgtcttgcagaagcttttgccgaatatttgcatcaacaagtgagaaccaagatttggggttacagtcctgacgaagcgctctctaatgacgagttgattagagaaaaatatcaaggaacacgacctgcaccgggatatccagcttgcccagagcacacagaaaaagcaaaaatttggcaactgttaaatgtagaaaatcgcattggtatgaagcttactgatgcttatgcgatgtggccgggggcttcggtatcgggttggtattttagtcatcctgaaagtaaatattttgccgtcgctcaaattcaaaaagatcaggtggaagattacgccaaacgtcgtggtatgagtatgagtgaagttgagcgttggttagcccctaatttaggctatgagccttaa

SEQ ID NO: 294219 - DNA, 579 bp, Proteus mirabilis
atgagttatactttgtatcttcagcaaaccccaacagttggcactaaagttccttttccttctttagccaaaggaaattacccattaaatgaagttatcattaatgcgtttttaaatctgatgcaattaacagggaatttggatacagatgcattattagatgaaaaaatgtttgataagatttggcttaaggctgaaatgacaccggcgcgcatggaagaaattggtgactatatttatcatcatattcctacacatccagcccccctagaagaagagatcacactatttaagcaagctatgcaagaagaagaggcattgttagctaaagagagtgaaaaagaagggtgtattccaatttataagtttgctacaaatgatggttggattgtgacaccgaaagagtgtgagattattgcctcagcacttacagctaagcttcttgaagataaccatgtatttgtggaacaagtggctaagatgtctcatattgcctatcgctcgttagaaatcgcgttgattgattttggtaaatttaatcaatttgctaaaaaatatggtggttatcgggtatattaa

SEQ ID NO: 294220 - DNA, 669 bp, Proteus mirabilis
atgagtattgcatcctcttatgatatttgtcacattgttaaaaataaagtaaaaaataaattagatctatttttacatacaaataaatatttaaatcagctacgaagtgaaatagtgtcactaaaaaactctaacaatactcctgacagtttaaatataaataaacaaccattgataggaaaaggacttagtgaaatagaaaaaaatattgaatttattgataggatacttgatcaggaaaataaaaatctacaacaatataaaagagatttgaattcattcaagacaaaacacctaccgtatccttcttcccaaaaggatattacaaatatgaataaaacattattatctaatatttcaaacaagataagtaatataaaggatataaaggatgatttaataaaacagcgtactgaattaaataatcgtagatcattatctaaaatcaccacaatagattttttatattacgttgaacataaaccattttatataaaaaaggaaaatatatctttcagtgaaattgatattcaatgcattcacaacatgaagaaaatatatgacaacatatggtttaaaaatgtagaagataatttaaaatcaaaattatattctgatattatcaaaaaaatagataaagaaaaaccatcaaataaagtagttacgtaa

SEQ ID NO: 294221 - DNA, 1371 bp, Proteus mirabilis
atgaaagataatactgcaacaccttcatcaccttttactatcgccaaatttggtggcactagcgtggcaaattttgcggcgatggaaaagtgtgcagatattatcttaaaacagaaatcagtccgtgtggtggttctttctgcttcagcggggatcaccaatttgcttatcgaacttgcgacaggtgttgacgcaacacaacgagccgctttattggctcaagttcgtgatattgaatacgccatcatcaatcaactatcacaagcagaaattatttctcaagaaataaaccgcttattggaaaatattgaaatgctgtcagaagcggcagccttggcaacttctgatgcgttaaccgatgagttagtcagccacggtgaattgatgtcaacgttattgtttgttgaactgttacgtgaaaaaggaataagtgcagattggtttgatgtcagaaaagtgatgaaaaccaacgatctgttttgtcatgctgagccagatatggcgcaattaactgagttaacacaaagtttaattcagccccgcttaacagaaaccgtgattgttacccaaggttttatcggacaagagcctaaaggaaaaaccaccaccttagggcgtggtggaagtgattatactgcggcactgattggtgaagcattagggatgtcacgtgtcgatatttggactgatgtgcctggtatttatagcactgatccaagaatagtcccgcaagcacatcgtattgatcatattgcctttgatgaagcggctgaaatggcaacctttggtgctaaaattctccatcccgcaacgttattacctgcagtgcgtagtggtattcctgtgtttgtcggctcaagcaaagcaccagaagaaggtggtacattggtttgtgcacaaactgataatcctcctgtgtttcgtgccattgcactacgtagaaaccagacactacttaccctgcatagtttgaaaatgcttcatgcccgtggttttttggcagaaatatttaccattttatcacgccaccatatttcggttgatgtgataaccacatcagaagtcagtattgctttaacattggataccacaggtaccactagctcatcaggcagtctgttaactaatgctttattaacagaattatccgcattatgtcgcgtggaagtagaagaagatctggcattggtcgctatcattggtaattcactatcgcaagtcaatggcttaggaagccaaatttttggcactttagaggattataatattagaatgataagtcatggtgcgagtacccataacttatgcttattagtggatggcaaagatgcagataatattgtcagaaaactacacgatacgttattttaa

SEQ ID NO: 294222 - DNA, 1647 bp, Proteus mirabilis
atgaaaaatgtaaacccaactcataccttagcttggaaggcattagaagaccattttgccgtgatgaaagatacagaaatgaaaacactgttctctcaagatccatcacgctttgacaccttttcaagaacgttttcagaccaaattctagtcgatttttcaaaaaaccgtatcacccaagaaacattagataaattacaggctctggctaaagagtgtgatgttgctggtgcgataaagagcatgtttagcggtgaaaaaatcaactgtacggaagatcgtgcggtactccacaccgcattacgcaaccgtagcaatacaccggttatggtcgatggcaaagatgtgatgccagaagtcaatgctgtattgcataaaatgaaagtatttagtgagcgtgtgattagtggtgaatggaaaggttacacaggtaaagcgattactgatgtggtcaatatcggtattggtggctctgatttaggcccgtatatggtgacagaagcactgcgcccttataaaaaccacttgaccatgcattttgtttctaatgttgatggcacacatattgctgaaaccttgaaaaaatgcgatccagaaacaacgctattcttgattgcttcaaaaacctttaccacacaagaaaccatgactaatgcacactctgcaagagattggttcttatctgcggctaaagagagtgcttttgttgcgaaacactttgttgcgttatcaactaatagtgctgaagtagaaaaatttggtattgataccgcaaatatgtttgagttttgggattgggttggtggccgctactcattatggtcagcaattggtttatccattgtattatctattggttatgacaactttgagcagttactgtctggtgctcatgctatggataatcactttagaaccactgaagctgaaaataatattccgatgatattggcgcttattggcatttggtataacaatttttttggtaccgaaactgaagcgattctgccatacgatcaatatatgcaccgttttgctgcttacttccaacaaggtaatatggaatccaatggtaaatatatcgaccgtgatggaaacaaagtcagttaccaaaccggacctattatttggggagagccggggactaatggccagcatgcgttttatcaattaattcatcaaggaaccaaactgatcccttgtgattttattgcaccagcgatcagccataatccattatctgatcatcatgcaaaactaatgtcgaacttctttgcacaaaccgaagcattagcatttggtaaaactcgtgagcaagtcgatgcagagtttgcctcagcaggaaaagatcctgcaaccatgggatatgtggcaccatttaaagtgtttgaagggaatcgtcccaccaactccattcttttaaaagagatcactccctattcattaggcgcgttaattgcgatgtatgaacataaaatctttgtacaaggtgtaattttcaatatcttcacctttgaccaatggggcgttgagttgggcaaacaattagctaatcgcatattgccagagttaaaaggtaaggaaagtgttaacagtcatgatagttcaacaaataatttaattaatcgttacaaagcatggcgttaa

SEQ ID NO: 294223 - DNA, 510 bp, Proteus mirabilis
atgtttaaaaaatccataattactcacgcacctattcactggttatcagatgaagagcgtgaagaagtcgcagaaaataccttaagttggctgctggaattaggttcaatgacacgacgttttgagcaacattgccatcaagtgacggtaatgccatatcaagaaggttttattgaatatatcgagcctgctgatgaacaaaagtgtttaccttatagccgacgctattggctaagagaaatcgtcctttgtggggataatgtaccttggttattagggcgaacattagtgccggaagagacattaacgggtgaagatcgccaattagtgaatttgcgtacggtgccattaggacgttatctgttccaggaaacaaccttaagtcgtgattttattcatattgggcaacaaaatggacattggttacgtcgttcccgtttccagctttcagataaacctttattattaactgaggtgtttttgcctgcatcacctgtatataagcagtag

SEQ ID NO: 294224 - DNA, 855 bp, Proteus mirabilis
atgacgcacaataaatggcaggcgtatagccgtttaatgcgtatagataagcctattggagcgctattattactttggccaacgtattgggcattatggatcgccgctaaaggctttcctgactggcatatcctaattgtatttactctaggtgtgttttccatgcgtgccgctgggtgtgtaataaatgactttgctgacagaaaaattgatggcaacgttgaacgaactaaaaatagaccattacctagtggtgctgtaacggagaaagagagcaagattatctttattgtcttggtgctgttttcgtttggattagtgcttacgttaaataccatgaccatttggttatctattgccgcacttgcactcgcatggttttatccttttgtaaaacgttttagtaatttgcctcaattaattttaggtatggcctttggttggtctatccctatgggatttgctgcagtttctgaaacactacctttagtatgttggttactctttttggtcaatattatctggtctgttgtgtatgacactcaatatgccatggtcgatcgcaatgatgatttaaaaataggggtgaaatcgacagccattctgtttggtcgttacgataaaatcattattggtattttacagttagtgatgttggcattattagtggctattggcgttttgctgaatatgaaagggatctattattggtcattgttactcgtgacagccctgtttatttatcaacagaaattaattgctgaacgggaaagagccccttgttttcaagcgtttatgaataataattatgtcggttttgttttatttgcaggtattttatttaattatttctaa

SEQ ID NO: 294225 - DNA, 2484 bp, Proteus mirabilis
atgtcagcttggcgtaaactatattataacacattgaatttaccactgaaattgttggtaaaaagtaaacgagttccgactgatcctatcactgagttaggcttagatacgtcgcgatctttcctttatgttctgccttatcactctaaagcagacttactgacattacgtcagcaatgtttatctcttggcttgccagatcctctgcaacccatagaaattaacggaaccaaactgccagcctacgtctttattgacgatggtcctagagtattccgttactactctcccgatccgcgtaaagattcagtgaaaacattccatgcttatcttgatgctcatcgtaacaatccgcatcttgatattgaaatgttacctgcttcagtgatgttcggtcgctcaccgggtcgagaaggtcataatggcgtcccccatttacgcttattaaatgggatccaaaaatttattgccatcctctggctaggtcgagatagttttgtccgtttctcgccgaccgtatccatgcgccaaatggctaatgaacatggaaccgataccagcattgctcgaaaacttgcgcgtgtggcgcgtattcacttttcacgtcagcgtttagcagcagttggcccaaaactgcctgcacgccaagatctcttcaataaactattggcatccaaagccattgaaaaagccattgaagatgaagcaaaagcgaaaaaaattacgcttgataaagcacgtaaaaatgccactgatatcatggaagagatcgccgctaatttctcttatgaagcggtacgaatgactgatcgtgtattaagctggacatggaataagctctatcaaggtatcaacgtttttaatgcagaacgtgtgcgccaacttgcgcaagatggacatgaaattgtctacgtaccttgtcaccgtagtcatatggactacttattgctttcctatgtactttatcatcaaggattggttcccccacatattgctgcgggtattaaccttaatttctggccagcaggaccgattttccgccatttaggggctttctttattcgtcgaacctttaaaggaaataaactttattcaaccatcttccgggaatatttaggtgaattattctctcgaggctactctattgaatattttgttgaaggtggacgctcccgtacaggtcgactgttagatcctaaaacagggacgctgtcaatgaccgtgcaagccatgttacgtggtgagacacgccctatttccatcgttcccatttatattggctatgagcatgtcatggaagttgccacttatgccaaagagttgcgtggtgcgacaaaagagaaagaaggttttatgcagatgatcagaggattacgtaaactacgtaaccttggtcaaggctatgtcaattttggtgaacctatttcgctatcacaatatcttaatcaggccgtgcctgactggcgcgatgatattgatcccattgagccacaacgtccaagctggttaaatcctgcagttagtgcgttagcggataatattatggttaatattaataatgccgcttcgattaatgcgattaaccttgtctctacggcattgctagcgtcccgtcagcgagcactaactaaagaacaattattagagcaaatagattgttatctacagttactgcgtaatgtgccttactcatcagatatggttgtccccgataaaagctcagaaacattattagcacacgccttgcaaacagataaattccaagttgagcaggatagtcttggtgatattattatattgcctcgtgaaagtgccgtattgatgacttattatcgcaataacaccattcacttaatggttacaccatcattaattgcgagcattgtcttgcatcacgagcgtattcaccgtgatgacttaatgaaacaggtagaattaattttccctcttatcaaagctgagttgtttattcgctatgaaaaagaggagttacctgatgtggttaatacactgattagtgaactttgtcgccagcgtctaatttgctgtgctgatgatggcatattacggatcaatccagcacgtattcgcccattacagcttttagcagcaagtgttagagaaacgctacagcgttatggtattacgctctctctactcaattttgctcctgaaattagccgtgcactattagaaagagaaagccgcattttggcgcaacgactttctgtattgcatggtattaacgcacctgagttctttgataaagcggttttctccactttagtttctacactgcgtgaagaaggttatcttaaagataatgaagatatcctcaaagcagatgcctctgcactttaccaagttattgcgaaattaatgtcaccagaaattcgtttaaccattgagagtgtaggcgttactgaagataacaattcagcacaagcgattgaggaaaaccctgagtccagcatggataagtag

SEQ ID NO: 294226 - DNA, 372 bp, Proteus mirabilis
atggctaatcaaaataaaggtcttacccgaatcattaaagctggtggctattcatatcagggcttacgcgccgcttggatcaatgaagccgcttttagacaagaagctattgtgaccttaatagcaattatccttgcattttttatcgatgtcagtgttctagagcgcattttattgattggttcagtcgtccttgtcgttattttagaactggtcaatagtgctatagaagctgtcgtcgatcgcattggtacagaacgtcatgaattatcaggacgagcaaaggatatgggatcagctgccgttctcgtcgctattatattgggattatttacttggggaaccattctttggcatcatttttttgcataa

SEQ ID NO: 294227 - DNA, 612 bp, Proteus mirabilis
atgaaagcattaactgcaaggcagcagcaggtttacgatttggttcgtgatcacatttcgcaaacgggtatgccaccaacacgggcggaaatcgcttcccaacttggttttcgctcacctaatgcggcagaagagcatttaaaagcacttgctcgcaaaggcgtgatagaaattgtctctggtgcatctagaggtatccgtttgctacttgaagaagagcctgaaggcttaccattaattggacgagttgcagccggtgaaccacttttagcgcaagagcatatcgaaagccattatcaagttgatcctatgctttttaaaccgagcgcagattttttactgcgtgttaatggtatgtcgatgaaagatatcggtattatggatggcgatctacttgctgtgcataaaacacaagatgtccataatggccaagtgattgtcgcacgtattgaagatgaagtaactgtaaaacgatttaagaaagtcggtagtaagatagaactgcacgcagaaaatccagagttttcacctattatcgttgatttacgtgagcagagctttactgtggaaggattagcagtaggggttatccgtaacggcgaatggctgtaa

SEQ ID NO: 294228 - DNA, 531 bp, Proteus mirabilis
atgaatgaagagaaattgctcgctcaggcagaaaagatctgccagaaacgaggtgttcgcctgacttcacaacgtctggcagtattgcgtctgatcatgcaacaacctaccgcaatcagcgcttatgatttattagatttattacgccaagtagagcctcaagctaaaccacctaccgtatatcgtggattggaatttctacttgaacaaggttttattcacaaaatagaatccaccaatagctatgtgctttgtcatcattttgatgatgctgagcatacatcggtgatgttaatttgtgatcgttgcttatcagtcacagaaaaaagtagccataaaattgaaggggcgatcaccacactcgctaaagataatggctttcatttacgccatagtgtgattgaaattcatgggctgtgcgctcagtgccatgaagcccaagcctgtacacatccggaaggttgtcaccatgatcatagtatggatgataatcttaagcagaaaaaaaccggtgactataagcctcgttaa

SEQ ID NO: 294229 - DNA, 525 bp, Proteus mirabilis
atggcgagcagaggcgttaacaaagttattcttatcggtaatttagggcaggatccagaaatccgttatatgccaagtggtggtgcagtggcaaatctgacactagcaacttcagaaagctggcgcgacaaacaaaccggtgaaatgaaagagaaaaccgaatggcaccgtgtggtcattttcggcaaactagcagaaattgctggcgagtatctgcgtaaaggttcacaagtttatattgaaggtcaattacaaacacgtaaatggcaagatcaaagtggtcaagatcgctacagcactgaagttgtggtgaatatcggtggcacaatgcagatgttaggtggccgtggtggtcaagataatgcaccttcacaaggccaaggcggttggggtcaacctcagcaaccacaagcatcacaacagtttagtggtggcgcaccatctcgcccagcacaacaacccgcagcggcaccagcgccaagtaatgaaccaccaatggactttgatgacgatattccgttctga

SEQ ID NO: 294230 - DNA, 2835 bp, Proteus mirabilis
atggataaaatcgaagtacggggcgctcgcacccataacctaaaaaatatcaatttggtcattccccgcgataaacttattgttattacgggactttctggctcaggtaaatcctctttagcctttgatacgctttatgcggaaggccaacggcgttacgttgaatcgctttcagcttatgctcgtcagtttctttccttaatggaaaagcctgatgttgatcatattgaagggttatcgcccgctatttcgattgagcagaaatcgacatcacataacccacgctcaacggtcggtaccattaccgagatccacgattacctacgtctattatttgcacgtgtgggtgaaccgcgctgtcctgatcacgatatccctttagcggctcaaacggtaagccaaatggtggataatgttttagcgcaacctgaaggtaaacgcttaatgttattggcgccaatcgtaaaagagcgcaaaggtgagcatgtaaaattactcaataatcttgctgcacaaggctatattcgtgctcgtatcgatggtgaagtgtgtgatttatcagatccccctaccttggagttacagaaaaagcacaccattgaagtggtcattgatcgctttaaagttcgtgacgatctggctcaacgtttagcagaatcttttgaaaccgcattagagctttctggcggtactgctgttatctctgatatggacgatagcagtactgaagatattgttttttctgcaaactttgcctgtcctatttgtggttatagcatgagtgaactagagccacggttattctcttttaataaccccgcaggtgcgtgtcctacttgtgatggtttaggggttcaacaatttttcgatcctgatttggtgatccagaatcgagaaatttctctggccggtggtgcgattaaagggtgggatcggcgcaatttttactatttccaaatgttgcgctcattaggcgagcactatcattttgatgttgaagctccctttgactcattacccgacaagatccagaaagtgattttatccggttcaggtaaagaaaatattgaatttaaatacaccaatgatcgaggggatgttgtggttcgccatcatccttttgaaggggtattaaataatatggagcgccgctatcgtgaaacagaatcgagtgcggtgcgtgaagagttagctaaatatattagcaatcgtccttgcgcctcttgtggtggtactcgcttacgtcgcgaagctcgccatgtgtatgttgaaaataccacgttacctgaaattgcggattacagtattggtcatgcgatgagctttttccaaaatctaaaactcagtggtcagcgagcgaagattgccgaaaaagtattaaaagagattggtgacagattaaaattcttggtcaatgtgggattaaattacctcactctttctcgttcagcggagacattatcaggcggcgaagcgcagcgtattcgcctagcaagccaaattggtgctggattagttggggtaatgtatgtacttgatgagccttcaattggtttgcatcaacgcgataacgatcgcctactggaaacgttgatccacttgcgtgatttaggtaacacggtgatcgtcgttgagcatgatgaagacgctatccgtgccgctgatcatattattgatattgggccgggtgctggcgttcatggtggtgagatagtcgctcagggtacactggaagatattgttaataatcccaactcattaaccggtaaattcttaagtggcgaacgccgtattgctatccctgaaaagcgtgttcctgttgatcgcgaaaaaatgctcactattttaggggcgaaaggtaataacctaaaaaacgttaatttaaaaatacctgttggtttatttacttgtattactggtgtatctggctcgggtaaatcaaccttaattaatgatacgttattccccattgcccaacgtcaattaaatggcgccactaatagcgtgccagcaccttatttagacgttgagggattagagcacttcgataaagtgattgatattaaccaaagtcctatcggtcgtacgccacgttccaaccctgcgacttataccggagtatttaccccgatccgtgaactttttgctggtgtaccagaatcacgagctcgcggttatacgccagggcgctttagttttaacgtgaagggggggcgttgcgaagcttgccaaggcgatggtgtattaaaagttgaaatgcactttttacctgatgtgtatgtgccttgtgatcagtgtaaagggcaacgttataatcgtgaaacccttgagattaaatataaagggaaaaatattcacgaagcgctagatatgacaatcgaagaagcaagagagttttttgatgcggtgcccgcattagcgcgtaagctacaaacattgattgatgtgggactctcttatattcgtttaggacagtctgccactacgttatcgggtggtgaagcacaacgggttaaattagccaaagagttgtcaaaacggggtacaggccaaaccctctatattttggatgaaccgaccacgggtttgcactttgccgatattgagttacttcttgatgtgctccatcagttgcgtgatcagggtaatacgattgtggtgattgagcataacctcgatgtgatcaaaaccgctgactggatcgttgatttagggcctgaaggaggcagtggtggtggtcagatcttgatatccggtacgccagagcaagttgctgactttgaaggctcccacacggcaaggtttttgaaaccaattttagagcgcggttattaa

SEQ ID NO: 294231 - DNA, 1332 bp, Proteus mirabilis
atggaaacggcttcctcaaaaacagagacaacaagctatcccgcaactagtgctggcgctcgccgagcaggtatgacagaagaacaatggcgtgcagcaattaaatttgacggcaatgatgtgggctgggttatcatgagtatcggtatggctatcggtgcagggattgtttttttacctgtacaggttggcttaatgggattgtgggttttcttactttcctccgtgattggttaccccgcaatgtaccttttccaacgcctatttattaatacgttggctgaatctcctgagtgtaaagactacccaagcgttatcaccggttatctcggtaaaaactggggtattttattaggtgcactctattttgtgatgttagtgatttggatgtttgtctattccacagctatcacgaatgacagtgcttcttatctacaaacttttggtgtgactgacagtttattatcagaaaatccattctatggtctgattttaatctgtgcgttagtggctatttcttctcgtggtgaacaattactgtttaagctatcaagctttatggtaatgacaaaactactggttgttgcggcattaggtctttcaatgattggtatgtggcatctgtataatgttggcgcattaccacctgccggacgtttaattaaagaagccattatcacactaccttttacattaacttctattctgtttatccaaacattaagcccaatggttatctcttatcgtagtcgtaaccaaaatcgtgaagtagcgcgtcataaagcattacgtgcaatgaatatcgctttcggtgtgttgttctgtacggtgtttttctatgcaatctccttcacattagcaatgggacatgatgaagcagtaaaagcttatgagcaaaatatctctgcattagcgattgcggcaaaattcttccctggcggttgggtaaccgtagtgagtgtaatgttgaatattttcgcagtaatgaccgcattctttggtgtctatctcggtttccgtgaagccacacaagggattgtgatgaatattctgcaacgcatgatgcccgttgaaaaaatcaatgaaaaatgggtacaaaacggcattatgatctttgctgtgctgttagcttggggcgccattattctcaatgcaccagtactgagctttacctcaatttgtagtcctatctttggtatggtcggttgtcttatccctgcatacctagtgtacaaagtaccgatgttacataaatacaaaggcgcatcactttatctgattatctttacgggtctgctactttgtgtttctccgttcttggcattctcatag

SEQ ID NO: 294232 - DNA, 1350 bp, Proteus mirabilis
atgagccagaacaataattctcatttatggtcgcagtttattcgtcaattacgtgaaggtgttaagccagcagtaggttgcactgagccgatttcattggcattagctgcggcaaaagcaaccgcattattagctgagcctgttgttggtattgaagcgtgggtttcgcctaatttaatgaaaaacggaatgggcgtaacagtaccaggaacgggaatggcgggattacccatcgcggctgcattaggggcgacagggggcaatccggatgctggccttgaagtattacttacagcatcaccacaagctatcgctcaggctaaggcattggttgctgaaggaaaagtgacggttggcgtgaaaacgccatgtagtgatgtactctactccgaagcaaaagtatatggtcagtcaggttatgccattgtcagtattgctaaagagcatacccatgttgtgcgctgtgagtgtaatggcaaagttgtttttgaggatgataaaacgagtttgactcatgccggggatagcgtagaagaaaagccttttgcgacggtttgtgctgaagatatttatcgctttgcactcaatgtacctatagatcaagtcgcctttatgcttgatgcggcttatctaaatggtgctttatcagaagaagggctaaaaaatagttatggattggcgatagggcggacgctggtttcacagcaagagaatggcttattaggtaaggatttactgagtgaaatcatgataagaacgtctgccgcttcagatgcacgtatggggggcgctgtattacctgctatgagtaactcaggctccggtaatcaaggcattgctgcaacattgccggtaatggtagttgctgaatttattcaagcagatgacgaaactttattacgggcattagttttatcgcacttaatggcgatttatgttcatagccatttcccacctctgtctgcattgtgtgcggcaaccactgcatcaatgggggcggctgcgggtatggcatggctactgactaaagacttcaccactgtaagtatgtcaatcaacagtatgattggtgatattagtggcattatctgtgatggcgcctcaaatagctgtgcgatgaaagtatcaagtagtgcggcgagtgcgtataaagccgttttgatggcgatgcaaaatcaaagtgtagcgggtactgacgggattgtcagtgatgatgttgatagttcaattgcgaatctctgcgcattagccagtcgtgcaatgcaacatacagatattcaaattattgagatcatggaagaaaaagcacgccgtaatgccggggaaaagcagcaagctgtcaatgcataa

SEQ ID NO: 294233 - DNA, 1194 bp, Proteus mirabilis
gtgtttcaacaggttgaagcgtttgcgggagatccgattctctcattaatggatgtctataataaagatccacgtcaagataaaattaacctaagtattggtctttattatgatgaagaaggcaaaacccccattctaggcactgtgtctgtggcgcgtcagcagcttaatgcgatgacacctaccgcaacactgtatttgccaatggaaggactcgccccttatcgccacgaagtacagactctcctttttggtgctgataacccgcttattgcagacaaaaagattgctaccatacaaacattaggtggctccggagcgctaaaagtcggcgcagattttctacatcgctattttccaagctctgaagtttggatcagtgatcccacttgggacaatcatgcgtctatttttgcgggctccggttttaaagtaaattattatccttattttgatcccgaaaccaaaggggtcaaattcgatgcattaatagattgctttaaaaagcttcctgaaaaaagcatcgtactgatgcacccatgttgccataatccaacaggatccgatctcaccaaagtacaatgggatcaggtcattgagatcctcaaagcgcgtcaagcaatccctttccttgatattgcttatcagggatttgctgaaagtttagatgatgatgcttatgcggttcgcgctatggccaaagcggggttacctgtattagtcagtaactcattctctaaaatcttcgggatttatggggaacgagcgggtggcttatcgattgtatgtgataacgcgaaagagtgtgagcatgtattagggcaattaaaagcgggcgcacgtcgtatctattcaagtcctgctaactatggcgcacaactggttaatcaagttttatcagatcatgtattaaccgcacaatggcaaaaagaagtggctcatatgcgtgaccgcatcaaagagatgcgtgtaactttagttaatgccttaaaagaagcattacctgagaaaaactttgatcatttattaacacaacgcggtatgttcagttataccggcttttcaccagagcaagtagatagattacgtgaagagtttggtatttacctgattggtacaggtcgtgtttgtatggcgggtgtcaataacaataatgtgcagcgcattgcacaagcctttgcagccgtcagttaa

SEQ ID NO: 294234 - DNA, 1092 bp, Proteus mirabilis
atgaaagcggcaaccgcagtaatagatcgccgcgctctgcgtcacaattttcagcatgtaagagactatgcaccacatagccacctgatagctgtcgtgaaagcaaacgcttatggtcatgggttattagaaacagcatatactttaatggatgatgctgattgttttggcgtagcacgtatcggtgaagccttaacattacgtagtggggggattgtgaaacccatcctactacttgaaggcttctttgatgctgttgatttacccattttggtggttaaccatattgagactgttgttcatagtgaagagcaactcgaagcgttagaaaatgccgatttagaagaacccgtaaaagtctggatgaagctcgatactggaatgcatcgtttaggcgtccgtcctgaagaagctgaggctttttatcaacgactttgtgcttgtaaaaatgtccaacaacccgtcaatttggtcagtcattttagtcgcgcggatgagcctgatattcctgaagtcacacaaaatcaaattcagctatttcaagcctttatccaagataaagcgggtgataaatctatcgctgcttctgcgggaattttattttggccacaagtccattatcaatgggttcgccctgggatcatcacatacggtatctcacctacgggtgataacagaacaggtaaagactttggtttaaccccggcaatgacactaaaaacgagccttattgcggttcgtaaacataaagcaggtgaacccgttggttatggtggcacatgggtaagtgaaaaagatacttatctgggtgttattgctatcggttatggtgatggttacccacgtagtgcaccttctggcacccctgtttggatcaacggtcgaaaagtgccgattgttggacgcgtatccatggatatgatcagcgtcgatttgggatctgagctaattgatcgtgtcggtgatgaagctattttatggggagatgtgctacccgtagaagaaatagccaaatatagtggtattagcgcgtacgaattaattaccaaattaacttcgcgcgtcattatggaatacctagacgaacaatag

SEQ ID NO: 294235 - DNA, 1380 bp, Proteus mirabilis
atgtctgagataaaagatcgccaaatggaagggttgaagcttcccccccattcgctagaagccgaacaatcggtgttaggcggtctaatgatagataacgagcgttgggataatgtctccgagcgtgtcactgccgatgatttttatagccgacctcatcgcactatttttgcgcaaatgcagcgtttacttgagctgggtaaacctattgatctgataaccttatcagaagcactagaacaaaacgcagaattagaaagcgttggaggctttgcttatttagcagaactatccaaaaatacgccaagtgcagccaatattaacgcttatgccgacattgttcgtgagcgtgctgtcgttcgcgatatgatcaaagtcgccaatgaaattgctgatgctggatttgatccccaaggacgcaccagcgaagatctgctcgattttgctgaatctcgcgtctttcaaattgccgaaacccgcgccaataaagatgaagggccaaaagcaattgatgccattttagaagaaaccgttgaaaaaatagagcaactctaccaaaaacctcatgatggtgtgacgggggtatccagtggctatcaagatctggataaaaaaaccgccggactgcaaaaatcagatttaattattgtcgcagcacgtccttctatgggtaaaaccaccttcgcgatgaacttatgcgaaaatgcggcaatgacggaagaaaaacctgtacttatctttagcttagagatgccaggtaaccaaatcatgatgcgtatgctcgcttcattgtctcgcgtggatcaaacccgtattcgtactgggcaacttgacgatgaagattgggcgcgtatttcaagtaccatgggtattttgcttgaaaaacgtaatatgtatattgatgattcctctggtttaacccccaccgaggtgcgctctcgtgcccgaagaatttatcgtgaacatggcggtttaagcctaatcatgattgactacttgcagttaatgagagtaccttcattatctgagaaccgaactttagaaattgctgaaatttcacgctctttgaaagcattagctaaagaattacaggttcctgttgtcgctctgtcacagttaaaccgtagtttggaacaacgtgctgataagcgcccagttaactctgacttacgtgaatcgggctctattgagcaagatgccgacttgattatgtttatctatcgtgacgaagtttatcacgaaaatagcgacctaaaaggggtggcagaaattatcattggtaaacagcgtaatggccctatcggtacggtaagactaacctttaatggtcaatggtctcgctttgataactacgcaggccctgcttacgacgacgaataa

SEQ ID NO: 294236 - DNA, 984 bp, Proteus mirabilis
atggctaaacgcattcagtttgcagctcatggtaatgccgatgtactcgagctaacttcatttacccccgcccctctaggcgataacgaagtacaggttgccaataaagccattggcattaattatattgatacttatgtgcgtagcggattatatccagtagagcatttcccaagtggcttaggaactgaagctgccggtgttgtgattaaaacaggcgctcatgttacttcacttaaagaaggggatagagttgtatatgcacaatctccattaggcgcctacagcgatacgcataatgtaccagaaaataaagtagctcgcctgcctgataatatctcttttgaacaagccgccgcctcttttttgaaaggattaacggtttattatctattcaatgaaacatacaaattacgtgcaggggaaacctttttattccatgcagcggctggtggcgtcggactaattgccagccaatgggcgaaagcgattggcgctaaaatgattggtaccgcaggcagtgatgagaaagtggctaaagctaaggccgcaggtgcatggaaagtgattaactatcaaactgaatctattgttgaacgtgtccttgcgctcaccaataaccaaaaagtacccgttgtgtatgattctgttggcaaagcaacttggttggattcgttgcactgtttgcaacgccgaggcttaatggtcagttttggtaacgcttctggtgcggtaacaggggttgatttaggtattcttaataaattgggttcactttatgttactcgtccttctatttccggctacattacgacgcgcgaagagttagatgcagcaagtgaagcactatttacgttaattggtcgtggtaaaattgatgtcagtgtgccagataatcagaaatttgcattagctgatgctaaagccgcacaccgttatcttgaaagtcgtcaatctcaaggttcaagtctattgatcccatag

SEQ ID NO: 294237 - DNA, 1035 bp, Proteus mirabilis
atgcacgaaaatacaccaaccgataaaacactagaaaacaagcaaacacagggcactcaagggaattacccacttaatcgcttctctgttgcacctatgctcgattggactgatcgccattgccgttatttctttcgccagcttaccaaaaatactttgctgtatactgaaatggtcacaacaggtgccattattcatggcaaaggtgattatttaaaatatagcaacgaagagcacccgatctcattacagcttggcggcagtgatccacaagcgttagcgcaatgtgcaaaattggcacaagagcgtggctatgatgaaattaatttaaatgtaggttgcccttctgatcgggtacaaaatggacgctttggtgcttgtttaatgggtgaagcacaactcgttgcagattgcgtgaaagctatgcgtgatgtggtcgatattcctgtgacggtaaaaacacgtattggcatcgacaaccaagatagttatcaatttctatgtgattttattgataccgtcagccgtgataataactgcgatacctttattattcatgctcgcaaagcttggttatcgggattaagccccaaagaaaaccgcgaagtgcctcctttagattatcctcgtgtttatcaattaaaacgtgatttctcgcatctcactatggcaattaatgggggaattaagtcactagaagaggcgcaggagcacttaaaatatatggatggtgttatggtaggtcgcgaagcttatcaaaatccatcaatattggctcatgtggatcacgtgctttttgataatcagttacctgttactaatgccgtcgctgccgtaaaagccatgtatccttatattgaaaaagagctctcacaaggcacttatttaggtcatatcacccgccatatgttgggaattttccaaggtattcccggggcaagacaatggcgtcgtcatttaagtgaaaatgcccacaaacaaggtgctgatttaaccgtgctagagaatgcgctcaagtttgtgaccgaaaaatag

SEQ ID NO: 294238 - DNA, 1065 bp, Proteus mirabilis
atgcctgtaaaatcaataattaagacgctatctaactctcgactctctacttacaaacaaccacacttatgcgatgtaagcgatgaacaaagcttagggttatatgtgtggaataaacagttatcaggtctcttttatccagtacttcaagtattagaagtctctttgcgtaatgctatcaataatgcttacatcgaataccatgagcagctagtcgaagcaaattatcaaccacaagattgggctaaagagaaagccaaaatagaccagttttggtttagtaattcttatacaaatcaaaataatagtaaggggtttcaacagatagttaaagctaagaaggatttagttagagagggtaaagctattactcctgataatctaattgcgaaactaacatttggtttttgggttcacttaacagacaagaatcatcgttcaagccaatcccttgctaatcctcctattatcgagctttggccaaagcttaataattttgtttttccatatgctaaggacttaaatggtacctctttgagtattaaccatattagctcaaatttatttgaaataaatagacttagaaatcgtattgcgcaccatgaacctatctggaaagcaacagatttgtttgattctgatgacagcataaatatggttatttcacattacgaacgatgcttaaaagtcattcattggattaaccctaacaatttaaagttattatctgtcatagacaacgacaaattgatgggaatagcttgcactcaacatacgctatggcgaagtaaaatgttagcatcgggactttattctgttccagatatcattaaatggaaagaaagacatgaaatcaacaccagacgcaaaggtgaagtcgttagtgtgacagcaaattatgcgattatacgctgtaaaaagtcacatcagatattttacaccaaccaatcaatgcagaagagacgcaaagcttggcctttaacggttggtattgatgttactttcattccaaaaccagcctcagctcaaggcaaccatcccaatgcgactcaagtaaaacaatga

SEQ ID NO: 294239 - DNA, 1275 bp, Proteus mirabilis
atgaatattgaaaggaaaatactagtcaaactaaaaaatatacattcacttgatcaaaataaaaaactattacgctctggttaccataatcaatataatacatttttatctaatatttcttttgttccagtattatcatcatcacaattaccacctaaaaatcatctttctcttacatcaaatcatttaaatgattactattatttaaatttacctaatgataacacatatacattagatgaaattattaaaatattaaaacaacatcctgatatagaatatgtgcaaaaaattccaaaattacctgtacagccacctaatattacgccggatttaactcgccatcagcattatttaaaaaccccaaaaataaaatcaaatgaaataactgggttaggtattatagacgcttggaataaaaatgcttatggacaaggtatacaggtggccgatattgagtgggattttgatttatcacatcccgatttgttagctaataatatcacgccactttttcctttaactgaaaaaaccgatcaagccgaccatggtacggcagtggcggggttaattatggggaaaaaagacggtaaaggtattactgggcttgcttataaattagatatgttttatgccatatcagaattaagcagtggtcgtattgaagcaattattgccagtaaacagaaattacacgcgggtgatattgttttatatgagatgcagacagtttgtgaacatcatgcttatgttcctgctgattatgaaatgcatatctgggaggcaactcgtacattaacagaagcggggattattgtgatcatggctgccggcaatgggggggttgatctcgatttacctttttatgatagctatcgtcaacgtagcgataaccactctatacgtgtcggtgcgggctcgccttatacgctaaatcgtttacctttctcaacgcatggctcccccattcatgtgcaagcatggggagaagatgtgaccactgccggatatgatgatctttttcatggtgacgggaataacaaatatacggctaattttagtggaacatcatcagcctgtgcattagtcgcgggggcggctgcggttattcaatcttggtataaagataaaaccaacacggtattaacgccaatagagatgcgagagctactgattaaaacaggaacttatccatcattaaatgaaaagataggccctttgcctaatgtaaataatgccatcttacatttaaaaaatttaatccaatataattaa

SEQ ID NO: 294240 - DNA, 579 bp, Proteus mirabilis
atgaataaaataaagtctattgccgtgtattgtggttcaagtttaggcgcttcaccaatttataaacaacaagcgattctttttgctaaagagctggttaaacgtaatatcactttagtttatggtggtgccagtgtaggaattatgggcacgctcgcggataccgttttacaggaagggggtaaagttattggtgtgatcccaacgctattagaagggcgtgaaatttcacataaaaatctgacagagctccatgtcgttgaaactatgcaccaacgtaaaagtaaaatgattgaactcgcggacggctttgtggcactgccggggggttttggcacattagaagagttcagtgaagtgtttacttggagccaaattggccttcatcaaaagccattaggtatatttaatattaatgatttttatcagccattactggctatgatagataaaatggtagatgaaaaattcttacatgaaaaatatcgtcatatggcgattgttgagcaatcacctatccagttattagataaatttgaaagttatattgccccttcgattaaaacctacgataaataa

SEQ ID NO: 294241 - DNA, 465 bp, Proteus mirabilis
atgataaccataagaaaagctgtactttctgatgttgagcagattaataccctgtatggctatttatttgctgagatggcgaaattacagccagaaagattaaaaccgggtaaacaagatgaagcatttattattaatggcattaaaaatgataaatttcatctgttagtggctgagttagaacagaaaattgtcggttttactattgcccaaatacaagagacaccgctatttaactgtttagtacagcgtaaatatgcctatatttttgatattgttgttgacccttctgttcgtggacaaggggcaggggcattgttgctaaatgccatgaaggcgtgggctaaacaacaaaaaatgacccacctagagctttcagtattggctgaaaatgccgatgctaaacgtttttatcagcgagaagggttaaaagaagtcagtaccgtgatgggtattgctttgtaa

SEQ ID NO: 294242 - DNA, 1701 bp, Proteus mirabilis
atgacatttcaaattgcagacacactctattataacggcctaatctataccgctgataatagtaacaatttcgtcgaagctatcgctgtttcccaaggcattattattgcaacaggcacaaaatcgaatttacttgcttactgtaatgaaaaaacacagcatatcgatttacagaagaaaatggtgatgcccggcattattgatgctcatatgcatccattttgggggggaaccacattagcaggttgtcaccttgattacctctccttaacaatcgatgaaattctatcgcgtatccaacgctatcttgatgctgatcccatcgatagtgatacagcttggttgaaagtgtcagcatggtatcgtgaagggatgcaaccggaagggatacaaatgacgcgttatcaccttgatagcttaaatacgtctcgccctatcttacttttttctagtgattgtcatagcgtattagcaaattcccgcgcactagaattattaaatattacggctgaaacccccgatccacctgatggcaatattgaacgtgatggtgatagaacacctattggtattcttgaagatgcgccagctatgcaggctattgatagcctaccgcctttaacggcagagcaaaatctacaaatcgcacgccatgtacaaaagttgctcaatcaacaaggggtaacgactatcatggatgcacgtgttggtgagccacaattacgtgcctttaataccttgcgagaagcgggtgaattaacggttcgtgttgagaatgcggttgaaattacccctgatgatgtggctgatattgcagctattcctcatgctgtacaacaagcaataacacgattctctcactggcatcaaatcagtcaaggcgcgcaacccagtgtcgctattcgccatattaagctttttcttgatggtgtattacaagcgccgattatgacagcccgtttacacgccccttatcgtattaatgtcggtacggatgaaacgcctcattggcaagattcagagcatgttggcgatctctatttttcacctgaaatcttgacgccattagtcactgagattagccgtgcaggttatcatcctcatattcataccgtcgctgaaggggctattagtgtcgcacttgacgccattagtgaaatgcgcaaagccttgccagaaaaagatattcgccccggccttgcgcataacgaattaatgtgtgaaaaagattatgcgcgctttgcccaattaaatacctacccttttctctcctttcaatgggctggcgtagagcaacataatattgataaagatcttgaaatgttaggcaaagcacgttgccaatatctagaaaccgccggtaaatttattgatgcgggagtgactgtcgcatttggcagtgattggccgattgatccattaaatgagtggtatgactttaaagttgccatgactcgacaaaaagatccctctcagccacgtttagataatgatcgcaatctcaccttaatcgaagtattacgagccgccaccattaatgccgcttatgcactagatatggataaacagattggttcattagaagtaggaaaattcgccgattttattgtcttagatagaaacttgtttgaaatatcggcagaagatattgaaaatgtcagggtattgtgtacgataattgcggggaaacccacaatttag

SEQ ID NO: 294243 - DNA, 768 bp, Proteus mirabilis
atgagtatagaattaaccgatgaagaaacgctgcgttataatcgccaaattgtgttaaggggctttgattttgacggtcaagaagcactgaaaagtgcttctgtattgattgtcggtgttgggggattaggctgtagtgtatcgcaatatctcactgccgcaggtgttggcaaactgacactattagattttgataccgtttcactgtccaatcttcaacgccagatcctgcatcgcgatagcaccattggtcagccgaaagttttatcagctaaaacaacattaaacgcgattaatccccatgtacagatagatacggttgatgcactacttgaagataaagcactggctgaattaatcagccaacatcatctgataatggattgcacagataatgtcactatccgtgagcaactaaatcgactgtgttttgtgcagaaaaaacccttagtatctggtgcagccattcgtatggaaggccaaattagcgtctttacctatcaagatgatgaaccttgctatcgctgtttaagtcatctttttggtgataatgcactaacttgtgttgaagcgggtattatggcccctgttgtgggtactattggcactttacaggccattgaagccatcaaattactcactggttatggcgaaactttacatggcaaagtattaatttttgacgctatgcggatgcaatttcgtgaatttaagctacctaaaaatccacactgtgatgtatgtgcggctaatttgcccgataattga

SEQ ID NO: 294244 - DNA, 1242 bp, Proteus mirabilis
atgagtcaatgtcaggttagcggtttgttatcccttgatgaggcgctagaaaaattacttgaaaaaccggtggcaatcacagatacccttagtatccctttgcataaggcagcaggttatatcttaagtgagcacatcacttcaccactcaatgtacctcctttcgataattctgccatggatggttacggtgtacgctatacggatctaaacactcaatctcctttacctattgcaggcaaagcgtttgctggagtcccttttgaaggtgaattaccacaaggacaatgtgttcgtatcatgaccggagccatgatacccgcaggtgtcgataccgttattatgcaagaagaaacacaagtgactgacaacggtattctttttccacatccagccaagcttggacaaaatattcgtcgtattggtgaggatataaaacaaaatgatatcgtcttagccgcaggaacaaaactttctacagcacagttacctcttattgcttcactcggtattgccaatattaatgtttaccgcaaattaaaagtggccgtattttcaacgggtgatgagttgcaaactattggccaaccattaaaagcggggcaaatctatgatactaaccgctttgccgtacgcttaatgttggaaaaattagattgtgatgtgcttgatttaggcgttattccagattcgccagaaaaactgcgagaaacctttaaaaccgctgatgcacaagcggatttagtgattagcagtggcggagtttctgtgggtgaagcggactatactaaacaaattttagatgaaataggcgaaattggtttttggaaattagccattaagccaggtaaaccttttgcttttggtcgcttacataatgcttggttctgcggattaccgggtaatcctgtctcagcaacagtgacattctaccaattagtacagcctttaattgcccgtttatctggttttagtcagtggcgagcaccacagcgtttccatgctaaaacctgttcaccattaaaaaaatctgtcggtcgtctggatttccaacgcggtatcgccagtattaatgaaaatggtgaatggcaagtaaccacatcgggacatcaaggctctcacgtatatagctcctttagtgttgcaaactgttttatcgtcttagagcgagagcgtggtaaagttgcagcgggtgaaaccgtcactattgagctatttaatcctctgctaaaaagcgaatag

SEQ ID NO: 294245 - DNA, 1170 bp, Proteus mirabilis
atgaatacctcaacccatccaagccattcagcacaagcctttcatatcgcttttagtggtttccttgctttagttgttgctatggggataggacgttttacttttacgcctcaagtaccgctaatgattgcggacacacaactgacattaaccagtgccagtattgttgctgcatttaattatctaggatatttagctggttcatatgatgcgatgaaagcaactaaaggtgtgggctatcggctttgggggggattatggggagcggtgatcattacactgcttagtgcggtacttaatgatgctttaactcatagtattgcccgtttttttattggttgggcaagcggttggacattagtgcttgttgcttcgtgggcaaatgaagtattagcccgtttaaatcgcccggcattaagtgtggcagtctatgcaggaacaggggcggggatctttattagtggccttcttgcggtattcattctcaagtggcagatgagtgcgacaacaggttggttgatttacggtgtgttggcatttatttgtgcaatttatgtgagctatcatttacccaaaccttggtcaattaatcgtgagcaagtcaaagtagagccacttatcttaacgccggcgatgaaaaaattgatttggggttatacctttgcgggctttggttatattttacctgcgacctttttatctcaaatggcgacagaacgttttcccggtagcttagttgctcaatttgtctggcctatttttggtgcttccgcagctttatgtattgggatcgcgatactgacacgtaatgtccttaatacacaattacgattggcgataacactatggttgcaagcactggggatcatcattgccgaatggctacccacaattacaggtcttgctattggcgcatttttagtggggggagggttaatgtgtgcggtgcaattggcatttttacgtggtaaagagttggcacctgatcatgctcgttatatggcaggattattaacaacattttatgctattggacagctagttgggcctctggtttccttcctttcaacggcgttaacgggaagactagagccggcattatatgtcgcctttgtgatattgatcatcggcggtattttggtttgtatgaaagaaaacaataaagggtaa

SEQ ID NO: 294246 - DNA, 663 bp, Proteus mirabilis
atgtcatcaacattaagtaaagaggcgcaatgggtacatgccgcgttagtggagcgtggtttggaaacgcctcttcgtgagccaaaactttcacccagtgagagtaaacaacaaattaaacatcacatgacggaagtgatgaaattgttaaacctagatttgagtgatgacagtttagcggaaacgccacatcgcattgcgaaaatgtatgttgatgaaattttttcaggcttggattatcacaactttcctaaaatcaccctgattgaaaataaaatgcaggttgatgaaatggtcactgttcgtgacatcacattaaccagtacttgtgagcaccattttgtcactattgatggtaaagcaacggttgcttatattcctaaagataaagtgattggtttatcaaaaattaaccgtattgtgcagttcttcgcacaacgccctcaagtgcaagagcgtttaacgcaacaaatattgattgccttacaaacgctattggggacgaaaaatgttgctgtctctattgatgccgttcactattgtgtaaaagcaagaggcattcgtgatgcaaccagtgcaaccaccacaacttcattaggtggactatttaaatctagccaaaatactcgccaagagtttttgcgtgctgtacgccatctttga

SEQ ID NO: 294247 - DNA, 1152 bp, Proteus mirabilis
atggaacaaaattcacgtcaacgcatcgacgctttagatgcgttgagaggaatagcgatccttggcatcttattactcaatatctcaggttttgccttattaagagttgcctcatttaatcctatgcattcaggagaggcgacttttgcggacaaacttacttggatggggctaaatttatttacccaaggaaagtttctgtttatttttgcgctgttatttggcggaacactttatttattatcacagcgctctgttgcttggaacgtatctcgcctaattattctggcattaatcggtattattcataccctattactatgggaaggggatatcttatttccttatagtatttgcggattatttgttctcttttttattaaagcattacctattaagcggcaatttatccttgggctggtgctctatttatttggcgcgattattttagcttttttattttattactatcgtgattttgttgaaatagtttggtatagctctgactattccgccatgatagagactaactggaaaaccggaaactatataaatagtatctactggcgattagatgaactgagtgattttatttttaatttagttcgtcaatatagttggtttttaattggcgccatgttaatgggggcggcgttaatggcatccggttggttacaacgacgctattcacagtctcattatggtttgatagcggtttgttttttagtcataagtttacttttccaagggacgcttgttattaccgattattatttagattggcattatatgtggtctgcggtagtggctcagcctatcaccatggtgatccaaattattcaaagcttaggttatattgctttactctattgggcatggccttatattcaacacagttttatcgcctatgctttacgttgtgtgggaaaaatggcgcttaccacctatttactacagagtattattggcacgacgcttttccagcggatggggttatttaaccaatttaccttattgcagcttatgctatttgtgatggctatttgggtgataaatattatctttgccgtaacgtggttacgctatttttctcaaggaccaatcgagtggctgtggcgccactcgtcaacagggttagcaaaacgcttttaa

SEQ ID NO: 294248 - DNA, 726 bp, Proteus mirabilis
atgctaaagcgcctcatttatctctttttgaccctttttatcttagttgcggtggcattaattgtttgtgatcgctggataggtgtaaaaactagcccctatatatttgaagatatagataaactacccgccaaaaaagtaggcatggtattaggtactgctaaatattacaccacaggctatcttaaccaattttatcaatatcgtattcaaggtgctgttaatgcctataacagcggtaaagtgcaatatctgttactcagtggagataatgcacagcatagctataatgaacccaatacgatgcgtaaagatttaattaaagcaggcataccggcatcgcgtatcgttatggattttgctggatttagaactttagattcggtagtacgcacaaaagaagtgtttggaacagatggctttactattatcactcagcgtttccattgcgaacgagccgtatttattgcccttgaaaaaggcattgatgcccagtgttttgctgttgcttcgccgaagagtatgtttaaggtgcgtgtacgtgaagttttagccagagcaggtgcagttgtcgatctctatatattaaaacgcgaaccgcgttttctaggtccaccagaagcgatacctgctgtacaaaatattcctgatgatattaagggctatccggcggtttcaccacaagaggtagaagcgttgccattaaacaatggcaaaaacagttaa

SEQ ID NO: 294249 - DNA, 1698 bp, Proteus mirabilis
atggaactggaacacgaaagtaaacgtcctctctatatcccgtatgcaggcccaatcctgcttgaatttcccctgttaaataaaggtagtgcttttagcgaagaagagcgcagcacctttaaccttcatggtttactgcctgaggcagtagaaaccattgaagagcaggtggaacgcgcttaccgtcaatatcttgattttaaaaatgataacgataaacacatctatttaagaaatatccaagataccaatgaaacgctattttatcgtctgttggaatctcaccttactgaaatgatgcccatcatttatacccccacagtaggtgaagcttgtgagcacttctctgatatttaccgccgtgcgcgtggactttttatctcttaccctaaccgcgccaatattgatgatatgctacaaaacgccaccaaacaaaacgtaaaagtgattgtggtcacagatggtgagcgtatccttggtttaggtgaccaaggtatcggtggtatgggtattcctattggtaaactctctttatataccgcttgtggtggaataagccccgcttataccttacccgttgtactggatgttggcaccaataatccacaacgtttaaatgacccactttatatgggctggcgccacccacgtattaccggagatgaatataacgaatttgtcgatgaatttattcaagccgttaaacgtcgttggccaaatgtgctgctgcaatttgaagattttgcacaaaaaaatgccatgccgttattaaatcgttatcgtgatgaattatgttgctttaatgatgatattcaaggtactgccgctgtgacattaggtagtctaattgcggcaagccgtgctgcggggcgtcaattaaaagatcaaactgtcgctttcttaggtgcaggctcagccggctgtggtattgcagagcaaattattgcacaaatgaagtctgaaggactaagcgacgaacaagctcgtgcacgtatctttatggttgaccgttttggtttgttaacggataaactgccaaacttactcgatttccaaagtaagcttattcaaaaaagcgaaacgctggccgattggcaaacagaaacggatgcaatttcactgttagaagtggttaaaaatgctaagccaaccattctgattggcgtttctggtcaagcaggacttttcactgaagagattattcgtgaaatgcataagcattgtgaacgtcctaccgtgatgcctctttcgaacccaacgtctcgtgttgaagcgcgtcctgaagatattattaattggactgatggacaagctcttgttgctacaggaagtccatttgccccagtcacctataaagagaaagtgtatcctattgcacaatgcaataactcatacatcttcccaggtattggccttggcgttattgcaagtggtgcaaagcgtgttactgatgccatgttaatggttgcaagccgtgcgttagccgattgctcgcctatggcaaaagaaggcgatggcccactattacctttattagccgatattcaacaagtttcacgttatattgctaaacaagttgccaaagaagcacaggtgcaaggtgttgcaacggtcacgtctgattctgctttagaagaagcgattgaacgtaactattgggagcctgaataccgtatttacaagagaacgtcattctaa

SEQ ID NO: 294250 - DNA, 885 bp, Proteus mirabilis
atgcatactcgttttcaggcaatttggtcagatttatcccctcaattacaacaagcacttacgccttatcttgagcaggatgaatttccggcaatgttcactgcagaacaagttaatgcgttaaaaacacagttacaatgtaatgatgatgagttagccctcgcattactgcctgttgcagccgcttgtgctgtgacacctatctctcattttaatgtgggtgccattgctcgtggtgaaagcggccacttctattttggggcaaatatggagtttgctggcgccccattacaacaaacggtacacgcagagcaaagtgcggttacacatgcttggttacgcggtgagtctcgtttagttgccatcacagttaactataccccttgtggtcattgtcgtcagtttatgaacgaactaaatagcggcactcatattgcaatccatctcccaggccgaaaagtggcgaccttaggtgactacttacctgatagctttggccctaaagatctcaatatcactaccctactgatggataaagttaatcacggttatcaaatagataacactagccaactggcacaacaggcactacaagcaataaatcgtagtcatgccccttacagccattctcacagtggtattgctgtacagatgaaaagcggtaagatctttcaaggcagttatgctgaaaatgccgcattcaatcccagtatgccaccattacaagcggcacttatcgcattaaatatggcgggtgaaaatgttatggatattgagtctgcaatattaattgaaaaagcagacagcctattaactcagtgggatgccacacaagcaacattaacagctttaggttgccgccaaatacagcgtgtcactttgtaa

SEQ ID NO: 294251 - DNA, 702 bp, Proteus mirabilis
atgttaatattaatgaatatttggtggtcattaccgctaacacttattattttctacttagcacgtaaactggctgctcgatttaaatggcctattttaaatccgttattgattgctattgttgttattattcctattttattagtgacacacaccgcctatgaggattattttgccggaagtcgtatccttaacgacttgttgcaacctgctgttgttgctttagctattcctttatatcaacaattacaccaaatacgcgcacaatggaaatcgttaattagtatctgctttattggtagtatcgccgccatggctagtggtacagcgattgcattatgggctggcgctactcctgaaattgccgcctccattttgcctaaatcggtaacaacccctatcgcaatggctgttgcggattccataggtggtattcctgcaatcagtgctgcatgtgttattgcagtaggtattttaggtgccatttttggtcatacgctatttaaaatattacgtattccaactcacgcttctcgtggtttagcgatgggaacagtctctcacgcagtgggtactgcaagagcagctgaaatcgattatattgaaggggcatatagttcattagcattaatgacttgcggtattattacttcacttactgcaccctttatttttccttttattttgcacctttttagctaa

SEQ ID NO: 294252 - DNA, 468 bp, Proteus mirabilis
atgaaatctaagcgggtgcagatcacaatctggcactatatacgatcattttttatactttatctttgtctttttgccggtaatcttatttcagccttattacctttcgcggtgccaggcagtattgttggactacttattctatttggtttacttgccttccagcttattccattacgttgggtaaaacccggtggtaatattttactgaaaaatatgtcattgctctttattcctatcggggtgggtgtaatgaactattataatttattaagccaacaactctttcctattgttctggcctgtgttgtcagtacctttgcggtgatggcgctagtcgcttactgctcacattacgtgcatcgtgaacgtcctattatcggtgctaaacccgataaagtagaggatgtagaattagcagaacaacaagacgacgacagagcgttaagtgagaagaaaaaatgttaa

SEQ ID NO: 294253 - DNA, 2028 bp, Proteus mirabilis
atgtctcacgtcgcgaataaattattggtaacctgcgcgttaccttatgctaacggttcaattcatctcggtcatatccttgaacacattcaggctgatatctgggtccgttaccaacgaatgcgcggcaaagaagttcatttcatctgcgctgatgatgctcacggcacgcctattatgctgaaagctcaacaattgggtattaccccagaagccatgattgaagagatgagcaaagagcatcaacaggattttgccggttttaatatcagctacgataattatcactccacacacagtgaagaaaatcgtcaattatcgacgaaaatttatctagccctgaaaaaaaatggtcatattaaaagtaaaacgatttctcaactttatgatgaagaaaaaggcatgttcttgcctgatcgttttgttaaagggacttgccctaagtgtaaagcgcccgatcaatatggtgataactgtgaagtatgtgggtcaacttatagcccgacagaattaattaatcctcgctctgtggtatcgggttcaacgccggtaatgcgtgaaactgaacactatttctttgatctcccagcctttagcaatatgttgcaagagtggatccgctccggtgcattgcaagagcaagtagccaataagatgcaagagtggtttgacagcggtctgcaacagtgggatatcacccgtgacgccccttatttcggttttgaaatccctgatgcgccgggtaaatatttctatgtttggttagacgcccctattggttatatgggctcattcttaaacctatgtgaaaaacgtggtgatttaagctttgatgagttctggaacaaagagagcaaaactgacttataccattttatcggtaaagatatcgtttatttccacagcttattctggccggcagtgttagaaggtagtgaataccgtaaaccaaccaacctatttgtgcatggctatgtcaccgtcaatggtgcgaagatgtcaaaatctcgcggtacctttattacggcacgtgcctatcttgatcactttgatgctgattgcctacgctattactatgcggcaaaactttcatcacgtattgatgatattgacctaaacttagaagactttgtacagcgtgtaaacagcgatatcgtcaacaaggtggttaacctcgcgtcccgtactgcgggttttatcagtaaacgctttgatggcaaattagcggcaagccttgatgatgcgaagttatatcaacatttcgtcgatatgcaagaaagcatcgcacaatgttttgaaaaccgtgaatttggtaaagccattcgtgaaattatggcattagcagacgaagctaaccgctatattgatgaaaaagcgccttgggtggttgctaaacaagaaggtaaagaggctgagttgcaagctatttgtactatggggattaacttattccgtgtactgatgacttatttaaaaccaattctaccttctttaacagaacgttcagaagccttcttacaaactgaattaacttggaatgctctgtcgcaaccactgttaaaccatgaaattactaaatttaaagcattgtttaatcgtattgaaatggataaagccaatgcaatggtagaagcttcaaaaagtaccattgcgccagtcaaagaaatcacgggcccattagcagacgcgcctattcaagaaaccattaaatttgatgattttgccaaaattgatatgcgcattgctgaaattaaacaggctgatttcgttgacggctcagataagttgctaaaattaatactggacttagggggagaaacacgccaagtattctccggcattcgttctgcataccctgatccgaaagtattagaaggtcgcttaactgttatggttgcaaacctagcacctcgcaaaatgcgttttggaatttcagaaggtatggtgatggccgcaggccctggtggtgaagatattttcttacttagcccagatagtggggctaaaccgggtcaccaagtgaaataa

SEQ ID NO: 294254 - DNA, 1113 bp, Proteus mirabilis
atgagtgataaatcccccgagcagaccacccctgagattctgaaagaaaaagtttcaggtgtcttgtctacttttgaacacccgacattgaaacgtaatctgctttccctaaaagcattacatcagtgtgcgatgattgatgatgtccttcatatcgaattagtgatgccgtttgtgtggaaaaaacctttccaacaactgattgaagaaaaaacggcagagctgcgtaatatgacgggagccaaagctgttgagtggaagctaaaacacaatattgccacactacgtcgtgcaaacgatctaccaggtattaatggcgtacgtaatattctggcggtgagttcaggtaaaggcggggtgggtaaatccagtaccgcggtaaaccttgctttagcgctagcacaagaaggggctaaagtaggtattctggatgcggatatttatggtccatccattcctaatatgttaggtacaaccatggaacgcccaacttcaccagatgggcaacatatggcacctattatggcgtatggtctagcatctaactctatcggttatttagtcacagacgataatgccatggtatggcgtggtccaatggcaagtaaagcgttgatgcaaatgctgcaagatacattatggcctgatttagactaccttgtgatcgatatgccaccaggaacgggtgatattcaattgaccttatcacaaaatattccggtgactggcgccgttgttgttacaacaccacaagatattgcgctggtggatgcgatgaaaggcattgtcatgttcaaaaaagtcaatgtacccgtattaggtattattgagaatatgagtgcgcatatttgtagcaattgtggtcatcttgagcctatttttggtacgggtggtgctgagaaattagccgaaaaatatcattgccaattattgggtcaaattccactgcatatctctttacgtgaagatttagatcgcggacaaccgacggtgatgcgtgatccagaaggtgaattcgctgatatctatcgtgaaattgcttcaacagtttctgcgcaaatgtattgggatggggatgctattccaacggaaatttctttccgcgcggtataa

SEQ ID NO: 294255 - DNA, 642 bp, Proteus mirabilis
atggctgacacagcacatcagtgcacaattgtaggtatcgctggagcctctgcttcaggtaaaagtcttattgccagtacactttaccgtgaattaagagcgcaagtaggtgatcataatatcggtgtgataccagaagattgctattatcgtgaccaaagtgatttaacaatggaagagcgatataaagttaactacgaccaccccaattcgatggatcacgcacttttataccaacacttgtgtgaactaaaagccggaaacgccatcgaactccctcaatatgattatgtcgctcacacccgtaaatcagaaaccattcattttaaaccaaaaaaagttattattattgaaggtattctgttattaacagataagcgcttacgtgaagagatggatttttctatctttgtcgatacgccattagatatctgtctaatgcgtagaattaaacgtgatgtgaatgaacgtgggcgtagtctagattctgttattgaacaatataataaaactgttcgtccgatgttcttccagtttattgagccttctaaacaatatgccgatattattgtgcctagagggggaaaaaaccgtgttgcgatcgatattttgaaagcaaaaatcggacagttttgtgaataa

SEQ ID NO: 294256 - DNA, 582 bp, Proteus mirabilis
atgcgattatgcgaccgtgatattattcagtggcttgatgaaggtaaattagtcattgaaccccgcccgcctgtcgagcgaattaacggcgcaacagcggatgttcgcttgggtaaccagtttcgtgttttccaaggacatactgcggcttacattgacctcagtggccccaaaaatgaagttaatgaggcccttgagcgggtgatgagtgatgaaattgtattaccagaaggcgaagctttttatcttcatcccggagagcttgccttggcggttacattagagtctgtcacattaccggataatgtagtagggtggttagatggacgctcatctttagcgcgattgggattaatggtacacgtcacggctcaccgaattgatccgggctggcatggacacatcgtattagaattttttaattcaggtaaactgccattagcattaagaccgggtatggtgattggcgcattaagttttgaacctatgtcaggctctgcggataggccttacaatcgtcgccaagatgcgaaatataaaaatcaacaaggtgcggtaggaagtcggattagcgaagattaa

SEQ ID NO: 294257 - DNA, 1932 bp, Proteus mirabilis
atgaaaaggtttttgacaacactcgccattttgcttgtagtgattttggcaggcttaacgacattagttttgctcattaaccctaatgattttcgtggttatcttgttgaacgcgttgaaaaacaaagtggctataaattaaccttacaagatgatatgcgttggcatgtctggccaaaactcagcattattagtggtaaaatgtcattaacagctcccggtgctgagcaaccattgatcactgctgataatatgcgtcttgatgtggaattatggccattactttcccaccagttggaagtaaaggaagtgatgctaaaaggcgcagtggttagacaaacgcctgagagtaaagcaatacctaaaataaccccgccttctgttgccaatgaagacagtactcgtccgattattgagccaaaaacaaatcgttggcaattaaatattgctaaggtgaggatctccgatagtttgattatttggcaaaccaaagggggagagcaacttaatttacgcgatatcaatttattattaaaaacggacgataaaaaacaaattaaccttgagatgagcaccaaaattaatcgtgatcgtcgcgagttaatgttaaatgttgttgctaatgctgatatgagtggctacccatatcaaatcagtggcaatatcgctcaattagattatgcattatcgggaatagggcttccggctcaagggatctccggaaatttaacctcagatttcaatattaaaaatgatagtgtaaatgttattgccttaaataatttaaatatgacggcaaatgagagtcagttacaaggtagcatcacggctgaattggctaaaaagaaccgctatcaagtggaattaactggggacactttaaatttaaataccctattacctgagttagcacagcctaattcatctgaaacggcatcgttaaccttggcaaataccccgtcgagatcattctcattctttagccatgctcaggctgcaccatcacccaatgcaactattatggctcgtccggttattacctccgcgacaattgaaaacaaagcatatgacttaacccactggggtgatattgaatttagcttaaacttagcgctcaataagttattgtataaagaattagaaataaacaatgttaaattaaccgcattaaataaccccaaatcattaaatattgataggttagaagggcagatcctaaacggaaatttctcactgcctacggtgatttctactagcattgtgccagcgcatattagtatgaatgtcacaatgaataatatccctttgcaacctttactccgtgtctttgatcagccagaaaatttcagcggtttaatttctgcgcaagggcatctagaaggtgccggatataatcgcaacgcgtttcttaatagctggcagggcacactggatacctcattaagcgaatttaaaatgctaggattaaatattccacaagtgatccagcaatctattgcacaaacaaccgatcaagtggtttaccctgaagatattgagaactataccaaagcagatagtgtgattgcccagtttaaactagcacctaaaggccgagtgacgttaaatcagttagatgctcaagcaagtgcttatcagatcagcgggcaaggtcaattagatctacaacgtcataatctagatgtgatgctgatggttaatatcaaaaaaggttggggtaaagagaatgaatttattcgccaactagccaaaatagatattccattaagattgtatggtaattggaatgctatccaatatgagtttaacgttgaaaaattactacgtgatcaattacagcaaaaagcaaaacaggccatagataattggttaaataagcaagatgatagccccgaagttaaagcgcttaatcaattattgaaaaaaatataa

SEQ ID NO: 294258 - DNA, 1362 bp, Proteus mirabilis
atgattgaaattcttatcggcgccctcgtcgctgtgggtgttgggcgttacattgttaagggatattcgccaacaggtgtgctacttactggtgggctattattgcttatcatcagtgtgattatgggcaaatcagtattaccagccagtgtcacaagtaccggttatcgcttaatcgatattgttgagtatgtaaaaaatctacttatgagccgtggtggtgatctggggatgatgatcatggtgctatgtgggtttgcttcttatatgactcatattggtgccaatgacgtggtcgtgaaacttgcctcacgcccattaaaaatgatcaactcaccttatcttttaatggtagcggcttatattgttgcatgtttaatgtcattagctgtttcatccgcaacaggtcttggtgtgttattgatggcgaccttattcccagtgatggtcaatatgggaattagtcgtggtgcggcggcagctatctgtgcttcacctgcatcaattattttagcgccaacctctggtgacgtgattttagcggcacaagcttctgaaatgccacttattgattttgcgtttaaaacaacactgcctatctctattgccgcaattcttgggatgtgtattgctcactttttctggcaacgttatcttgatcgtaaagagcatatcgaaacagagatgttagatgtgaacgaaatcaaaactcacgcccctaatttctatgcgattttacctttcacacctattattggtgtattagtttttgatggtaaatggttaccagagcttcatattgttgccattattattctttgcatgatgttatctgcggttattgaatttatccgtagctttagtgctaaagaagtttttgccggtttagaagttgcttaccgtggtatggctgatgcatttgcccaagtggtaatgttattagttgccgcaggggtttttgcgcaaggtttaacaacggttggctttattcacgcgttaattgatggtgcacaatcattaggatcaggggcaattgttatgatgattgcattagtcttaattaccatgctcgcggcaatgacaaccggctcagggaatgcgcctttctatgctttcgttgaattaattccgcgcttagcaagtaatatgggtgtgaatcctgcttacttaactattccgatgttacaagcatcaaacttaggacggactttatcacctgtatcgggtgtggtggttgctgtatcaggaatggcaaaaatttcaccttttgaagtgatgaaacgcgtttctgtaccagtattggtcgggcttgtgattgtgattgttgcaacggaaatactggtacccagcacattaggttga

SEQ ID NO: 294259 - DNA, 1581 bp, Proteus mirabilis
atggaatggatcgtagatccgacgatatgggtaggtctttccacccttattgttctcgaaatcgtacttggtattgataaccttgtttttattgctattctagcagataaactcccagcaaaattaagagataaagcacgtatcacaggattattgtgtgctcttattatgcggattgtactgctatttagtctctcttggcttatcaccctaaccaaacctcttatcacactgtttgatcatcctttcagtgccagagacttaatcatgctcctcggagggatattcttacttttcaaagccacaatggagcttaatgaacggctagaaggtaaagatcataacgagggaaaacaacgtaaaaccacgagtttttggtctgttgttgcacaaattattgtactagatgctgtattctctctagactctgttatcactgcggtagggatggttgaccatctcggcgttatgattgctgctgtaactattgcgatgttcttgatgatcctcgcaagtaagccattaaccacatttgtcaataatcacccaactattgttattttatgtttaagcttcttattgatgattggttttgccttagttgcagaagggtttggctatccaatacctaaaggctatttatacgctgccattggtttctctattatgatagagatatttaaccaactcgcacagtttaaccgtcgacgcttcttatcagcttctcgctctttgcgtgaacgtacagcggaagcggtattgcgcattattaatggtaaaccagaagcctctgaacttgaccctcacacttctgatttagttgctaatacagaagaggtgtttgatcctcaagagcgccaaatgattgtgcgcgttctgggtttaagccagcgaaacgtcaatagtattatgacttcacgccatgatgttgaatatgttgatctaaaagccacccaagatgatattcgccaattactagaagaagatccccattctcgtctcgttattaccgacgaagaaaatagcgacgaacctatcggcgtggtaaatgttattcaattattaaatcaacagttacgtaatgaaccattagatttgcgtttattaattacacaacccttaatcttccctgaggggttatcactattacaggcattagaacaattccgtaatgctcatactcactttgcctttgtggttgatgagtttggctctgtcgaaggcattgttaccttaaccgatgtaatggaaaccatcgccggtaatttaccagtaagtacagaggaaaatgactctcgtcacgacttagtacaaaatgaagatggctcatggactgtcaatggttttacaccgctggaagacttagtgctttatattcctattaagttggatgaaaaacgtgagtatgaaaccttggctggcttattgatggaacacttacaacgcgttcctgccgtcggtgaaaaagtggttattgatggtattgaatttgaaccattagatgtacacaatcaccgtattaataaagtacgtattgttgaaccaacacctgaagacgaagaaaacgtcgacgaagcttaa

SEQ ID NO: 294260 - DNA, 1407 bp, Proteus mirabilis
atgtcaaaacagcaaatcggcgtggttggtatggcagtgatgggacgtaaccttgcgctaaacattgaaagccgtggttacactgtatctatctacaaccgctcgagcgataaaaccaatgaagtgatcgctgaaaatccaggtaaaaaactggttccgaattactctattgaggaatttgttgattcattagaaaaaccgcgtcgtattttgttaatggttaaagcgggtgaagcaacagataaaaccatcgcagcgctgacaccacatttagataagggcgatatccttattgatggcggaaatactttctttaaagatactattcgtcgtaatcgtgagctatcggctcaaggttttaactttattggtacgggtgtttctggtggtgaagaaggggcattaaaaggaccttctattatgcctggtggtcaaaaagaagcctatgagttagttgctcctattcttgagaaaattgccgcggtggcagatggcgagccttgtgtcacttatattggtgcagatggtgcaggtcactatgtgaaaatggtacacaatggtattgaatatggtgatatgcaactgatagcagaagcttattcagtattaaaacactcactaggtttaactaacgaagagttagctgacacttttaccgagtggaataaaggcgaattaagtagctaccttattgaaattactgctgatattttccgtaagaaagatgaagaaggtaactaccttgttgatgttattcttgatgaagcggcaaataaaggcaccggtaaatggactagccaaagctctttagacttaggtgttcctgttacgttgattacagaatctgtttttgcacgttatatttcttcactgaaagatcaacgtgtggcggcatctaaagtattatcaggcccagcaccaaaagcatttactggtgataaaaaagcctttatcgagaatgttcgtcgtgcactatatttaggtaaaattgtctcttatgcgcaaggcttccaacaattgaaagctgcatcagatgaatataactgggatctaaattacggtgaaattgcgaaaattttccgtgcaggttgtatcattcgtgctcaattcttacaaaaaatcactgatgcctataatgacgatgcgaatatcgctaatttattattagcaccttactttaaaaatatcgctgatgagtatcaacaagcattgcgtgatgttgtttgttatggtgttcaagcaggtattcctacgccaacattctctgcggctatctcttattacgatagctaccgtgcgcaagtgttaccagcaaacttaattcaagcacaacgtgactattttggtgcgcatacttataaacgtactgataaagaaggcgtattccatactgagtggatggagtaa

SEQ ID NO: 294261 - DNA, 507 bp, Proteus mirabilis
atgtctttgactattttcgagcaattaaccacattactcaataaccaccacgcccgttatcgcgtcatggaacacccgaccgcgggtcgttctgaggaagttgctaaaataagaggtacacaattagggcaaggggcaaaaggtctagtttgtcatgtaaaaggcaatggtattaaacaacatgtactggccattttacctgctgataaacaagctgatctatcaaaactcgctatcgctattggtgggacaagagcctctcttgcaagcccgaaagaagttgatgaactaacgcaatgtgtatttggcgcgatcccaccttttagttttcatccagcactaaaactggttgctgatccgctattatttgaacgttttgatgaattagcctttaatgctggaacattagaacgctcgattattttaaatacacaagattatcagcgtattgctcagcctgagttaattcattttattcgccaagatgctcaagagcataatgattaa

SEQ ID NO: 294262 - DNA, 1152 bp, Proteus mirabilis
atggccagttcaacattttatatcccttcagtaaacaaattaggcgcaggttgtcttgcagacgcgataaactcaatgaaagactttggctttcataaagcactgattgttactgatagtgttttaaatcaattaggtgttgtaaataaagtgagtgaattactggcaaaatcaggtattgctagcgttacttatgatggtacagcgccaaaccctaccgttgaaaatgttgaagcggggttagccttattaaaagagcatcaatgtgactgtgttatctctttaggtggtggctctcctcatgactgtgctaaaggtatcgcactagtcgctgccaatggtggtaagattgccgattatgaaggggttgatcgctctgagcatccgcaattaccactgattgcaattaatacaaccgctggtactgcttctgaaatgacacgtttttgtatcatcacggatactgcgcgtcatattaaaatggctattgttgataaaaatgtaacaccaatcttatctgtaaatgattcagagttaatgattggcatgccaaaaggtttaaccgcagcgacgggtatggatgcgttaacccatgctgttgaagcttatgtctctactgccgctaatcctattactgatgcatgtgcgttaaaagcagtgacgatgatcagtgagtctttacgtaaagtcgttgaaaacggtggtgatacagtagcacgtgaaaatatggcttatgcacaatttttagcgggtatggcatttaataatgcttctttaggttatgtgcatgctatggctcaccaattaggtggtttttataacttacctcatggtgtatgtaatgcagtattactgcctcatgttcaagcttataatatccaagcagcagcaggtcgtttaaaagatatagcgcaagctatgggtgttgatgtttcggcaatgaatgatgagcagggtgcgcaagcttgtattgaagagatccgcaaaatcgccaaagatgtcggtattccagcaggcctgaaagaattaggcgtgaaagaagaagattttaaaacattagctgaaaatgcattaaaagatgcatgtgccatcactaaccctgttcaaggtagtgaaagtgatgttatcgagatattccgccaagcaatgtaa

SEQ ID NO: 294263 - DNA, 618 bp, Proteus mirabilis
atgaataatacaaaactcgcccaattagattggcaaaaagtcgataacctaatgcctgtcattatccaaaatgctatttctggtgatgtcttaatgcttggttatatggataaagctgcattagaaatgacactaaacagtggcaaggtcactttctattcacgaactaaacaacgtttatggacaaaaggtgaaacatcaggcaatttccttaaattggtggatatttatcctgattgtgataacgatactttacttattttagctcacccaatcgggcctacttgtcataatgggactgaaagttgttttgctccggctcaaagccaatggggatttctttatgagcttgagaacttactgcgcgagcgtaaaagcgcttcaccagatagctcttataccgcacaactttatgccagtggaaccaaacgtatcgcacaaaaagtcggagaggaaggtgttgagactgctttagctgcaactgttaatgatcgtgaagagttaaaaaatgaagcttctgatttgctctatcatttaatggtgctattacaagaccaatcgctatctctatctgatgtgattgattgcttacaaaagcgtcataaaaaagcgcaataa

SEQ ID NO: 294264 - DNA, 774 bp, Proteus mirabilis
atgttggcaaaacgcataattccttgtcttgatgttcgtgatggacaggttgttaaaggtgtgcaatttcgtaaccatgaaattattggtgatattgttcccttagcagaacgctacgcgaaagaaggtgccgacgagctggtcttttatgatattaccgcctcttctgatggccgagtggtcgataaaagttgggtatcgcgggtagccgaagtgattgatattccattttgtgttgcgggtggcattcgctcagtagaagatgccgggaaaattctctcttttggggcagataaaatctcaattaattcccctgcactttctgatccaacactgatttctcgccttgccgatcgctacggtgtgcagtgtgtagttgtgggaattgatacatggtttgatgaaaaaactggggaatatctcgtttatcaatttacgggtgatgaaaaacgcacacaacaaacgccatggaaaacgctcgattgggtacaagaagtacagcaacgaggtgcgggggaaatagtgttaaacatgatgaaccaagatggtgtaagacaaggctatgatttaaaacaactcgcactggtacgccaagtcactcaggttcccatgatagcttctggcggtgcaggtgaaatgtcacactttctggatgcatttaaattagccaatgttgacggtgcccttgccgcttccgtattccataagcagatcattaatatcaacgaattgaaacagtatctcgcagaaaatggcgttaaggtaagaatataa

SEQ ID NO: 294265 - DNA, 738 bp, Proteus mirabilis
atgattattccggcattagatttaattgatggcaaagtcgttcgtcttcatcaaggtgattataataaacaacgtgattatgatgatgatccgatccgtcgctatcaacagtatcaacaagacggagcaaaattattgcatctcgtcgacctaactggtgcgaaagatccacttgcacggcagatcccactattaaaacagctagttgcctgtgttaacgttcctgtgcaagttggtggtggtattcgtagcgaagaagatgtgaagtcgctattagccgcaggagcaagtcgagtggtgattggctctacagcggtgagccagcccgaattagtcaaaacatggtttgagcgttatggtgccgatgcgattgtactcgcccttgatgttcgtatcgacgaacaaggtaaaaaatgggtggcggtaagtggctggcaagaaaactccccctatacactagaagagatcatcgcactttatcaacctgtaggattaaagcatgtattgtgcaccgatatttctcgtgatggcaccttagccggttctaacgtcgaactgtataaagaaattagccagcgtttccctgatattttattccaagcttcaggcggtattggtgatttacaagatatcgcagcacttcctggctcgggtgttgcgggcattattgttggcagagcactattagaaggcaaatttacattacaagaggcgatatcatgttggcaaaacgcataa

SEQ ID NO: 294266 - DNA, 591 bp, Proteus mirabilis
atgaaagtcgtcattcttgatacaggttgtgctaatttagcctcggttgcatacgccgtacaaaggctaggttacgatccgattatttcttatgaaaaaaatatcgtgttatctgctgataaactgtttctacccggggtgggaacagctagtgccgctatggaacaactaaaagcccgtgaacttatccctttaattaaagcgttaacccaacccgtattaggcatttgcttaggaatgcaaattttggcctctctgagtgaagaaggtcacaatatccctctattaggattagttgacggtaatatcaataaacttgataccaaaggattacccttaccgcatatgggttgggatcaggtattagcaaaacccgctcaccctctatttcgcaatattgacagcgacgcttggttctattttgttcacagttatggtttagggctcaatgactcaaccatagccgaaacagaatatggttcacgctttagcagtgccattcagaaagataatttctatggggtgcaatttcaccctgaacgctcaggaaaagcgggtgctcaactgattaagaattttttggagatgtaa

SEQ ID NO: 294267 - DNA, 1068 bp, Proteus mirabilis
atgagccagaaaattctttttatcgatcgtgatggtactttgatcacagagccaccaaccgatcaccaagttgatagtctcaataagcttgcctttgaaaatggcgttattcccgcattactcaacttacaacaggcgggctataagcttattatgatcaccaatcaagatgggcttggtacagacagttttccacaagcggactttgaaccccctcataatctcatgatgcagattttttcttcacaaggtattgtttttgatgaagtattaatctgccctcataaacctgaagacaactgtccttgtcgtaaacctgaaacagggttagtcacccaatatctggttgaaagtgctcttgataaaaccaatagctatgtgattggtgatagacaaaccgatctacaattagctgaaaatatggggatcaacggattacgttataacgccaatgaattaagctggtcagctatcagtgaattgctgacgaaaaaagatcgctactcccacgttgaacgtaaaaccaaagagacacaaattgccattgatatctggcttgatcgtgaaggcgagagccaaattagcactggagttggtttttttgatcatatgctagatcaaattgccacccacggtggctttcgtatgaatatcaatgtacaaggggatttagtcattgacgatcaccacaccgttgaagatacaggtcttgcactcggcgaagcactgcgagaagcattaggtaataaacgcggcattgcacgttttggttttactttgcctatggatgagtgcctagcaagttgtgcgctagatatttctggacgccctcaccttgaatataaagcagaatttaaatatcagcgcgttggtgatttaagcacagagatgattgagcactttttccgctctctctcttacactatgggctgcactctacacttaaaatcaaaaggcaaaaacgatcaccacaaagcagaaagtctgtttaaagtatttggtcgtaccttacgccaagctattcgtgttgaaggaaataccttacccagttcaaaaggtgtgctgtga

SEQ ID NO: 294268 - DNA, 1083 bp, Proteus mirabilis
atgaacacgccctttgatattaccctattagccagaaaaaatgttcgccagttaaccccttatcaatcagcgagacgtttaggtggaaatggctcggtttggttaaatgccaatgaataccctaccgctcctgactttacgtttaatgaaaaaaatttaaaccgctaccctgagtgtcagccagttaacgtgattaatcgctatgcagcatatgcaggcgtccaacctgagcaagtgttagttagtcgaggtgccgatgaagcgatagaactactgatccgtgctttttgtgagcccggtaaagatgctgttctctattgtccacccacttatggtatgtacagcgtcagtgcggaaacctttggtgtagaacagcgtgttgtccctgctcttgctgattgggagcctgatgtcaaagccattgcatcacaacttgataatgtaaaacttatctacctatgtagtcccaataacccaacaggcaatatcgttgagccttcactgatccgcgaagtattagcattagcaaaagataaagccattgtggctattgacgaagcttatattgagttttgtcctcaagcatcactagtcacttggttaaaagagtatccgaatttagtcattttgcgaactctctctaaagcttttgcattagcgggactgcgttgtggctttgcacttgccaattcacctgttattgaattattacttaaggtgatcgccccttacccactttctaccccggttgctgatattgcggcacaagcattaactgaccaaggtatagaagcgatgaaacaacgggtaacggaaattgtacgcaatagaacatatttagcggatgcactaaaaaatttacccaatgttgaacaggtttattgtagtgaaaccaactatattttagtgaaattcactgatgctgattgtgttttccgcagtttatgggatcaagggattattttacgcgatcaacagcgtcaatatgggctggcaggctgtttacgcatctctatcggtacgcgtcaagagtgtgatagcgtgataaccgctataaaaaatagacaaacggcaaacgtataa

SEQ ID NO: 294269 - DNA, 1317 bp, Proteus mirabilis
atgatgaaaacggcgtttaatacattaaatttctgggataaatgcacccaacagcaacaacaacagctactcactcgcccagcgatatccgcatcagcgtctattacagagcaagttgctacgattatttctcaggtacgcaacgatggggataaagcccttaaggcactgagtcaaaaatatgataaagcggctcccgatagcgtattggtgacaaaaacacagattgacgcggcttgtgcaaggctcaataacgaaatcaaacaagcaatagcgcaagccatgagcaatatacgccgttttcatgaagcgcaaattcctaaaaccattgaggtagaaacgcaacctggtgtattttgccaacaagtcagtcgccctattgatgcagtaggactttatattcccggaggatcagcgcctttactctcaactgtgatgatgttggggctaccggcccgtattgccggttgtcgcaaaataattttatgctctccgccaccgattgctgatgaaattttgtatattgcgcaacaaattggtattgatgaaatattccaagtcggtggtgctcaagccattgctgcgatggcttttggtacagagtctatcccaaaggtagataaaattttcggcccgggaaatgcctatgtgacagaagcaaaacgccaagtcagccaatcgctacaaggtgcagctattgatatgccagctggcccttcggaagtattagtgattgctgatgccgatgctgatcctgcctttattgccgctgatttactatcacaagcagagcacggccctgactcacaagtggtgctattaaccccagacgaagcccttgccaaagcggtcattagcgagacgcaaacccaattaacacaattaactcgcgcagaaatagcacaacaagccttagccgaaagtcgtgtcattatcacccgtgatctcaaccaatgtattgaaatcagtaatcgctatgggcctgaacacttaattattcagactaatgatgcagactcacttgttgatagcattactagcgccggctcagtgttcttaggggcttggtctcctgaatcagcgggagattacgcttctggcaccaatcacgtactacctacatacggttataccgccacctattcgagtttaggcttagccgattttatgaaacgtatgaccgtacaaaaactgactgctcaaggtttggctgatttagccaataccattgaaatattagcgcaagcagagcaattaactgcacataaaaatgccgtcacacttcgcgttaacgccttggctcaaggagataactag

SEQ ID NO: 294270 - DNA, 900 bp, Proteus mirabilis
atgttagataaagcaagattacgaattgccatgcaaaaatcaggtcgtttaagtgatgattcacgagcacttttagcgcgttgtggcattaaaataaacttaaaccaacaacgccttatcgcttatgcggaaaatatgcctatcgatattttacgtgtcagagatgatgatatccccggtttagtgatggacggagtggttgatttaggcattattggtgaaaacgtattagaagaagaattactaaaacgccgagcacaaggagaaaatccaagttatatcacactacgtcgtcttgattttggtgcttgccgtttatctcttgctgcaccggttgattttgattatcaaggggttgagtgcctcaataatacccgtattgccacctcttaccctaatctattaaaacgttatttagaccaaaaagggatcacctttaaatcttgcttattaaatggctccgttgaagtcgcacctcgagccggtctggctgattctatttgtgatttagtttctactggcgccacattagaagccaatggattaaaagaagtagaagttatttatcgttctaaagcttgtttaattcaacgtgacggtgaaatggacgcaacaaaacaagcccttatcgatcgcttaatgacgcgtattcaaggtgttattcaagcgcgcgagtcaaaatacattatgttacacgcgccaagtgattgccttgaagatgttatcgccctattaccgggtgctgagcgcccgaccatccttcctttagcgggtgatcaaaatcgagtagcaatgcacatggtcagcagtgaaaccctcttttgggaaacgatggaaaaactaaaagcattaggggcaagttcaattcttgttttaccaatagaaaaaatgatggaataa

SEQ ID NO: 294271 - DNA, 822 bp, Proteus mirabilis
atgaaacggatcacgatagtcggattaggttggttaggattaccacttgccaatgccttgcgtgaagcggggtatcaagtaaaaggaacaaaaaccacagaagatggtgtagaagcagcacgaatgagtggtgttgattgttgtctaatgaatttaacaccggctattgagtgtgatagagatgattttgattacttaatggaaactgacgtactgattattacattacctcccagtgcggcggggggaggatatgattatgttgaagggatacaaacattagtggatagcgccatgtctcggcatgtgacaagagtgatttatattagctctacttcagtatatggcaatcaaagtggtgttattacagaagaagttgatattaggccagaaacgcaatccgctaagatgatagcggaagttgaaaattggttacatcgcttaccacttacgaccgtcgatattttacgtttggcggggttagttgggccaggtcgtcatgcaggacgctttttatccggtaaaaaacaggtcaaaggtgcacatcagagtgtcaatttagtgcatttagacgatgttatttttgcgatagagcaactgcttgctcaaaatgaaggaggccgtttatataatttatgcgcgcctattcatcctaaaaagaaagatttttacagccgtgttgctgcacagttagatcttactccccctgaatttgctcttgaagataaaccgccagcacgagagatcgacggtcaggagatttgccgagatctcggatttcattatcactatcctgatcccgacaaaatgccaatgagttaa

SEQ ID NO: 294272 - DNA, 621 bp, Proteus mirabilis
atgttaaaagtctggggtagaaaaaactcatcgaacgttaaaaaagtcctgtggtgtttaaaagagcttcaagctccttacgaacaaattgatgtcggaggcccttttggtggacttcatgaggccaactatttagcactcaatcccaatgcatctattcctaccttacaagatgatgattttgccttatgggagtcaaataccataattcgttatttatgtaccaaatatgaaaattatcatctctacccaaccgatgtaaagcaacgcgcaaacgttgaaaaatggatggattggtcgaatggtagccttttttctccaatccaacaaatgatgataaatcttgttcgcacaccaaaagagcagcaagatccacagcttgtacagagcctaaaagcgaaattaaaccaactgatcaaaattgccgatgatcaactggctaaaacagcttattttgccggggactatttttcattagctgatatcgctattgctcctttggtatacccatggctagaggtttgccaagaaggtgcaaattatccacatctacaacgctggtttgcacaattaagtgaaaatcagatcttccgtgatgtcgttttactgccggtaaattaa

SEQ ID NO: 294273 - DNA, 1203 bp, Proteus mirabilis
atgaaaacaaatcttccatccgtattggctaaggttaccgcgggaatgggtttactgctaattatttctagtcctacttttgcggtgaataatcctgtgccgcctcaaattgaggctaaatcttacgtattaatggattataacagtggaaaaatacttgcttcagagaagcctgaagagcgcctagatcctgccagtctaaccaaaataatgagtagttatgtggtaggacaagcgataaaagagggacgtatgtcgcccgatgatattgttattgttgggcgcaatgcttgggcgacgggtaatcctgttttaaagggctcatccttgatgtttttaaaaccaggcgatcgagttaaagtgatcgacttaaatcgaggtatggtgatccaatctggtaatgatgccagtattgcgttggcagagcatgttgccggtagccaagaaacctttgttgatcttatgaatacctatgccgcgaatttaggtttaaaaaacactcactttaaaacagtacacggtctagattctgaagggcagtacaccacagcacaagatatggcgttattaacggctgctatgatccgcgatgtaccttcagaatatgatattcataaagaaaaagaatttaccttcaacaatattcgccagccaaatcgtaaccgtctattgtggaataaaaatatgaatgtcgacggtgtaaaaaccgggcataccaatggggctggctataaccttgtctcttcggcaaccgaaggaaatatgcgtctgattgcagtggttttaggggcaccatcagataaagtgcgttttgctgaaagtgaaagattactcggctggggtttccgcttttttgaaaccgtgacacctgtaaaagagaacgtgcccctgactacgcaaaaagtatggtatggcgataaaggtgaagtggctttaggagttgctaaagatgcatcaatcaccattcctaaaggagagctaaagaacttaaaagcctcttttacattgactaaccccgaattagaagcaccattaacacaaaatcaaatcgtaggaacagtgaatttcttactaaacgatgaagtgattgagcagcgtccattagtggtaaaagaagcggttgaagaagggggtttctttagtcgtatctgggactttgtggttaaaacagtctctggttggtttaatgcgctttttggttaa

SEQ ID NO: 294274 - DNA, 1671 bp, Proteus mirabilis
atgaaatcagatattgaaatttcccatcaagcaccgcttttacccatccaagatattgctaaaaaaataaatgtagaccaagacgatattgaattttatggcaaatacaaagccaagtttagccagagtatttggtcaaaaatcacctcaaaaaaacagggtaaattggtgcttgtcacttccattaatcccacaccagcaggtgaaggtaaaaccaccgttacggtaggattaggacaagcccttaatcaattaggcaaaagtgccattattgcattacgcgaaccctccttaggcccttgttttggtctaaaaggaggagcggctggcggtggatattcacaagttgtaccgatggaagatctcaatcttcattttaccggtgattttcatgctatcacctctgcaaataatttattagcagcgatgttagataactcgctttatcaaggtaatccccttaacattaatcctaaaaagattatttttaagcgctgtatggatatgaatgatcgcgcactacgtcatttagtgattggattaggtggcgacaaagatggggtggttagagaagatagctttgttatcaccgttgctagcgaaattatgtctatcctttgtttagcaaaagatattaatgatttaaaacagcgcttagcacgtatcatcgttgcatataactatgaaggcgagcctgttagtgctgaagatctcaacgctgtcggcgctatggcaaccttacttaaagatgcccttaatcctaatttagtacaaacgttagaaaatacccccgcgattattcatggtggcccttttgccaacattgcccatggctgtaatagcctaagagcgactaaacttgctcttcaactggctgatatcactgtaacagaagcgggatttggtgctgatctaggtgcggaaaaattctttgatatcaaatgtcgcataggcgacttacaaccagactgtgcagttttagtcgttaccactaaggcattaaaatataatggtggcttaggcaaaacacagtgggatcacgaaaatctcaccgctttagcaacggggatcgaaaatctaggtaagcatattgaaaatctgaaaaaatatggtgttccggttattgttacagtaaatgcttatgtgacagactctgctaaagagcatgaatttatcgcccaatattgccagcaaagaggatgtcgttttgccattagtcaagtatgggagaaaggtggcgcgggtggtattgaattagccaatcaggttattgatacactagaaaatgatgcaccacagtttcaattactctaccctgataatatgcctttaaagcaaaagatagagaccattgctcaagaaatttatggtgcaaaaggagtgacttacaatgctaacgcccaagagatgctaacaaaaatcgaggatatgggctttggccatttccctatttgtatggcaaaaacgcaatattctctatcagatgatcccgcattacttggtcgcccgactgattttaccattaatatccgggaagtgtatgtcagtgctggtgcaggctttgttgttgcattaacgggcacaataaatacgatgccaggattacctaaaaaaccggcagcaatggcgatggacgttgatgatcatggggcaataaaaggactgttctaa

SEQ ID NO: 294275 - DNA, 1365 bp, Proteus mirabilis
atggttagcgtttttgatatttttaaaatcggtattggaccttcaagctcacacacggtaggcccaatgaaagcaggtaaagaatttgtcgatttacttgctgagaaaaaccttctctcctctgtttcccgcgtagtcgttgatgtgtatggctctttatctctaacaggtaaaggtcacgcaacagatatcgcgattattatgggattagccggtaatttacctgatacggttgatattgacgctatcgcaccttttattaaacaagtcgaaaataccggacgtttgatgttagctaatggtgctcaagaggttgatttccccgcggttggaggcatgaattttcataaaagtaatttacctcttcatgaaaatggtatgactatcagcgcctataatggcgaacaacttctgttgaaaaaaacctattactccattggtggcggctttattgttgatgaagagcattttggtcagcccgaagagaataaagttgaagtaccttatccttatcaatatgctgctgatttgcgacgtcactgtaaggaaaccggcctctctctttctgcactggtgatgcaaaatgaacttgcattacgcagtaaagaagagatctcagcccattttgctgccgtttgggaggtaatgaaatcaggtatcgagcgcggtgttaataccgaaggcttattaccgggaccattacgtgttcctcgtcgcgcatctgcgttacgtcgtatgttagtgactgaagataaaaccaccaccgatcctatgacagtggttgattggatcaatatgtttgcattagccgtaaacgaagagaatgcagccggtggacgtgttgtaacagcacccactaatggcgcatgcggtattattcctgccgtactctcctattacgataaatttattcgcccagtcaacgaaaactcctatacacgctttttcttagtagccggtgttattgggtcgctgtacaaaatgaatgcctctatttccggtgctgaagtgggttgtcaaggtgaagtcggtgtagcctgctcaatggctgcaggggctttaactgaactgctagggggtagtcctgagcaagtctgtattgcggctgaaatcgcgatggagcataacttaggtcttacttgtgatccggttgcaggacaagtacaggtgccttgtatcgagcgtaatgctattgctgccgtacaagcggtaaactcagcacggatggcgcttcgtcgtgtcagtgatccacgtatctgtttagataaagtcatcgagactatgtatgaaacaggtaaagatattaattctaaatatcgtgaaacatcacaaggtggcttagccattaaagtctcttgcgattaa

SEQ ID NO: 294276 - DNA, 1329 bp, Proteus mirabilis
atggatacaaccaaagctggttctatcgcacagggtaatacccaaagtgattacaaaacatggcgtaagtcagacacagtatggatgctcggtttgtatggtacagctatcggtgctggcgttctgtttttacctatcaatgccgggattggtggcttaattcctctgttgattatgttagtacttgcttttcctatgaccttttttgcacaccgtggtatgtgtcgctttgtgctatcaggtaaaaatccaggtgaagatattactgaagtggttgaagaacactttggtaaaacagcaggtgtattaatcactctgctctatttctttgctatttatcctatcttgttggtttacagtgtcgctatcactaatacggtagaaagctttattgttcaccaaatgcatatgacagcaccacctcgtgcgattttatcactggtactgattgtcggtattatgtgtatcattcgctttggtgaacaagctattgttaaagcaatgagtgtcttagtattcccattcgttgccatcttgatggtacttgctttatacctcattcctgaatggaatggtgccattcttgatacgctctcttttgatcacgcatcaacttctggtatgagccaaggcttgttagtaaccttatggttagctatccctgtgatggtgttctcttttaaccactcaccaatcatctctgcttttgctgtggcaaaacgcgaagagtacggtgataatgcagagaaaaaatgttcacgcatcttagcttatgctcatattatgatggtgatcactgttatgttcttcgtgtttagctgcgtatttagcttaacaccagaaaatttagctgaagcaaaagagcaaaacatcagtattctgtcttatcttgctaaccactttgaagcacccgttatcgcttacattgcacctttcattgcctttgttgcgattactaaatctttcttaggtcactatttaggggctcgtgaaggtttcaatggcttaattatcaaagggatgcgcggaattggtaagaatgtcgaaaaagatcgtttaaacaaaatcacagctctgtttatgttggttacaacgtggatcgttgcaacattaaacccaagtatccttggtatgattgaaacattgggtggcccaatcatcgcaatgttactgttcttaatgcctatgtatgctatccgtaaagtaccagcgatgaaaaaatatcaaggccatattagcaacgtatttgttgttatcatgggtctgattgcaatctcagcggttttctacaccttaggtaatactttcattaattatttctttaactaa

SEQ ID NO: 294277 - DNA, 579 bp, Proteus mirabilis
atgcagttttggcgttaccgcgagggcaaagcggagaatgaccctaattataccgaatgtccttttcgctttgcggggcaatatgaagatgaagaaagtggcttgtattataatcgctttcgctattatgatagggaaacagggcagtatctttccccagaccccatagggctattgggtgggctgaatccctatgggtatgtgcattgtccgacggggtgggttgatccgtttgggttggcgggtgattgttgtgatgagttactagttcttgctactaaccctagaagtaaaacagttcaagagatggctgaagatttagctaatcgaattaatagaaatacagtgacattttccacaccaacaagcatgggacatattgatttaagaggaagatctcactttgataaagtgacacaagctgatattccaacaccacatgttcaagtttcaccaattaacgttgctcctaatggaaatcgcttccctcttaaaaaactagaagcggcaaggccagccacaaaacaagatattagaacagcggaaaaactagcagaaagacaagggcttttaaaatga

SEQ ID NO: 294278 - DNA, 288 bp, Proteus mirabilis
atgaatgatgaactaatttttcaattacaaaattggtataaatctaaatgtaatggtctttgggagcatgaatacggattagatatcagtacgttggataatccaggatggaaagtgcatattaatggtgaaaataagaaaaaaaaatcaaatattattattaataataatgatgatgattggttaaatataataacaagtgatatagagtttaaaggttatggaagcccacagaatttaaatactattttaaatcatgccattaaatggctaaatgatcctcaataa

SEQ ID NO: 294279 - DNA, 369 bp, Proteus mirabilis
atgaaatattatgcagaagtagtttcattaaatccaaatgttgaagaagaagtaacgatttcacttggtgacattacacttacgtgttttatttgtaacctaaataatccaataaagttaaatgaaatttatttagttgagcttgaactcgaaattttcgatgaagtaagagctaagttggccactgatatattaccaaaacaaataggtgattcttttgcatacgaattaaatggttatttgctagaaaataaaattattatatctaatataattcttcaagatgatttgttatatgaaatttcattttatgaaaataaatatgtttgtatttatatagatagaattaatatttcatttttcaattaa

SEQ ID NO: 294280 - DNA, 318 bp, Proteus mirabilis
ttggttgatgctaaaggtcaagttttagatttagagtattttagaaatctaaaatttgatgggcagataattaatgctgtaagaagtggtaataagttacctgcaataggagagcctggtacttactctaaaacaacaggcggacatgtaattgtttacggatctgatggtagacgaatggctgatatatctaaggagcgaattaaaattgtcgagtggaataaggatccaagaggacagtatcattatagaactggaagtgatacgaaatttgcagatagagaaatacccgatgaaattaaaaagttattggagtga

SEQ ID NO: 294281 - DNA, 468 bp, Proteus mirabilis
atgaaaaattatccaagtatagtatctaatgatcttatagcgatatttccaactccttttccgttgaactatagcttacctaattttgtttcgaattgtgtggaattagaagcagttttagcctgtgcgggattattttgtcctgagattattgaaattgatggtgctatttatcgatgtgagaataatgatggaaaaatgacaccatatgaggggtacggtaaagataaaaaaaccttggaaaaggttaataacgttttttcattcaatgatttctttctatctacaactgaagatgctgcttgttctagtgaagtattaatgactgaattcagtgaggttctaaagtatttttggggtattagattaaaaagcctttacccaaataaaacatttgaatttattatcacagacgatggtctatatggtgaagaagggttttgcatgaccttttatgaagtcgaataa

SEQ ID NO: 294282 - DNA, 195 bp, Proteus mirabilis
atgttggtcacttcaggcatttccggtataggtaaacctttacgttttgctaaacgcccttctaaagaatctggacctactatttttgcctattcatcatttgtttttatcaacgattctttaggcacactaaattcaacatatactgctcccagcttagcttgtttaccaaaagcatcaatattagctgggtaa

SEQ ID NO: 294283 - DNA, 246 bp, Proteus mirabilis
atgcaaaaaataaatttgtggattacatctaattatgactaccctgtaattgtaaatacagagagtttagttgttgatattgatactgataaaagtattgcccgatttacggtatgggatgatctatcttgtatgctagaaattatggatatagatactgaaaaatatattctcaatgaaaggagagaattatcctctgatgaggaagtaattaaagcattcaaagaatttcatagtctactttag

SEQ ID NO: 294284 - DNA, 696 bp, Proteus mirabilis
atgaatggtgaatataaaatatttaatctttctaatgagttgattatgtcttttagtgatttgattgaatgttatgattatactgagagcggtggaaaatgcacttattctttgataggaataaatgaaaaaaatataaatttaagtaagaatacattttactctcttcaaagtaatttgtttgaaggtaggttaaatttcaatttcagtgtaaatgaattccatttttttaacaatggattgctattaaatgttaatatttcatctggaatgtataagtttggtgcattatcaatacttgagttttacttaaatagtaaagaacggatttggttggatatgagagggatagcaaagaaaaactatatatcagcgagttatttgaaaaatggttttcaaaaagtaatcagaaatgatagcatcattctagatggaaagtatatacatgattattactctttttattgtgagttagggtattctatttttggtagctatggatatgtaggcaataatcttaatgcagtatatgatatacttaatgatgttgtcgaggaaaagagaaatttaatttggaaagacagtatattatcatttaaagcaattgataatagtatacctgccgattatttacaatcttcatcagaagatattttgatattattagatggttattttaatataatgcttgagtaa

SEQ ID NO: 294285 - DNA, 321 bp, Proteus mirabilis
atgattgaacaatttgataaccaaatattagatatttttggaatagagccagatagttttgatgtggattttttacaatggaattatacttttagtaaagaaggcatcaaattattttttgtatactctatggataaaacagtatctatttcactgtatttaaatgatatttcaattgctttttgttttggttatggattggaaacattgagtataaaagataataaaatttatggtgactttgattctaatcgcggtaaaagaacgttagaactagatcctataaatattatatttaaatgggtagataagctttcataa

SEQ ID NO: 294286 - DNA, 375 bp, Proteus mirabilis
atgaatattgaaaagataagttcaattctaaaagaaaatgaatggtgcgatatggaaatttgtggattctgtgagaatgatcttgtagtgaaagggtgtttagaaataacagatcaagattattttattgaatttagatttagaaatgctagttatattgatgcacctttatcttggacaatggatactactgaaaattgtatattcaaggctgttgataaaaattatgtacaagataatactttagaaaaccaaaaatattttagtttaggtgggttatacatattttcatttttagctgaatttttttattctaaagaatgggtaaatatagttgcagactccgtagaatataagcttattcatagatattaa

SEQ ID NO: 294287 - DNA, 339 bp, Proteus mirabilis
gtgaattttaaaaatacaacgattttagatgctataaaaaacgaagagatgaaatcattttatccgcttaaaatgggtgaaaatataacagccgagtcatttgaaaaattaataaaacttgctgaagagtcaactaatatatataaaaatgaagagtttattccaaagtcactactaaaggaactatatttaatatcggttggtattactagcgaaaattatagattacaagatgatgaaatggctagcgttgcggaacgtatcatgaattgttttaatttgttgattgatggaaaagcagttactgatattgttcctgatgagcctagaattatatga

SEQ ID NO: 294288 - DNA, 786 bp, Proteus mirabilis
atgattgagttgctgttaccgggctggatcgccggtatgctcttagcgatggccgcaggtccattaggctcctttgttgtttggcgcagaatgtcctattttggcgataccctcgcccacgcctctttattgggggtcgcttttggcctgctgtttaatatagagcctttttatgccgttattgccgtaactttgctgttagctattttattagtttggttagaactaaagcctcaactttctgttgataccttgttaggtatcatggctcatagcgccctttctttagggcttgttgtcgtcagtttaatggccaatgttcgtgttgatttaatggcgtatctctttggtgatttactctccgttaattaccaagatgtgatcagtatttttattggtgtcgttattgttttattagtgattatccgttcatggcgtccacttctttcaatgactattaatcaagatatggcttttgtcgatggtgtgaatattcaacgcgaacgtttaaaattgatgatgatcaccgcattaacaattgggttggcaatgaaatttgttggtgcacttatcattacgtcactattgattattcccgcagcaacagcgcgccgtttttcacgttcaccagaacagatggcagtgattgccgtcgctgtaggtatgtttgctatcactgggggattaactttctctgcattctatgacacccctgcaggcccatcagtagtattagccgccagtagtttatttgtattgagcttgcttgtaccagcaaagcagtag

SEQ ID NO: 294289 - DNA, 726 bp, Proteus mirabilis
atgtctgacttaattcgtttaaaatcggttagtgtctcttttggtgaaagcgttattctaaaagatatctcttttaatctaaaagcaggccgtattcttaccttacttggccctaatggtgcgggtaagtcaacgattattcgtttggttttagggttgttggctccctcttctggaaagattgaacgtcaacatagtttacgtattggctatgtacctcaaaaactctatctcgatccaactatgccattgacagtcaagcggtttatgaccttaaaaccgggtgttaaagataaagatattttacctgctttaaaacgagtcaatgcggcaaaattaataaacgcccctatgcaaaaattatcagggggtgaatcgcaacgtgttttactcgcccgagctttgcttaatcaaccacaactgttagtgctagatgaaccgactcaaggggttgatgtaaatggtcaattagccctctatgatttaattaatcagcttcgcaatgaattaggctgcgcaattttaatggtgtcacatgacttacatctggttatggctaaaacagatgaagtgctctgtttaaatggtcatatctgctgctcaggtacaccagatgtggtttcttctcaccctgaatttatagctatgtttggtagtcgtggtgctgaacaactgggtatttatcgtcatcatcaccaacataataaggagtgtcatcatgattga

SEQ ID NO: 294290 - DNA, 945 bp, Proteus mirabilis
atgttacataaaaacaacaaatttgcgcatggttttttaattaaatcatgtttagtgactgctatgatagcctcatttagttcatctgttcaggcagatgttgttgcttcaattaggccgatagggtttattgcggcagcaattgctgatggtgtaacgccaacagaagttttattacctgatggggcatcgccacatgattatgcattaaagccttcggacttacgcaaaatcacctcagcagatttaatggtatgggttgggccggatatggaagtctttttagatagaccattaaatagacttagtgacaaaaataagctggctttagcggaaactgacaaaataaagtcgcttttattgaaagatgataatgacaatgtgcataaacatgaggaaaatcacgaacatcattctcatggtgattataatatgcacatctggttatcaccagagattgcgttgtcgtctgcaaaacagatccacgataggttagtgatgctctatccagataaaaaagaacttctggacgtaaacctaagtaaattcagcgaacaactcaagcaaacagataaaaatcttgttaatattctgtcgcctgttaaaaacaagggttattttgtctttcatgatgcttatggctacttcgaaaaacattataatttaaagccattaggtcattttacgatcaaccctgaaatacaaccaggtgcacagaaattacatcaaatacgaacacagttggttgagcaaaaagccacatgtatttttgctgagccacaatttaggccgacagtaattgagacagtggcgaaaggcactggagttaaaatgggggtattagatcccctaggaagtgggattgcattaactcaagatagttatgtgaaattccttacccaattagctaaccaatatgcgagctgcctgaatgaaacacaataa

SEQ ID NO: 294291 - DNA, 1329 bp, Proteus mirabilis
gtgcagcagaagacgagatccattgcacaggtatatttaaatttacccttaccacataaaattatgcttggttcgttaactgcagcaacactggctgtcgcaatatggcggccagttgtgcttcacaccgaacaaagcagagaagttcctatcagtattcaaactcccctaacaacccaaggggaaaacaccgacgatattatcaccgacagtagtgatcagctaacagatgaaggacttgtaggtgctgatgatggtgtcgatactagcaccgcagtggcacaggttcctcatacttatattgtctccagtggagattcattaagttcgatattaacgcaatttggtatcgactcagccgatattgcaacgctctccaatcaaaataaagatctcagaaaccttaaaataggccaaccaataagttggaaacttgatgatgatggtttattgcaagagttaagttggggcgtttctcgccgagaaactcgtgtttatacgcgtacggaaacaggttttactgaagcgaaagagttccaaaaaggcgaatggaaaaatagtgtgaccacaggggttatccgtggtagtttctctgcaagtgcaacaaatgctggcttaactaacgcagaagctcgcgcagtgactaaagctttacaatggcaattagactttagaaaattacaaagtggtgataaattctcagcccttttttctcgtgaagtcttagatggtcgtaccgaacagagcgaacttattggtgtgcggttacgaagtggtggtaaagattactatgcttttcttgctgaagatggccgctactatgatagccaagcaggtggtttagaacgtggttttatgcgttttccaacggtaaaacagtttagagtctcttctcaatttaatcctcgccgtatcaatcctgtcacaggccgtgttgcaccgcataaaggggttgattttgctatgcctgttggtacgcctgttttagctacgggagatggtgaagtcattgtctctaaatacagtggtgcagcaggtaattttattgctatccgtcatggtagccaatataccactcgttatatgcacttacgccaactgttagtcaaaccgggacaacgtgtaaaacgaggtgatcgcattgcactatccggaaatacagggcgctccacagggccacacttacattatgaattatggatcaaccaacaagcggttaatccattaacagctaaattaccccgtgcagatggcctaacaggtaaagagaagcgtgaatacttagctaaagtaaaagagatcatgcctcaattaacgttagataattga

SEQ ID NO: 294292 - DNA, 975 bp, Proteus mirabilis
atgaataaagaaaaagatacagatagtaaagcgggttatgtaccgacttttcaccgcgcctatttgcatcctcgtcattggggaacctggtttggtgcaggcgtattgtgtgcattagcgtatatgccggtaaaatggcgtgatccgctccttgcttctataggtcgttttgttgggcgtaaagcgaaaagtgccagacgtcgtgcagatatcaatttaagatattgttttcctcactgggataaagcacaacgagaagatgtgcttgataaaatgtttgaaacagcgccacagtctttcgtgatgcttgcagatctttgtttaagaggggctaaacacacattacagcgtacctcttgggaagggatagagattatagagcgcttaaaagcacaagggcgtaatgttatttttatggtaccgcatggatgggctgttgatgtacctgccatgttattggctgctaaagggcaaaaaatggcagcaatgtttcaccaccaaaaagatccggtgactgattatttatggaataaagcacgttaccatttcggcggacgtttacactcgcgcgaagcggggataaaaccttttatttcaacggtgcgccaagggttttgggggtattatttacctgaccaagatcatggtgccgagcatagtcaatttgtggatttttttggtacctataaagccacattaccggcgattggccgattaatgaaagtatgcagagcggccattgtgccactgtttcctgtttactgtcataaaacgcatcaactaaagattattatccgtgagccgatggatgatatagaagggcaagatgatcgttatattgcgcgtcggatgaatgaagagctagaagcgttagtctcaccaacaccagagcaatatacttggatcttaaaactattaaaaacgcgtaaagagggggaaatagaaccttatgcgcgtgagaatatcctagactag

SEQ ID NO: 294293 - DNA, 1443 bp, Proteus mirabilis
atgtccagacggctcagaagaacaaaaattgttaccaccttaggcccagcaacagatcgtgataataacctagaaaaaatcattactgctggtgcaaatgttgttcgattaaatttctctcatggctctgcagaagatcatcttgctcgtgctaatcgcacccgtgaaatagcagctagacttggtcgccatgttgctattttaggcgatttgcagggtccgaaaatccgtgtttcgacatttaaagaaggcaaagtatttcttaatgtgggagacaaatttctccttgatgccaatttagaaaaaggcgaaggcgaccaaactaaagtcggtattgactataaagggttacctgccgatgttgttcctggcgatatcttgctacttgatgatggacgtgttcaattaaaagtccttaaagtcgaaggcctgaaagttttcactgaagtgactgtcggtggcccattatctaataataaagggatcaataaactcggtggtggtctttctgctgaagcattaactgaaaaagataaacaagatattattactgctgccaaaattggtgttgattatcttgctgtctccttcccaagaacaggcgaagatcttaattatgcacgtcgcttagcacgtgatgcaggctgcgagtgccaaattgtcgcgaaagttgaacgtgccgaagccgttgccaatgatgaaattatcgatgagatcattctcgcttctgatgttgtcatggttgcccgtggtgatttaggcgtagaaattggtgatcctgaattagtcggggtacagaaaaaactcatccgtcgtgctcgtcagctaaatcgtgttgttatcacagccactcaaatgatggaatcgatgataactaacccaatgccaactcgtgcagaagtcatggacgtcgccaatgcggtattagatggtacagatgccgttatgttatcggctgaaacagcagcaggacaatatcccgctgaaactgtagccgcaatggcacaagtctgtttaggcgcggaaaaaatgcctgcggccaatgtatcaaaacaccgtttagatatggtatttgataatgctgaagaagcgatagccatgtcaaccatgtatgcagctaaccatatgaaaggcgttaatgcgattatcgctatgactgagtccggtcgtactgcccgtatgatgtcacgaattagcaccggtttacctattttctctatgtcacgccatgagaaaacattaaaccaaactgcactttatcgaggtgttacgcctgtttattgcagtactcatactgacggtattgctgccgctaatgaagctattatgcgtttatgtgaaaaaggctttttagtttcaggtgatttagtcttagtcacacaaggtgaccagatgggcacgatcggaagtaccaatacttgtcgtatccttaccgtagaataa

SEQ ID NO: 294294 - DNA, 843 bp, Proteus mirabilis
atgaatatattggaaagggttcagtctagtctggacatcttgagtaaatcagaaaaaaaagtggctgaggttgttttaacaacaccacaaaccgtgatccattcaagtatcgctcttatggcgaaaacagctgatgttagtgagcccactgtaaatcgtttttgtcgacgcatggcaacaaaaggatttccagattttaagttacaattagcacaaagcattgccaatggtacaccttatgtcaatcgtaacattgatgactccgattctgtctctgcttataccaataaaatatttgaatctgcgatggcgggtttagagactgtcaaaaataatctcgatattgcggttattaatcgagctgtcgatattcttactcaagcaagaaaaatctcgttttttggtctaggtgcttctgccgccgtcgcacatgatgccatgaataaattctcacgtttcaacattcccgtgacctattttgatgatgttatcatgcaacgaatgagctgtataaatagtatcgacggtgatgttgtggtgattgtgtctcacacaggtcgtactaaaaatttagtcgaaattgctaaaattgcacgtgaaaatgatgcatcagtaatagcgattaccacttctggctctttattagccgccgaagcaacgttacccatcttacttgatgtaccggaagataccgatatctacatgccgatgatttctcgccttgcacaacttaccgttattgatgttctggctacagggtttattttacgccgagggccaaaatttagagataacttgaagcgtgtcaaagaagcattacgcgattcgcgctttgataagtaa

SEQ ID NO: 294295 - DNA, 1476 bp, Proteus mirabilis
atggcagcgatatcgactgctcaggcctgtgatctggttatcttcggtactaaaggggatcttgcccgtcgtaagttaattccatcactttatcaactggaaaaggcaggatatattcaccctgatacacgtatcatcggtgttggtcgtgctgattgggatgtagctgcttatacaaatgttgcccatgaagcattacaaacttttttaaaagaagagattaaccctgaaatttggcaacgtttaagtgctcgtctcgatttttgtaatcttgatgtcaatgaaactgaccactttattgagttagcaaaacatctaaaacaagacaaattaccggcgatttactattttgcaatgccaccaagtactttcagtgcgatgtgtaaaggtttgggacatgctaaattaaataaagagccaaaccgtgtggttatggaaaaaccactaggaacagatttagcgtcttcagtttctattaatgatagtgtggcgaaatactttaaagagagtcaaatttatcgtatcgaccactacttgggtaaagaaaccgttttaaacttattggctttacgttttgctaactccttatttgttaataattgggataacaaaacaatagatcatgtccaaatcacggtggcagaagaagttggtattgaaggacgttgggggtatttcgatcaagcgggtcaaatgcgtgatatggtgcaaaatcacctattacaaattttgacgatgatcgccatgtcaccacctgctgatttaacggctgatagtatccgccaagaaaaagtgaaagtactgcgctcattacgtcgtattgatatgactaatgtccgtgaaaaaacggttcgtgggcaatatacggctggttttgtacaaggtaaaaaagtaccgggctatctagacgaagagggtgcaaataaagccagtaatacagagacctttgttgcaattcgtgctgatattgataactggcgttgggcgggtgtacccttctatttaagaaccggtaagcgtatgccaagtaaatgctcggaagtggtggtctattttaaaaaaccagctctgaatattttcagtgaaacctatcaagagttaccacaaaataaactcactatccgtttacagcctgatgaaggtattgatattgaagtgctaaataaagcaccaggtcttgatcataaacaccgcttacaaaccactaaattagacttaagtttctccgaaacttttaaccaaactcatttagctgatgcttatgagcggttattgcttgaggcaatgcggggtattcaagcgctatttgtccgccgtgatgaagtagaagaagcatggaaatgggtcgattcaattattaatgcatgggaatgcgataatgaattacctaagccataccaagcaggaacatgggggccggttgcatctgttgcaatgatcactcgtgatggccgctcttggaatgaaattgagtag

SEQ ID NO: 294296 - DNA, 441 bp, Proteus mirabilis
atgatttattggatatttttagttttagctattatctgtgaagtgatcggcactttatcaatgaagtatgccagtgtcagcggtggttacactggtatgatcgttatgtggttaatgattgccacttcctatatctttttagccatagccgtaaaaaaagtggcattaggtgtagcttatgcactgtgggaaggtattggaattgtcattattacaacatttagcgtgctttggtttggtgaatcactgtcagcattaaaattaggtggtttagcaatgttaattgcggggatcactctgattaagtcaggcactaaaaaatcggcggttgctaaaaaaacaaccgattcggtaaaaaatattgccggaaaagccaaacaggttgctactgtggtaaagggagttaataagccaatttcttctaatgttaaagaggcttaa

SEQ ID NO: 294297 - DNA, 333 bp, Proteus mirabilis
atgttagctcaatttgaatggtggcatggcgcttttcttcttcttgctgttgtgcttgaaatcgtggccaatatattcttgaaaatgtctaacggttttagtcgttgggggttgggaatattgtcattgctttgtgtgttaggcgcatttagctcattggcaatggccgtaaaggggatagagctttctgttgcttacgcactatggggagcttttggtattattgccactatcgccgctgggtggatcttatttaatcaacgcctaaattataaaggatggagtggaattatattattattagtcggtatgataatgattaaattcgcttaa

SEQ ID NO: 294298 - DNA, 864 bp, Proteus mirabilis
atgaaacggatattagtcgcgggagcaacaggatatttgggtggttttttagttcaagaattaaaaaaacaaggatattgggtacgtgttttagttagaaatcatcaacaagcgacaaagtttgcggatgttgatgacatattcatcggcgagatcacaaaaccagagcaactttctttgattgctcaaaatattgattgcgtgatatcaacggtagggatcactcggcaaaaagaagggttaacctatatggatgtggattatcaggcaaatgccaatttattagaagaagcgattaaatcgaaggttaataaatttatttatatctcggctattgatggcgaaacacatcgaaatctaaagatttttcaagcaaaggagcgctttgttgataaattaaaacaagccaatttagcatactgtattgtaagacctaatggctattttagcgatatgggggattttttacagatggcggcatcgggtaaagtctatttatttggtgatggcgaacaaaaaataaatcctatctctggaaaaaatttagcgcaatttattgtcgagaaaatgacaaccaatataaatgaattcactgtaggtggaccggatattctatctttgaatcaaatatgtgaactcgcaggaagcgcattagataaaaaaattaaaataatccatttacccgatacgttaagaaaaataactatttttacgttacgtcattttacgagccaaaaattttatgggccattagagttttttttaacttttatggcaaacagtcatattggtatgtgttatgggcatgatcatttatcaaattattatattgaattagctgatccgacatataagagaaaatag

SEQ ID NO: 294299 - DNA, 345 bp, Proteus mirabilis
gtgactataaaacgtatcgatccagaagaccgttggtctgaagcggttatttataatgatactgtctattacactgcggttcctgaaaacttatcaggggatataatcgaacaaactgcagatacattagcagctattgatgtgttattacaaagagtgggatcagataaaagtaagatccttgatgcaacactatttttagcagataaagccgattttgcaggtatgaatcaagcatgggatgcatgggttgctaaagggagcgcgccagtacgttgtaccgttcaggctcaactcatgcatcctgaatataaagtagaaattaaaatcatcgctgctctctaa

SEQ ID NO: 294300 - DNA, 1932 bp, Proteus mirabilis
gtgtcagacgattttgcagaaaacgggattttaacccgacgcgttcctggatttcatccccgtgaagctcaacgacaaatggcgatatcagtaacagaggttattgataaacaaggtgtgcttattgcagaagcgggtactgggacagggaaaacctatgcctatcttgtgcctgcattacgttctgggaaaaaaactatcatctctaccggatctaaggcattacaagatcaactgtatagtcgtgatctccccaccataatagaagcgctagactacgatggtacaacggctttattaaaaggtcgctctaattatttgtgtttagaacgtttagatcagcaaatgctcagtggcggtgatttagaagcagaagtacttgctgatgttatgcatgtacgccaatggtcaacgcaaacagaagatggtgatattagtcgctgtcatagtgtggcggaagatagcaaagtatggccactggtgactagcactaatgataattgtctgggcagtgattgtcctcgctacaaagagtgttatgtattaagtgcccgtaaaaatgcgttagccgctgatgtggtggttgttaatcatcacctttttatggcagatacggtagtaaaagatactggttttggtgagctgatccccgatgcggagataatgatcttcgatgaggcgcatcaaattcctgatatagcgagccactacttcggtcaacagctcactagtcgccaattattcgatctagcgcgcgatatgattgtggcgtatcgcactgaggtgcgtgaccaagtgcaactgcaaaaaagtgctgaccgtttaactcaaatggtacaagattttcgtcttagcttaggtgatacgggttttcggggtaacttaagggaattattacaaaataaggaaaccaaacgctatttaaccttattagatgatgcgttagagctaagttatgatgtaatgaagctctctttagggcgtagccaattactggatagtgcgtttgaacgggcaacactttatcgtaatcgcttaaaacgcctaattgatacgacgattgccggatacagttattggtttgaaagctatggtcgccattttttactggcgatcacgccactttcggttgctgataaatttcgtgagctgataaagtcccataaaagtagttggatatttacttctgcaacactctctgtagatgaaaaaatgtcttattacacagatagattaggactggaaaatgccacgacattaattttaaatagcccatttgattatcaacatcaaacgttgctctgtgtaccacgttatttacctccgttaaatcaaccatacaccgcgaagcgtttagccgctatgctggctcctgtgatcttaaaaaatcaggggcgttgttttttcctttgtacctctcacgctatgatgcgtggattagccgaagagtttaaagccagcttaccacttcccgtgttaatgcaaggcgaaatggggaaatcgcaattattgaaaaaatttgtttcctcaggcaatgcgttacttgtcgcgacccaaagtttttgggaaggggtggatgtcaggggagatacactttcttgtgtgatcattgataaattaccctttaccgcacctgacgatccattattaagagcacgtattgaagattgtcaattacgtggtggtgatgcatttcgggatgtacaaatccctgatgcggtgatcactctaaagcaaggtgtcgggcgtttgatccgcgatatacatgattatggtgccattattgtttgtgatgatagattagtttcaagaccttatggggaagtgtttttaagtagtttgcccccatcaccacgaacccgttcattagaaaaaaccagttattttttaagccaacgggcacaacgaaatgaaatagtgtcggagtcataa

SEQ ID NO: 294301 - DNA, 702 bp, Proteus mirabilis
gtgtcactgcgaattttagcaattgataccgcaactgagtcttgtactgttgcggtttggaatgaaggtgtcgttgcttcacgttttgaaatttcaccgcgtgaacatacacaaaaaattttaccaatggtgaaaagtgctttagaagaagccaatttatcactgcaatccttagatgccctcgcttttggtcgtggtccgggcagttttaccggtgttcgcattggtgtcggtgttgcgcaaggtatcgcactaggggctaatttgccactgattggtatttcttctcttgccaccatggcagaaggcgtctttagaacaacaggcattaagcaagttttagtcgccattgatgcccgtatgggggaaatctactgtgcccaatatcagcgtaatgacgctggcatttggtctggtgaagaaacagaagcggtaatgaaaccagaacaatttgccgaaacgctacaaactatcacaggtcgctgggcaattgcgggtacggggtggcaagcttatcctgatttagctttatcattgccttttaccgtggttgaaacgcaaattactttgcctgcggcacaagatatgttgccacttgccgttacagcatggcatgaagggaaagcaactaaagtagaagaggccgagcctgtttatttacgtaatgaagtcacttggaaaaaattaccaggacgggaatag

SEQ ID NO: 294302 - DNA, 594 bp, Proteus mirabilis
atgaacagacaattaaactaccgtttggtaagtaaagcgctatttttatctggcgctctattactaacgggctgcgtctctatacctgaatctattaaagggacaacagcaactcctgttactgacttaaatgtagttctagcggcaccggagctttatgtcggtcaagaaggtcgttttggtgggcgagtgattgaggttaagaatctaccttcatcaacccagttagaaattgctgtgatgccactttctcactatgatgcggctcctgagttacagcaaccttctgttggtcgtctttatgcgaatgttacccattttttagatccaacagattataaaaatcagtatgtcacggtagtgggtacgatcaaaggtgtaaaaacaggcaaagtgggtgaagccgtttatccatttttacgtatcgatgttacaggaatgaaacgctggacattaacgcaacaagttattatgcctgcgcctgttatgacatggggatactatggtaatgccccttactggtataattatggctatggcggctatggggcatatccatatggcactggccaagttgtccccgttttggagtaa

SEQ ID NO: 294303 - DNA, 1689 bp, Proteus mirabilis
ttggaaaaagtctggcttaaacgttatccggcagatgttccggctgaaattgacccggaccgttttgcatctcttgcggagatgcttgaaaacgctgtcgcaaattacgcagatcaacccgcctttatcaatatgggcgaggtcatgacttaccgcaaactagaagagcgtagccgtgcttttgccgcttatttgcaaaatggcttaggattgaaaaaaggtgatcgtgtcgccttaatgatgcctaacttactgcaatatcctatagcgcttttcggcattcttcgtgccggtatggtagtggttaatgtaaacccactctacacaccaagagagcttgaacatcagcttaatgatagtggcgccacagctattgtcattgtttctaactttgcccatacgctggaaaaaatcgtctttaacaccagcattaaacacgttattttaacacgtatgggagatcagctatctcgtcctaaagcgacactggttgattttgtggttaaatatatcaagcgattagtcccaaaatataatttgcctgacgcgatatcatttcgtcgagcgatgcatttaggctatcgaatgcaatatattaagccagaaattactggagatgatttagccttcttacaatatactggtggtaccacaggaattgcgaaaggtgcgatgttaactcatcgtaatatgttggctaatctagaacaagctaaagccgcttatgttcctgcacttaatgtagggaaagagctggtggtaaccgctttacccttgtatcacgtctttgctttaaccgtgaactgcttgttatttattgaagttggcgggaaaaacctactgataacgaaccctcgagatgttaaaggcactattaaagagttatcgcgttatcctgtcacggcgattaccggggtaaatacactatttaatgcttggctacataatcctgagtttcgtcaacttgatttttctaagctcaacctttctgttggtggcggaatgcccgtacaaagtagtgttgcgaaagagtgggaagaattaaccggtaagcatctattagaaggttatggtttaactgagtgttcgcctttagtaacaggtaacccttataacctgaaaaaatacagtggtagtattgggcttcctgtaccttcaacggaagtaaaatttatggatgatgaaggtaatgaagtgtctcgcacagaaggcggtgaaatgtgggttcgtggccctcaggtcatgaaaggctactggaatcgtcctgatgcgacagcagaagtactacatgatggatgggttgccacaggtgatattgccacaatggatgatgaaggctttatccgcatcattgaccgtaaaaaagatatgatcttggtttcaggatttaatgtctatcctaatgaagttgaagaagtggttactgcgcacccgaaagttttagaatcagcagctattggtgtaccgagtaaaagctcgggtgagactgtgaaaatctttgttgtcaaaaaagatccctcattgacagaagatgaacttaaaactcattgtcgccgttacttaacgggttataaagtacctaagattattgagtttcgagaagagctgcctaagtcaaatgttggtaaaattttacgcagagaattaagaaatgaagaaaaacagttgaaaacatcaactggatcttga

SEQ ID NO: 294304 - DNA, 1119 bp, Proteus mirabilis
ttgaattatcaatttatcacgacaaacacagcactagaagatgtctgtaaagcagcgtctgaggtatcacaaattgcattagatacagagtttgtccgtatacgcacctattacccacatttggggcttatccaaatgtacgatggtaaacagatctctcttattgatcccctgaccattactgagtggactccttttgttgaattattaactaatcccacagtacttaaatatttgcatgctggaagtgaagatcttgaagtgttttctcatcaatttggttgtgttccgacacccatgatagacacccaagtcgtggccgcttttctgggctatcccatttcttgtggttttgccaccttagttgagaaatatgaacatattgctctcgataaaagtgaatcacgaacagattggctggcgcgcccattaaccgaaaaacagtgccaatatgcgagtggtgatgtgttttatttgttacctctagctaagaaattaattgcacaggcacaagaagccggttatatggacgctattgttgatgagtgtgaaatgatagccgagcgtcgccaagagaccgtatcaccagagcttgcctatcgcgatattggtaatgcatggcaattacgaggtcaacaattagcatgcttaaaaatgttggcagaatggcgtttaaatcaagctagagcccgtgatatggcattaaactttgttgtaagggaagagcatttatggtcagtagcacgctatttaccgacctctcttgctgaattagatgcgctttctctatcggggcaagaaattcgttgtcatggccgccgcttgttggattttgttgctaaagccaaacagatcaaagatgaagattgtcctgagcctattggcaatttaattgaacaacctaactataaaaaagcctttaaagcaataaaaacggtgatccaagaggtaagtgaaggacagcgttataaccccgagttattagcctcaagaagacaaataaaccaattgcttaatattcactggaaaattaaaacaggggagcctgaattgctttcacgctggcgtaaagcattattagcagaaaaaattactgcaattttggcgcaatatccttaa

SEQ ID NO: 294305 - DNA, 270 bp, Proteus mirabilis
atggctttattagatttttttctgtcgcgtaaaaagtcgacagcaaatattgccaaggagcgcctacaaattatcgtagcagagcgtcgacgtggcgatactgagccagcttatttacctgatatgaaaagagatttattaggtgttatctgtaagtatgtgcagatagatcccgatatgctatctgttcagtttgagcagaaaggcgatgatatctccgtactagaattaaatgtgacattacctgaaaatgaagaatcacctaagtga

SEQ ID NO: 294306 - DNA, 813 bp, Proteus mirabilis
atggcacgcattattgttgttacgtcaggtaaaggtggggttggtaaaacaacttccagcgcggccatttctaccggcctcgctcaaaaagggcataaaacggttgttatcgactttgatatcggattacgtaatcttgacctaattatgggttgtgagcgtagagtcgtttatgactttgttaatgttattcaaggtgatgctactttaaatcaagccctgattaaagataaacgtacagaaaacctttatatcctcccggcttcacaaacaagagataaagacgctttaacccgtgatggtgtagagcaagtgttagatgaactggatgaaatgggttttgattttattatttgtgattcacctgcagggattgaaagtggcgcacttatggcactctattttgcagatgaagccattatcaccaccaacccagaagtctcctctgtacgtgactcagaccgtattttaggtattttagcctctaaatcacgtcgcgctgaacgaggtgaagatcctattaaagaacatcttctattaacacgctataatccaggccgagtaagccgtggtgatatgttaagtatggaagatgtgctagaaattttatgtattccactgctgggtgttattccagaagatcaatccgttttacgttcatcaaaccaaggtgagcctgttattcttgatagtgaatctgatgcaggtaaagcttatttagatacagtaaatcgtttattaggtgaagaacatccattccgttttattgaagaagagaaaaaaggcttcctaaaacgcctttttggggggtaa

SEQ ID NO: 294307 - DNA, 702 bp, Proteus mirabilis
atgtcaaacacgcccattgagttaaaaggcagtaattttaccctctcggtacttcatttaaatgatggatcaccgaaggttattcgtcaggctatttcagataaaattgcccaagcgcctcaatttctgaaaaatgcgcctgttgttatcaatgtctctgctatcgcagatcaaacgattgattttaaaaaactgaggcgaatagtagaagatgctggcttacgtgttgtgggaattagtggtagtcatgacgctcaacaaaaagaagcgataattgccgcacagttacctattctaaacgaaggtaaaataactaagccagcagctcaggcaaataacgataaaacgaatgaagtaccgataaatgtacgacaaaaaaccaaaatcattcatacaccagtgcgttcagggcaacgtatttacgcaccaaatagcgatttagtcgtgttaagcaatgtcagtgctggcgctgaattaatcgcagacggtaatgtgcatatttatggtgtattgcgtggacgggttcttgccggtgcatcaggcgaccaagagagccatattttttgtacacatttatctgcagaactagtttccattgctggtcaatattggctaagcgaccaaattcctacagattttgttggcaaatcagtccaacttagtttgcaagagaatgaattaacaatcgagaacttaatttag

SEQ ID NO: 294308 - DNA, 288 bp, Proteus mirabilis
atgatttgtgcaatttaccgtagtaccaagcgtgatcaaacttatttatacatcgaaaaaaaagatgatttctctcgaattcctgaggaattattacaaagttttggtgaaccacagtttgcaatgttgctagatctcgcgcaaagacagcgtttagcgaatgcagacatagaaaaagtcaaacaagcgttgactgaccaaggtttttatctacaagtgccacctcccgtcgaaagtatgttaaatgcttatttagatgaattaaaaaattcagaaaaaactgaataa

SEQ ID NO: 294309 - DNA, 1128 bp, Proteus mirabilis
atgttcaaatattcgttcatcgcggtgattgtttctactgttttgctatctgcttgtgcagatagccatcagaagagtgcagaaaaaaaacctgtaacaagtgaaattgccgatattacgacatcagcaccggctcgctggaaacagattgatgttgcctcacttgaacaggcttttccaaaacagtcacggacacctgcacaatttcctgcttatgtagatgctttaaaacaaaaagcggctgaattgggttataaacctgaaactatcaattttgccttttcggaaattcactttattgacagagtggtgaagtcagaccgtaatcagccagaaaagaaaattactttagatgtgtatttacctcgagtggtgacgaaaggacgtatcgcagaaggggcgaaactttatcaagctaaccaacaaaccctagcgcagatcagcaatcaatatggtgtgcctgcaaattatattgttgccttatggggattagaaagtggttttggtcgagtacaagggaaagaagatgttatctcagcactggccacattagcttttgaaggtcgccgtgaggctttgtttagtcgccaattaatggccgcacttgagataatcgaaaatggacatttacctgtaggccagcgtttaaaaggctcttgggcaggcgcaatggggcagacacagtttatgccatcttcatttttgacttacgctgctgatggcaatggtgatggcaacattgatatatggaatagccgtgaagatgcgtttgcttcagccgctaattatttagcaaccgagggatggcaacgcgatctcccttggggggaacaagtcagtttacctgctaattttaatcaacagttggaaggtataaaaacagagcaacaaaaaacggtcgcacaatggaaggcgctaggggtgcaattacctgctaatagccaattaagtgatgatatgaaggtatggctgataattcctgatgatgatttacatagaagctatttagtcacccaaaatttccgtactatcatgcattggaatagctcttacttttttgctttgagcattgtgacgatggctgatggcgttgccaataaaataaatacactgccaactcaacactaa

SEQ ID NO: 294310 - DNA, 657 bp, Proteus mirabilis
atgtatcaacatagagattgggaaggttcgttgcttgattttcctgtcaataaagtgatttgtgtgggcagtaattatgcaaaccacataaaagagatgggctcggtgcgctctgaagagccggttatctttattaaaccagaaacggcgatgtgtgatattcgccaacctattgcgatccccaaagaaatgggggcagtgcatcatgaaatagagttagcggtattaattggtcagccactgaaacaagccaatgaagatagggttgatcgagctattgctggttttggtgttggtttagatctcactttacgtgatttacaaagtcaattaaaaaaagcgggacaaccttgggagaaaagtaaagcgtttgatggttcagcgcctttgtcgggatttattccggtgaactcttttggtgatccccaaaatgttgacttaatgttgaaagttaatggtgaaattcgtcagcaaggcaacagtcgtgatatgctaacgcctgttttaccccttatcagttatatgtcgcgcttttttacccttcgcccaggtgatgtcattttaacgggaacaccagaaggtgtcggtcccttagcatcgggtgatatgttggtattaagtgtcaatgaacatcagctgaccacacgggttatttaa

SEQ ID NO: 294311 - DNA, 444 bp, Proteus mirabilis
atgacacaggctttttggcagacaaaaactttggatgaaatgagtgatgatgagtgggaatcgttatgtgacgggtgtgggcagtgctgtttacacaagttaatggatgatgatactgatgagatctattttactaacgtcgcttgtaatcagttaaatattaaaacctgccaatgcagtaactatgaagatcgttttcgttatgaacctgattgtatcaaactcacgcgatataatttgccgacgtttgaatggttaccgatgacttgtgcttatcgcttattagcagaagggaagcctttagcggattggcatccccttattgcaggtaataaagcaaaaatgcatcaaggtaatatttcagtaagatatattgctgttcctgaagtggaagttgaggactgggaagatcatattcttaatcgccccaaaggacgcggttaa

SEQ ID NO: 294312 - DNA, 771 bp, Proteus mirabilis
atgaacgaacatacaatcagtaatgaatctcttattttttctctgttactggtcttagtggctatatttattagccgaaaagagaaactttcattagagaaagatattatttggagtaccgcccgagcgataattcaactctttattgttggctacgtattaacttatattttcgacgtcgaccatattatccttacatttctaatggtcttatttatctgttataatgctgcctataatgctaaaaaacgcagtaaatacgttaaagatatttttattatctcatttgtcgctattaccacaggggcattgctcaccttaagtattttactttttactcatgccattgcctttacccctatccaaattattcctattaccggtatgatcgcggggaatgcaatgattgcgaccggactttgttataatcagcttgggcaacgttttgaaaatcatcaacaacagatccaagaaatgttaagtttaggggcaacccctaaaattgcttcaatggctattattcgagatagtattaaatcgtcgttaattccgaccgttgacgcagccaagaccgtgggaattgtaagcttacctggaatgatgtctggattaatttttgccggtgttgatccactacaagcggttaaataccaaattatggtcacttttatgttgatggcaaccgccagtatttcaacaattattgcttgctatttaacctataagaaattctttaatcaacgccatcagttaatgacgtttaatcaataa

SEQ ID NO: 294313 - DNA, 651 bp, Proteus mirabilis
atgaacaataatcgcgcactactatgtctggaaaaaattggctttcaactcgatagcaaaattattctagataatgtgactttctcactacaaccttctgaatttaaattgattacaggcccttctggctgtggaaaaagtacgttattaaaaatcattgcctctttattatcaccgacaagtggcacacttttctttgacggaaaagactacttaaccctttctcctgaacaataccgacaacaagtttcgtattgtactcaaaccccgatgttatttggtgaaacggtttatgacaatcttaaatttccttatttactacgcaaaatcgccgttgatgagaagaaattagcgaaagatttagattactttaatttgcccaatgagattttaaataaaggtattaatgaactttctggtggtgaaaaacaacgtatctcacttatccgtaacctacagtttttacctaaagtgttattgcttgatgaaattactagtgctcttgatgaagacaataaaataaaagtcaatgagcttatccatcattacgtcaaagagcaaaaaatcgctgcattatgggtaactcacgatcaaaatgaaatcaaacatgccgatgatgtgatccacttaccgagtcatatgaacaattaa

SEQ ID NO: 294314 - DNA, 924 bp, Proteus mirabilis
atgcgtatttgttctttgttgctatgcaccactttcttagtatcatcaataacatcaagctacgcagaaataagcacacataaactgattcgccaagataatagcgaactgatttattatctagataaacaagctgaacataacaaaacactgttagttttaatgcaaggttctgactgtaatagcataaaaaataatacttttattcaagaaacctttggtagatggctaccgagtagtgatgttttaatggttgaaaagtatggtattacagcacaattgacttattttgacgataatggtgaaagagaagatttccctaaaaactataaactgcatgataatcctagccaaaggcttgctgattatttagcagtgctagataaattatcccctaattacaccaatattgtattacttggaggaagtgaaggcgcaacaatggttcatttagttgttgctgaacgtcatgatattagcgctgcaatcgcattaaatggcggtggtcgttttttccttgatgatgtactgtacaatatacgcaatacaacacctaaagagcatgtggaagaagcaataaatagctttcaacaactctctaatgcaataataacgaatcaaattggtgatgagcaatttgttagtgaacatagcaaattatggtggcaacaatatcttgctattgatctacttgaggtgattaagcgcaacacgcaaactccggtattaattgttcaaacattagatgatatcaatgtagatgtggctgcattccatcaattatctcaagagataacgcaacctaatgtgacatttattaaatatgataaattaaatcatggtttttataatcaacaaggtgagcgattaaccggaaaagtcgttcaagatatacagcaatggtatgcgcaatataataaataa

SEQ ID NO: 294315 - DNA, 915 bp, Proteus mirabilis
atgtcatctcagttcaatggacttatcccttccaattctttatcttcgtttaatatagaagtgattaaagaacttctgctctggatcgaggtaaatctagaaaagccgttattacttgatgatgttgcgataaaatcaggttatacaaaatggcatttacaacgggtgtttaagcaagcaacgggcttaacattagcctcttatattcgtggtagacgactgaccaaagccgccactgaattgcgcttaactaaacttccggtattaactatcgcactacgctatcaatttgattcgcagcaatcttttacacgccgctttaaagctgtttttggcgttactccttcggaataccgtaaagttgatgtgttgtgtagcgacaattttcagccccccatcaattttgaagttaccgacctccctattccaaatattatcgagctacctgaaagctttctttatgttattcaataccaatacttttgctctatcgaggatattggcaagctacatgaagatattcgtcatcagttttggaatgattttttgttgtacacagataaaaactttacggaaagtagcgtgttaatttcttatcaaccaaatacattacgtaaagataagatccagattgattatgaaattggcctaaacaatttagatcactttaccagaccccgtggttttagaaaaaaagcgattgcaggcgggcgttatgttcgtttccaatttaaaggcacgttagaagaatataaacaatttgccatcaagatctacttttatactttaccggctttggggttatgtcgtcgtttagggccagatattgaaaactacatttgtatagaaacagatagcgacataatggaactaccaaaaacactggaaattgattattacgttccaattcattaa

SEQ ID NO: 294316 - DNA, 624 bp, Proteus mirabilis
atgaaattaaaatcacggcaacaagagaattcagaacaaacacgcttagctttacttgaagctggacaatatctctttgtaaatcaatgctattatgatgtttccattgatgaaatatcacgttatgcaagggttactaaaggggcgttttatcatcactttagtaataaaaaagcccttttgagagagtgttatttactgcaagttaagcatgctgttcaaaaattagatgaagtgcctacttatgatgataaatggcaagagctaacggcgctcttctctctttgtgttgaccatatttatcagtgtaaaaacgagttaattcccttacaagaagttatctcggtattaggttggaaagagtgggaagagattgacgccaacattcttattcctcgtatccaacactgtgttgatattctctttgctgaaaaacagatctgtgcttattcaccggctattgtggtgaatttaatttatggttttattactcatattgctatcaatctaaaaaatgaagcgtcattgccgaaagaggcatgtagtgattttaaagctatttttgctgattttttaatcggggtaaaacaagcatcaccacagcgtcatcaacatagggtataa

SEQ ID NO: 294317 - DNA, 1554 bp, Proteus mirabilis
atgtttaaaaacatcagtatagaaaaaaccgttaaagttatgctggctattttatttgtacttattatgagcattatttactttagttatgatgcttcaacacgctcttatcataactttgtttcatcaaataacttaagtcagcaaatgttgctgatgggaaaagcgcgttatcaaatggcggtgatcagagcgaatattaatggcttggatgggcagttaagagtgaatgaaaaaccttctgctaaataccttcatcaaactcaagaatatataaaaatcacccgtgaagagatccaccgttgggcggatgctgaaaagttaaccatggaagggcgtcaggttgctgatgatatgacgaaacgctttgatgagcttttagatatatttaccgatgccttagctaaattacgtaaaggacaattgactacgcactctgctagtcaaaaaatggatgaactcaacgagatcaccatgacatattatgccgtcgccaatggtattgagaataattatattgatattgcgaaaacctcacaacagcgcattatgctaatggcgttagtcacagcgattattgtcattatgctctttatcattatcttacgttggttctctcatagctttatcggcaatattaaagtgcttattaatatttttagtaaaatgagccaaggcgatttaagtatgcgagtggaaaatcacggtaacaatgaatttggtaagctatttaatgaaatgaataaaatgaaagtttcattaagtcaaatgattgcttcggtaaaaaatgcagtaaacaccattagcgtcagtgcaagtgaaatagcaacaggtaatactgacctctcctcacgtactgaagagcaggctagtgcgctacaacaaaccgttgcaagcatggagcaaatcaaaaccacggttgaaaaaaatgccgataactcacgccaagctagccagttggcattaagagcgacaacgtcagcacaaaacggcgaaaaggtgatggataatgttatcgaaaccatgtcatcgatttctgaaagtgcgaaaaagatctcagatattaatgacatcattaacagtattgccaatcaaaccaatattctctcattgaatgccgcggttgaagcggctagagcgggtgaacaaggtcgcggatttaccgttgttgcagccgaagtgcgtaacttagccagtcgtagtgcagaggcagccaaagagatcaatgaacttattacccattcggtaaataaagtacaggttggatcacaacaagtgaccgaagcaggacgctccatgtcggaaattgtgaccaccattagtcaagttaatgattttatgcaacagattgccttagcctctaatgaacaaagtatggggattaatcaaattgctatggccgtaagtgagatggataccgtgactcaacaaaatgcggcacttgtggaagagtctgccactattactgccaatatggatgatgaagctcatcagcttgccaacttagtctctcaatttaaagtggatgagaaagaaaatactaggcatgcataa

SEQ ID NO: 294318 - DNA, 999 bp, Proteus mirabilis
atgaaaattgtttcctatagtactaaacattatgaccgcaaacacatggaatgggtcaatcagcataatggatatcattatgatatcgaatattttgactttaatttgactgaacaaacagcaaaaaatgccgtcggcgcagatgcagtctgtatctttgttaatgatgatgctaatcgtgcggtattacaagagcttgccagtctcaacatccgtatccttgcactgcgttgtgcgggatttaataatgttgaccttaaggcggcggccgaattagggatcaccgtagtgcgtgtgccggcttattccccagaagcgattgctgagcatactgttgggatgatgctctcgttaaatcgtcgtattcacagagcctaccagcgtacccgtgatgcaaacttttccttagaaggcttaactggctttaatatgcataatcgcactgctgggattatcggcacggggaaaattggtctagcgactttacgcatactaaaaggctttggtatgaagctattggcctatgatccttatccaaaccaagctgtattagatttgggtgcggaatatgttgacttagcgactctttacgcaaattcacatgttatttcgttgcattgcccattaaccgcagaaaatcatcatttattaaatgaaagtgctttttcgcaaatgaaagatggcgtaatgatcatcaacactagccgtggggccttaattgattctgcagctgccattaatgccttaaaacaaggtaaaattggcgcattaggcatggatgtctacgaaaatgagcgcgatttattttttgaagataaatcaaatgatgttattcaagatgacgtgttccgtcgcctttcctcttgccataacgtattgtttaccgggcaccaagcattcttaactgaagaagcgttaattagtattagtgaaacgacattgcacaatattaaagaggttgctgcaggtataacatcatctaacgaagtgaaagcctaa

SEQ ID NO: 294319 - DNA, 2637 bp, Proteus mirabilis
gtgttgttaaagaaaacaatcaaatggacagggatgatactactgggtgtcggtgcagttagcacgaccttgtggctcaccattccacgttggttacctgttgtggctaaaagctatttacctgaaggtgtttcactctctttaacacaacctaggttacaacaatggggtgtttttattgatgatatcgcattaaaaagtgatagctgtaccttggctaatgtgcagcaatttacgtttaactatcaaaaacagcaaattgatagcctatcatttaatagtcaacaacttactattaacgaagggtgtttttcacaattatcttttgcagataaaaaagaaaccgcaacagttcctctcgatattcatgcgttattagctactattcctcacttatcggttaatatcaatcatgtttctttaatagataatcagcgttataacggccattttcagcttaaaagtgatacaaatgggcgattaatcagctatcagggagataatacgcagatacaagcgctgatccgtgataatcaatggttagatattaaacaattaaagattaatttacctgacgataatcagatagagctggcggctgaaatcgcgttaccccttaatgttgattcattaccagaaaatggttctatcagcacaacattgttaacatcccattatgcttacccattagtctttattgctcaatggcaagggaatagcggtaccatttctattgctgaacaaggtggagggcaagcattagctgtgttgccttggaatgtaactgcagaaaatatcacgatagaaaaagggcgttgggaatggtttgggtttgatcaacccttacgtggtggtgtgaatatcaacattgcccagtggcagcaaggattaacgggattacgcttaactgcgcgcttaaatgttatgacgcaagggcatgcaggaaaagggaatttagtgataacgatacctgaaacggcgattaactggttagatgctgatatacctattcaattgacaggagttgtaaataaagatctcatgcaagccagtgcacaacttcccgttaaagtgactggtatgttgacagatcctactatcgaatttcagcccggttcactattacgctttaaaggacaactaacagaaacgctgacggtaaaagatgctcgtttaccactggctggctcaacattatcttccaaaggatttaatggtcacctaaatgcgattgtgttagctgaagatgctatttggggagattatcgagtccattttgctggacgttcgactgatttcttacctgatcaaggcaattggcaatggcgttattggggagagggcaatttattgccattaaaagcgcgttgggatatcgctggaactggctcttgggtagataacatggtgagttttgagacattaaataccggatttgatgttttaacttaccagcataccagtatgttagcccccagattgacgctcttaacgccatttcgttggttaagagacgataaaaacccattatttgaaggaaaattgaagttaaccagtcaacgaatcgattttcctgcggggggatccttagatagagctgactttattgccagtgtaaaaggtcaatctccttttcgttttaatatgaaaggcgagctcaatgccaagccaaatattggaccgataacgattaatacacgttgggatggtgaaaggctaagagggcagatgcgttggcctgcacaaccaatcaatgcctttcaatctttattgccagaaaaattaggcatcacattagataatggcgaattttatactcaagctgacttttctattgcccctcaacaaggtttagttgctggtggacatttagtagttaaacaaggcagcatgtggctaaaagatggcgtattagaaggactcgattttattttaccttggcgtttaaacggtgatgaatggcaactaggtgtaaagcagccagtgcaattacgcattaagcgcgtcaacaacttatttgaaatgacagatattaccgccgatctgcaaggattttaccctattacagaagcaaaacctttagttttatctaatgtcaaggttgccatgcttgatggcactatttctatggcaaaattagcattaccacagcatgaagcggcgattatctcattagataatctagagttaagtcggcttttcactttattgaaggtgacccaatttgccgcatcaggtaaagtaagtggcgaattacctttctttatcaataacaatcagtggatagtgaaagatgggtggctggctaattcatcgtacttaaccctcaggcttgataaagattttgttgactctattgatgatagcaatatgacagccggtgtcgctatggcatggttacgatatttagagattagccgctcttggacgcgggttaatttaagcaacctaggtgaattagtgcttgaagcggaaatccaagggaaaaatccattggaagacaaacggcgacaagtaaatcttaattatcgccatcaagaaaatatttttcagttatggcgcagcttgcgatttggttcgcaattggaagagtggttagaaaagagcctatccgatttagggagtgagtcagaatga

SEQ ID NO: 294320 - DNA, 207 bp, Proteus mirabilis
atgatgttattatttttaaaaagactatttttatttgttattttcactatcggcatatcagcactcactggatgtattcgattagaggttgctaccccggaaaaaccgataaacattaatatgaacgttaagattgaacatgaaattaatgtcaaaatagatcgccaagttgaagacttgctgaaaaacaatagtgctatattctaa

SEQ ID NO: 294321 - DNA, 333 bp, Proteus mirabilis
atgaattataaaaaatatctctttagttttgcattaatcacagcattgattagttcaaatgccgttgctttaacacttgatgaggcgcgcgcgcaaggcttagtaggggaaacttttagtggttatgttgagttagtacaaccaaaccataagcaagctcaaatattggtgaatgaaatcaatcaagccagaaaagccaaatatgctgaaattgctaaaaccaatcaagtgactcctgaatctgttgcccgtttagcgggtgaaaaattagtggcaagagccaattcaggtgagtttgttaaaggaattaatgggcagtgggttaagaaataa

SEQ ID NO: 294322 - DNA, 963 bp, Proteus mirabilis
atgaaaaaaccagcatttattatcacattagataccgaaggcgataatctttgggaaaatgagcataatattactacgcaaaatacgcattttttaccccgttttcagcaactttgcgaacgttttcaatttaaacccgtttggctaaccaactatgaaatggcaatagatgaagcctatattgagtttgcacaagatgtgatagcccgtaacactggggaaattggtatgcaccttcatgcatggaatagtcccccaattgttgcgttaacggacaatgatctccattatcagccttatttaattgaataccccaaatcgcagatgcgcgataaaattgcctttatgactgacttactggaaaataaactacaaacaaaaatgttaagtcaccgtgctgggcgttgggcatttaatgaaacttatgcgcagctattgattgaatttggttatcaagtcgattgctcagtcacacccaaagtcgattggcgttttactaaaggtgatccggcacaatcaggcggtacagattacagtaatttcccaagccatgcgtactttatggatgttaatgatatcagcaaagcagggaattcaacgttacttgaagtgccaatgagtattcaatataaacattccccttttatgaataaaattaagcgagggtacgataggctaagaggtaaacgacgctcaccttcagttaattggttacgccctaaagggggaaatgcccaacagatgattgaagtggcacaaaaatctttagcccaaggtcactctcatattgaatttatgttgcactcttcagagtttatgcctggtggaagccctacttttagaacagaacaagatattgatggcttatataatgatttagaaacactatttaatttcttacaagataaagtacagggaatgacattggctgagtattatcaaaataaagtgcaggcaaaataa

SEQ ID NO: 294323 - DNA, 1098 bp, Proteus mirabilis
atgaaggaacatatactttttattattgatggattaccgggtggtggcgctgaaaatgtcacgatcaggctttgtcatggcttaagtcaacgtggttatcaagttacattactctcattagcagaaaaatgtgactatgctattcctgcagatattgaactattaattgatgcagatagttaccatggcttattttatcgacaaacagaattaaaacgacgtgccaactcgatggataagacccttcaggcattgtttgcgcgcaaaggtattcctgcgttaattgtctctaacttacataagactgacagaattgttgcactatcaaaacaactggcagataagaatgtatggtattgtattcacggtattttttcacagtcttatttaggcaataaaaaaggtttttcccgctggttaaaacagaagaaaattcaaaaagtctatcagggtaaaaatattattacggtatcaaatgcggcaggacaagatttaatagagaatattaaaattgtccctaatcaattaaaaacaatttataacccatttgatattcaagaaatcagaacactggcatcagaaaataatccctaccaaaagcaggattatttattgcatattggtcgttttcatcaagtaaagcgccatgaccgcttgctagaagcgtttgctttagccaatctaccttgtaaattattgattgcaggacagggatcttctgaggtcaccagcaatattaaaaataaaattgttgcactaaatttagaaaataaagtgagcttaattggctttttagccaatccattccctgtgatcaaagatgctaaagcggtggtattaagctctgatagtgaaggcttaggaaatgttttagtcgaatcacttatttgtaatacccctatagtgagtactaattgccttggtgggatcagtgaaattatgaagggtgaattagcagattataagtctgaattaaattcagcatccttggctgaaaaaatgcgtttagcttactttaacccgcctaatattacgcctaatatgtatcaaaaatttgatattgatgaagtgatccgtcagtatatttcattaatttag

SEQ ID NO: 294324 - DNA, 1131 bp, Proteus mirabilis
atgaatacattccgcttggcgatagtacgtcaaaaatatcgaccagacggtggcgctgagcgttttgtttctcgcgcactggaagcgttagataatcaatccgtagagttgaatgtgattacacgctcttggattggcgcggtgcaaccacaatggcatattcatattgttaacccttttaaatggggacggattagccgtgaaaaagggtttgcacaagcagcaagacactgttggcaacaagaaaagtttgatttagtacaaagccatgaacgtattgctggttgtgatatttaccgcgcaggagatggtgtacatcgccgttggttactgcaacgctctcgggttttatcacctttacgaagtaaattactgcttaatagttgttatcatcgttatgtaatgaacgcagaaaaagagatgtatcaatctcctgagctaaaacgggtgatttgcaattcagaaatggtcaaacgtgaggtgatggaagattttggcgttgaaagtgaacgtattagtgtgatttataatgcgattgatcatcagcgttttttccctgccacggctctttatcggcaacaattacgtcagcaatatcatattccggttgagggtaagtgttttatttatgtcggttcagggtttgaacgtaaagggttaagagctgctattgaggcgattagtcatactaatgcttacctgttagtgattggtcaagacaaagagtacaagaaataccaacaattagctcatcgattaaacagccatcagcggatcttatttttaggtgtacagaaagacaccttacctttctatcaaatggctgatggactattgttacccactctgtatgatccttttcctaatgttattttagaagctatggcatgtggattaccggtgatcaccagtgatacatgtggtggagcagaatttattgaacaaggtctaaatggatttgtcacagatgcattagatacacccgcaatgatcggtgcaatagagagtattccggccgataacttaggtaataagatgtctaaggctgcacgaaataagatactaccctatacgcctgagaatttgtctcaacaactgatcgagctttaccaaaaggttcttagcctatga

SEQ ID NO: 294325 - DNA, 1065 bp, Proteus mirabilis
atgagtaaaaaaatgacattaatacaacgggttctaattataaaactacgccatcatggtgatacgttgttaattacccctgttattaatacgctaaaagcgaattatccaaatgtggaggttgatgttttaattaacaaagaaaccgcacccatgattgagaatttctctgctattgaaaatattttttccttagacaaggcttggaaaaaagagggtaaattagctcggtttcgtcatgagtggcggttagttaatcagttaagacatcgacaatatgatgtggtgattaatttagctgatcagtggaatagtgcgcttattacccgctttacaggcgcaaaagtccgtatcggctatgatatttataaacgacaaagtcctgtttggaaaaagtgttttagtgatttaatcccattaggctcagttgataatcgacatattgttgaacaaaatttagcactactacaaccgctgtcattgcaacaaatagatacgcaagtatccatgacatacagccatcaagacaaacaggctgtgatggaaaaattaaaagcttatggtgtattaaccccttatattgtgatccagccgacgtctcggtggttctttaaatgttgggatgagcataaatggtctgaattaatagatactctacaacagcagggacatcaaattgttttaacatcagggccagactcccgagaaaaagagatggttgaaaccattattcaaggatgtaagacaaatgatagcgtctctttatcagggcagttatctttaccgcaacttggtgcattgattgataatgctgagttattcattggagttgattcagtaccaatgcatatggcttcagcactaaaaacgccactggtggcactgtttggtccatcaaaattatttcattggtcgccatggcaacatattggcgaagttttatgggcgggaaattatggagaactcccagatcctgatgatgtgcataccaacacgcaaacgcgttatttaagtttaattcctgttaaagatgtacttgaagccgtaaggagacaattaaaatga

SEQ ID NO: 294326 - DNA, 1278 bp, Proteus mirabilis
atgttgttgcgtttatatcaggtacttctttaccttattcaacctctgatttggctacgtcttttattacgcagccgcaaagcacccgcctatcgcaaacggtggggtgagcgctatggcttttgtcgaggcaaagtcgcgcctcatggcattttattgcactccgtttcagtgggtgagacacttgccgccgtacctcttgttcgtgcattacgccaccattatcccgatttacctattaccgtcaccaccatgacaccaacaggctcagagcgcgtacgctctgcatttggtgacgatgtgtaccatgtctatcttccttatgatttacccggctcggttaatcgttttcttacaacggttgatccgaaattggtgatcatcatggaaacagagctgtggccaaatcttatctcacagctttatcgtcgcaaaatcccattgattattgctaatgctcgcttatcagagcgctcagcggcgggttatcaaaaactaggtagttttgtcaaaactatgctgagaaaaattaccttaattgctgcccaaaatcaggaagatggcgaacgttttattgctttagggctaaaacgctcacatctgcatattaccggtagcttaaagtttgatatctcggtcacccctgagctcgctgctaaagccgtggcactacgtcgtcagtgggcagcacatcgtcctgtctggatagccaccagtacccatgaaggggaagaggcgattgtcttagatacccataaaaaattactggcacaatttcctcaactgttgctgattttagttccccgccatcctgagcgttttgcaaaagcagagcaacttacccaagaggccggctttaaatataccctacgcagtagcgatgctattcctgatgcacaaacccaagtggtgataggcgatactatgggggagttaatgttgctatatggtattgctgatctggcctttgttggaggcagtttagtcgagcgcggtggacataacccattagaagccgcagcccatgccattccggtattaatggggccttatacttttaattttaaaaatatctgtgccaagttagaccaagcagaagggctaattaccgtcactgatagtgactctatggcgacggcaatcgcctcattactcaatgatgaagattatcgccgctattatggacaccatgccgttgaggtacttcatgagaatcaaggggcgttattgcgcttattaaccttactctctccttatctgccaccacggagtcactga

SEQ ID NO: 294327 - DNA, 780 bp, Proteus mirabilis
atgagtgaaaataaacgcctctcggtcgtgatgatcagtaaaaacgttgctgatgttattgaagcatgtttagactcggtacaatgggctgatgaaattattgttttagactcagggagcgacgatgcaacttgccaattggcccgtgaaaaaggggctaaagtatttagcaatactccatggccggggtttggtaaacagcgacaattagcacagcaatacgccacaggcgattatatttttatgattgatagtgatgagcgtattacccctgagttaaaagccagtattcaagccgtgttacaacaacctgaaccgggtgtggtttataattgtgctcgccgtaacctgtttatggggcgttttatgaaacatagtggttggtatcccgataaagtaacccgcctttatgctcgtgaacagtatcaatataatgataatttggttcatgaatcattagaaacccaaggtgcaaccattaaaactttaccaggggatctgctgcatcttacttgtcgtgatttaatcgagttccaacaaaaacagctaaaatacgctaaagcatgggcacaagagcgcaatcagcagggtaaaactacccgttatagcgctattattagccatacactgggggcgttttttaaaacttggttactgagaatgggtattttagatggaaaacagggattaatattggcatttgttaatgcacagtatacctttaataaatacgcctcattatgggaacttagccggaaaaaccgtgaatatgaaaaataa

SEQ ID NO: 294328 - DNA, 486 bp, Proteus mirabilis
atgaaaaataaagctatctaccctggaacctttgatcccatcacctatgggcatattgatattctcactcgtgctgcaggtatgtttgacacggtgttattagccattgccgccagcgcccgtaaaaaccccatgtttagtttagaagagcgtgtcgctttagcaaaagaagtcacccaacacctacctaatgtggaagttgtcggcttttgtgagttaatggcgaattttgctaaaaaacagcaagcgaccattttgatccgtggcgtacgctcggtttctgattttgaatatgagtggcaactggcgaatatgaaccgtcattttgccccagatctcgatagtgtctttttattgccttcacaaaatctctcttttgtttcttcttcactgatcaaagatgtagcacgtcatgacggcgatgtatcgacttttttacctgaagtggttgctacagcaatgctacaaaaactcggtaagcgttaa

SEQ ID NO: 294329 - DNA, 825 bp, Proteus mirabilis
gtgccagaattaccagaagttgaaaccagtcgccgaggtattgagcctcatttagtgggcaatatcttgcactacgcgatagtgcgtaacagtaaattacgttggcctgtttctgaaaaaatcaaaaccttgctggatgaaccgattttaagtgttaaacggcgcgctaaatatctgttaattgaattaaatcaagggtggatcattgttcatttaggcatgtccggcagtgtacgtatcttgccagaagagcagcctgaagagaaacacgatcatattgatttagtgtttcgtgatggcaaggtactacgctataccgatccgcgtcgtttcggtgcatggctatggtgtgaagatttagccaccagctccgtattagcccatttagggccagagccgctttcggcgcaatttaacgcgcaatatttatatcaacaaagcaaaaataaaaaaatcgccatcaaaccatggctaatggataacaaactggtggtgggtgtcggcaatatttatgcgaacgaagcactcttttcatcagggatcatgccagatagaaaagccaatagcttaaccgagcaagagtgtgacgtattggttaatgccattaaaacggtattaactcgctcgatagagcaagggggaaccaccttaaaagattttctacaatctgatggtaaaccaggttattttgcccaagagctatttgtctacgggcgcaaagataaagcgtgcttaatttgtggtcatactattgaaagtattaagcaggggcaacgtagcactttcttttgccgacattgccaacatggtgaaataaccgattaa

SEQ ID NO: 294330 - DNA, 1269 bp, Proteus mirabilis
atgatgttgtttaaagacgatagtaaaaaatctttatggaatttatccattattggactttacattatattgatctacttacccgatatcactcgctataaaaatatagtgatggggctaattggtgcaacggcactttggtatctggtgcgtgattttcgcactattggtcagatttttaaaaataatctcgcctatgcgctgttttttttattgctcgccattggctattcagtggtgatttccgtagagccagcactgagtctaaaagagattaataagccgattttaaatggcttactgctctttgctattgcgtttcccattgtattgtataaagaaacacctacggcaattgcaaagatggtgatggtgtcattcgccatggggttattggtgattatggcaaaggagttggtgcagtattatttggaatatcagcaaaatcttttgccttttacaacaaaaagtcaattagcgcatagagaaatctcttatgcactactatttttctttcctattatactggccttatgggcattgaaaaaaaatcattcgataattaattggcttttattaagtgtggttagcctattatttttatttgcaattttaggcacattagcacgcggggcttgggtcgcattagcgattagtacattacttatcttaatcattaatcgccagtggatatttactttactcagcatgggtatctgcgttgcgctctttttcggtgtaacacaattacctaataaccaatttattaacgccaaacttaaatataaactatcgcaaaccaatagcggactaagatttgatggaggcacccaaggctcagccttagatttgatcttagaacaacctattaaaggctatggttatggtaatcagctttatcataatgtttataatcagcaagtaaaacagcataaaaactgggtatttaaaaaatccattggcccccataatgtatttttagctttctggtttgccggcggtattttggggttaataagtctaatctatttctgcgcgtcttttatcgctcaaggtattcaattgatccgcaaaaatcaggggattattcgccaagcagcgctggtgttattaatatcgtttttaggggtttatgtactacgtggattatttgaaaatgcctatattaatcaagtgggtattttattagggttaatgttagcattgcgctattcattattaaaccagcctttagatacaccgaaaaaagaagacaaatccgttagctaa

SEQ ID NO: 294331 - DNA, 1179 bp, Proteus mirabilis
atgatgaaaatcgcctatcttgatccttatcccgttcccgatttgcgtgtggcttcattgcaaatattgcaaaacgttgatgcgtttgcccgtgccggtgcacaagtgacgctagtcacccctaaaggacagtatcgagatagcgatattctcgggcgtgatattcataacaatgcgcggttaattgcgctaagagatatcagacgtaaatggtattttccctttaattcgcaaaagctattttcattacaaattgcacgttggttaaaacaacaccctgttgatgcactatttacgcgtaatttaaaactggcctgctatctggctgagaaccatgcagatattccgctttttttcgaaagccatgagatttttgcgcaatcttttgcagagtcgcactcttttgaaacgaaaaaaaatcgcctgaaataccataaactgctaaaaatggagaagttggtatacagtcgcgcaacggcagtatttgtgctgacctcgctgttaagggacgatattatttcgcaatatcaagtaaccacgcctattactattgtacccgatggggtggatttatatgccgcagatagcaacaaagatagccatagagatataaccgctacgaccaataatgtaacagaggtactttatctaggtagtttgcataaatggaaagggatccccaccatgatgcgagcgatgaaatatctggataacgctagactgaatattgctggtggaacggctgagcaaattaaagggctgcaattgcttgctaaggagatggatgtaaaagagaaagttaactttcttggttttatcgatcctaaacaacgctttcaggcgattgctcaacatgatatttgtgtgctgcctttaaccttaaccagtatcggtagtcgctacacctctccgttaaaactgtttgaatatatggcgatgagaaaaccggtggttatttcagattttccatcaattcgtgatgtggtggatgaaaaagcggtgagttttgctgatagtggtgatgcgcagagttttgcccaacaaattaaattactaagagaagagccacaacgtaccagtgagaaaatcaatcacgcccgctcattagttgaaaattattacaactgggataaacgggcagagacgattttacataccatcaataaactgattagctaa

SEQ ID NO: 294332 - DNA, 1107 bp, Proteus mirabilis
atgaagattggcttaattgatgtcacaatcacaatgtcttatggtgggatccaaaccgcagtatgggagcttgccaaacagttacatgatgcgggacatgaggtacatctttatgggggcaatggtgatgtcaggcatgaactagcaggccgacaaattcatattcatacctatccttatacaccaagagagaaagttatcgatctcggtggtcgttttcgtcgtattgttgaacgttatagttttgctcgctatgctaaacaagatgttattcgacaaaattttgattgggttattttaactaagccgtttgatttcttttggcctgcaatgatgcccaaatcttgctcgacacgtttttgttatatgagtggtggcaccagcttttttaaaggcgatcgtaaactggcgaaaaaaatctctgcctgggttgcgtgtagccattttaatgcttggcaaattcagcaacattttaaacaatttcctgcggttatctataatggtgttgatatggcaaagtttaagcctatgacaacatctttgcgccaacagctcggggtgagtgatcctacgtttttattggcatttgcggggcgtgtagtcggttggaaaggcttaagtgttgctattgatgcaatagcccaattgcgagatgaagacgttaagttgctgatcatcggcgcgggtgatgcgctggaacaattaaaaaataaagcgatggtaaaaggtgttgctgaacaagttatttttcatcaacccgttgagcacgcaatgttacctgagttttatgccgcttgtgacgcgggagtttttccgagtatcggcgatgaagcatttgggatcaccattgcagaagcaatggcatgtggaaaaccggtgattgccagctatatcggcggtattcctgaggtggtaggcaatgagcaaagtgcaggattattggtaaccccaggtgatgtaaccgcgatggtgaaagccatcaaccatcttcgggcattgccggatagaggtaaagcaatgggtgaaaatgcacgccaacgcattgcttctcactatacttggcaacattcagcacaacgattactacaggcattaaaaacagaatga

SEQ ID NO: 294333 - DNA, 1002 bp, Proteus mirabilis
atggatccaaaaaacatattggttatagcaattgcgcgttttggtgatacgttactgatcacgccggtgatccacgcactaaaagagcgttggccgaatgcccgtattcatgtattggcgcataaacgcagtgcctgcattttgcagcacaatcctgatatttttagtgttaagcctttctcgaaaaagcgcgcccgttggcgaggatggttaccccataaaccttatgatttagctttggtatatggaaatgatcattcattagtgcagtatgcccgccgtcaatcacaacatgtagtggcttttgctgaaaataaccaaaagcaatcaggcataacatgggtggcttaccctaaagagttaatggtggcacaaaaagagcgtgctttattaattaatgcgttaggaatttacccaaccaattggcaattacgctactctattagttcagaagaaaagcaatttgcccaacagtttatagagagtaatgcattaattaataagcacattattggcttacaattacaaagttttcctgccaaagcttaccgagattggcctatagaacactttttgcagttagccaaacagataatgactcatgacgagcaggcctattttctgttattaggtgggaaagagagccaacaagtcgccattgagctggcgaaaaaaataggtactgagcattgtttggcattagcagggcaagtcactatgcgcgaaaatgctgccattatggcgcatttgtcgctctatatcggggttgatacagggccgacgcatttagctggcgcgttagatattccgatggtagctatgtatcacagctatcatcccggatgttatttagcgccattacaacattcatgttgtcatattatccaacatcctattgcgttagccgatgcaagtcgtgaagatagtatgtctgatatttctgtcgccaatgtttggcatgccgttagcgatattttaaatggaataaaggtgaaacagtaa

SEQ ID NO: 294334 - DNA, 1128 bp, Proteus mirabilis
atgagtaaatcggtgttatctatcttacatacagagtcgtcttgtggttggggtggtcaagaaatccgcattttgacagaatctcaaggcatggtgcaaagagggcaccatgtgacactggtttgctgtccaaactcaaaaattgccaaagcagcccctgactatggtattgaggttgtcacattaccgattgaaaaaaaacgcggatctgcactgatggcattgcgtaattggttaaaagtccatcgtcagcaatttgatgtgattaatacccatagctcgacagatgcttggttagttgcgctatcttgtgcttcattacgccactctcccgccatagtacgtactcgccatgtatctaccgatgtatcacgttcactgcccacgcgttggctctacctgtcttcaagtgcccatattgtgactaccggtgaaaaattacgccaaaccttacatcaatataatcgttttccgctcagtcaaatgacctcagttcctacggggatcgatttagaaaagttctcgccacaaaataaacagcaagcacgagaaaaaataggtgtgcctaataaacctacattagggattgtggcaacaatgcgggtatggaaaggacataaatacctaatagaagcatggaaaacattgcatctgcaatttcctgactggcaactacttctcgtcggagatggcccacaacgtaaaaatttacaaccgatggttaaacttgcaggattagaagagagtgtctttttcttaggcaaccgcaatgatgtgccggattgcttaaatgcaatggatttatttgccttaccctcttttggtaacgaaggggtgccacaaggtattatgcaagcgatggcttgcggattaccggtggtatcaaccacagtaggtgcaattagtgaagcggtgattgatggtaaaaccggctttacattggcacctaaagtacaagaaaccctaattaattaccttgctaaattaatggcctctgatgagttacgtcaacaaatggggcaagcgtcattagcccatgccaaagctcagtttggtttagataacatgctagataaaatggaaaaaatatttattaacgccattagccttaaagataaatcacgataa

SEQ ID NO: 294335 - DNA, 168 bp, Proteus mirabilis
atggctaaaggtattcgcgagaaaattaaactcgtttcttctgctggtacaggtcacttctataccactacgaagaacaaacgcactatgccagaaaaactggaaatgaaaaaattcgatccagttgttcgtcagcatgtgacttataaagaagctaaaattaaataa

SEQ ID NO: 294336 - DNA, 237 bp, Proteus mirabilis
atgtcccgagtctgccaagttaccggcaagcgtcctgtgagtggaaacaaccgctctcacgcattaaacgcgactaaacgccgttttctgccaaacctgcactctcaccgtttctgggttgagtctgagaaacgtttcgtaactctgcgtgtatctgctaaaggtatgcgtgtgatcgataagaaaggcatcgaatctgtattagcagatttacgtgcccgtggtgagaagtactaa

SEQ ID NO: 294337 - DNA, 672 bp, Proteus mirabilis
atggaaaacgcaaccatagagacactcttaccgagagaaaaactgctgttgcatggtgtagaatcgttaacggatgcagagttattggccatttttttacgtacaggcacctatgaaaaatcggtattagaattagccgactttttacttagaaagtgtggttctctctatcatgtgatcaatgcggattatgaaacattaggctgttttaaggggataggtgtgggtaaatttacccaattacaagccattaatgagatggctcaacgctttattaaaacaaagtttatgcataaaaatatcctctcctcatccgcagaaaccaaaagttatttgcaaaaacgccttaattggcgtgatagagaagtatttgtcgtgctatttttagataaccaaaaccaaatgctcgattgtgaggaaatgtttaaaggaacggtggatcgtgttgaagttcaccccagagaaattattcgccagtcgattaaaaagaacgctgcatcgattattttagcccataaccatccttcaggtctgtctgagccaagtcttgccgataagcagataacagaaaaaatttttacagcctgtcaattagtcggtataaaagtgcttgatcaccttgtggtagggcatgataactgtgtttcttttgctgaacgaggttggttatag

SEQ ID NO: 294338 - DNA, 1209 bp, Proteus mirabilis
atgactacacttcacgacaaaaagattattctgggtatcagtggtggtattgcggcctataaagcgcctgagctagtccgtcgtttacgtgataaaggcgctattgtgcgcgtcgttatgacgcctgcagcacatgcctttgtcaccccgttatcactacaagcggtatcaggcttccctgttgcggatgatttgcttgatcctgccgcagaagccgcaatgggacatatcgaactaggaaaatgggctgatctgattttattagcccctgctaccgcggatttgattgctcgtttacgcatggggatggcaaacgatctgttaaccacactctgtttagccagtgcagcacctattgcgattgccccagcgatgaatcaacaaatgtatcgtgcgacgattacacaagaaaatttaacggctttggcacaacgaggttgtcttatctgggggcctgactctggtagccaagcctgtggtgatgttggacccggtagaatgttagatcctcttgaattggtggcattagcagagcaacaatttgcaattcaacacgattttaaaggtaaaaaaatcaccattaccgcaggcccaacacgtgaagccttagatccagtacgctttatcagcaaccatagctcaggaaaaatgggctttgctattgcgcaagcggccgctcaacggggagcagaagtgacactcattgccggccctgtcacattgccgacacctgcttgtgttaaacgtatcgacgtcgaaagtgcccaagagatgtatcaacaagtgatggatattgcgcaatcccaagatatttttattggttgtgctgccgttgccgattatcgagccaaacaggttgcccctgaaaaaattaaaaaacaaggtgatgaagtaacgataactatgataaaaaaccccgatattgttgccagtgtcggaaaaatggttgagcatcgcccatttgttgtcggatttgcagccgaaacccagaatgtggaagaatatgcccgccgtaaacgagaacaaaaacaactcgatttaatctgtgctaatgatgtatcactaaaagatgctggttttaatagtgataacaacgcattacaccttatctgggcaaatggagaaacgcgtttaccacatagtagtaaaacgcaactgagtcatcgcctacttgacgagatagccaaacattatgatgaaaaaaattga

SEQ ID NO: 294339 - DNA, 459 bp, Proteus mirabilis
atgatgaaaaaaattgacgttaaaatccttgatccacgaattggacaagagtatccactccctgcgtatgcaacaacaggctctgctggtttagatttacgtgcttgccttgatgctccactggtattagcaccaggacaaactgagctgttacctacaggtcttgctgtacatattgctgatgaagggttagcggcaatggtgcttcctcgctcaggcctaggtcataaacatggggtggtactcggtaacttagtgggattaattgattctgattatcaaggtcaactgatggtatcggtatggaatcgtggtcaacaagcgttcactattgaacccggcgaacgtattgcccagatggttatcgtacctgttgttcaagcagaatttaatattgtagaagattttacggcaacagagcgtggtacaggcggttttggacactctggtcgccaataa

SEQ ID NO: 294340 - DNA, 606 bp, Proteus mirabilis
atggcagaagaaaaagaaaccaaaaagaaacgcagaaatagacgggatgaaatactacaatcgctcgctcaaatgttggagtctagtgatggtagtcaacgtattactacagccaaattagcggctaccgttggggtatctgaagcagcactttatcgacacttccccagtaaaacaaagatgtttgatagcctaattgagtttatcgaagatagcttagtttcgcgtatcaacctgattttaaaagatgagaaagaaactatcgcacgcattcgccttattcttatcttgatccttggctttgcagagaaaaaccctgggctatctcgcattcttaccggacacgcattaatgtttgagcaagatagattacaagggcgcattaaccaattgtatgagcgaattgaagtacaacttcgccaagtgattaaagagcgtaaaattcgcgaaggaagtgcctttttacatgatgaagcactactcgcttcacaactgcttgcgttttgtgaaggtatgctagcacgttttgtacgtactgaatttcgttatcatcctacacaggaatttgaagcacgttggccattaattcaggcacaattacagtga

SEQ ID NO: 294341 - DNA, 645 bp, Proteus mirabilis
atgaaagcctaccagcgccactttatcgaacttgcattagcaaaaaatgtattaaaatttggtgagtttacgctgaaatcaggtcgtgttagtccttacttttttaatgcaggtttatttaatactgggcgtgacttggctttattgggacagttttatgcacaaacattaatagataatcatgtgccttgtgatgtgctgtttggaccggcttataaaggtattcccatcgcgacaacgaccgcagtggccttagttgaacatcatgatatggatgtaccttactgctttaatcgtaaagaagctaaagatcatggtgaaggagggacattagtcggcagtccattaacagggaatgtggtgattgttgatgatgttattaccgctggaacggctattcgtgaatcgatggaaataatcaaacaacatgatgcgacgctgtcaggggtattgcttagtttagatagacaagaaaaagggcgtggttcgctttctgcaatacaagaattagagcgcgattatcaatgccaagtttattcaattattactttggatgatttaattagctacttaactgaaagtgagacattatcggcacatttgccagcagtaaaagcctatcgtgaacgttatggcattaattaa

SEQ ID NO: 294342 - DNA, 717 bp, Proteus mirabilis
atgcgtccagcagacagacaagcagaccaagtacgtccgattaccattactcgccactatacaaaacatgctgaaggttctgtattagttgaatttggtgataccaaagtcttgtgtaatgccactgtagaagagggtgtacctcgttttcttaaaggacaagggcaaggctgggtgactgcagaatatggcatgcttcctcgcgccactaacagtcgtaatgctcgtgaagccgctcgcggcaaacaaactggccgcacaatggaaatccaacgtttaatcgctcgctcactacgcgccgctgtggatttaaaggccttgggtgaatttactatcacggttgattgtgatgttattcaagctgatgggggtactcgcaccgcctctatttctggtgcttgtgtcgcgttagtggatgctttaaataaaatggttacagaaggtaagctgaaaaagagccctcttaaatcaatggtagccgctgtttctgtgggtatcgttgatggtcaaccattatgcgatttggaatatgttgaagattccgcagccgaaacggatatgaatgtggtgatgatcgatgatggccgtatgattgaagtacagggtacggcagaaggtgcaccatttagtcatgaagagttacttgctttactcgcccttgcgaaagggggattagaaaaaatatttgaagcgcaaaaagaggcgctaaagcaataa

SEQ ID NO: 294343 - DNA, 864 bp, Proteus mirabilis
atgatccgtagtatgaccgctttcgctcgtcgagatatcaaaaaagagtggggtagcgccgcatgggaactgcgttccgttaatcaacgttaccttgaaacatatatccgtttacctgagcaattacgtagtttagagcctgttattcgtgaacgtctacgtaatcgcttaacacgcggtaaaatagaatgtaacttgcgttttgaactcaatgctcactcacaaggtgaactgactttggatgaaaatttagcaaggcaactgattgtttctgctaactgggtaaaaagccaaagccatgaaggtactatcagcccatttgatattttacgttggcctggggttatctcagcccaagagcaagatttagatgccattggtagcgaactattagcagagcttgatgtagctatcgatgcctttattgcaagtcgagaagctgaaggccaagcactcaaaacgctgattgagcaacgtttagatgccgtaagtgctgaggtcgtaaaagtaagagcacagatgccagaaattctccaatggcaacgtgagcgcttaaccagcaaattagaagaagcacaagttcaagtcgataataatcgtttagagcaagaattagtgatgttagcgcaacgcttagatgtcgctgaagagcttgatagattagatgcccacgttaaagaaacacgcaaaattctcagtaaaaaagaggctgtcggtcgtcgccttgattttatgatgcaggagtttaatcgtgaatccaatacactagcatccaaatcaattaatacggatgtcaccaattccgctattgaattaaaagtattaattgaacagatgcgtgagcagatccagaatattgagtaa

SEQ ID NO: 294344 - DNA, 222 bp, Proteus mirabilis
atgcgtacatatacctcgacacaagcccgagccaatatttcagaagtattagatattgcgacccacggtgaacctgttgaaatcacccgcagagacggttgttcagcggttgttatcagtaaaactgaatttgagtcataccagaatgctaagctagatgcagagtttgatatgatgatgcaacgtcatggacataccgtagaggcactgacaaatcgatga

SEQ ID NO: 294345 - DNA, 384 bp, Proteus mirabilis
atgatatgggttagcgcacaggaagttatcgctttccatgatcgtatattacaacgtttcccaggtgtggccggtatgcccgatcctggcagagcggaagctcttatttaccgggtgcaaaaccgtaaacattatgaaggcattacagatgtgtttgaactggcagcaacttattgggtcgctatcgctcgagggcacatatttaatgacggtaataaacgtaccgcattttttgtgaccatgacatttctctatcgtaatggcatcaggatccgcgatactggcaatatgctggaaaacttaacagtagaagcagctacaggtgagaaaaccgtcgaccagttagcaaaacatctacaaaacttggtagagaaaactaactaa

SEQ ID NO: 294346 - DNA, 315 bp, Proteus mirabilis
atgaataccatcgaatcaacaacaaagcgcactgctgtcgtttttccaaaacataaaaaggtgttaagcattttgggcgagaacttaactctagcaatgaagcgacgtggtattacccaagaaatgatgcataatcgaacaggattgtctaaaccaacgctacgaaaaatcctaaaaggcgatccttccgtttcgcttggtcactatgtcaacgtattagcctccttaggcctcttagaagacttaaccaaagtcgcctttgatgacgaattgggaagaaagctgcaagacatccaattgctgaaaaaaaaataa

SEQ ID NO: 294347 - DNA, 132 bp, Proteus mirabilis
atggaaatctacgtttatgctgattggactgaatcaactgaccctgtattagttggtacattacgatcatcagaaattagaggcaaagaacatttcagctttagtttatttatattgcgcttatttctataa

SEQ ID NO: 294348 - DNA, 900 bp, Proteus mirabilis
atggctattgaccttagcaatcttgtcacggaaagtcgcaatcatcacagtgaacatattgatacactttcaacacttgaaatgctaaaagtcattaataatgaagataaaaaagtgccttttgcggttgaagccacattaccccatattgcacggctggtggataaggtcgtaacagcattttctcaaggtggtcgattaatttattgcggtgcaggtacttctggtcgtttgggaattttagatgccagtgaatgtcctccaacctatggaaccccccatgatatggtgattggcttaattgccgggggacacaaagccattttacaagcggttgaaaatgcagaagataatgtccaattgggggcagaggatttacgccagcttaattttaatgctaaggatgtactagttgggattgcagccagtggtcgaacgccttatgtgattggcgcattagaatatgcacgctcactaggtgcggtgaccggggcaattagttgtaatcctgatagtcccatagcgcaacgtgccgatattgccattacgccgattgtggggcctgaagtggtaactggctcatcacgtatgaaagcaggcacagcacaaaaactggtattaaatatgataaccacaggtgccatgataaagatgggtaaagtgtttggtaatttaatggtggatgttgaagccactaatgccaaattaattgagcgccaaattcgtattgtgatgcaagcaacagagtgtgatcgagctactgctgaacacgcactagcacaatgccaacgtcattgtaaaacagcgattttgatgattttagccggcgtagatgcacaacaagcaacacagttgttggcgcaaaataaagggtttattagacaagctctagctaaatga

SEQ ID NO: 294349 - DNA, 738 bp, Proteus mirabilis
atgacatttattaaatctatttcgacctttatcagtctaataacacttttttgctcattttctttacacgctaatttcgaagagcaagataaaaaattatttgaagatacccgcaaagaagcactaaaccataatgcactcgctcaatatcagttagccgaaatgtatttactgggggatggcgtagaaaaaaacctgctaaatgcacagctgtgggcaaatgaagcaataaaaagtggctatgccgatgcctatgcgctccttgctgacatttacctctttaatgccgacccttattttaaaagctattatgtcgaagcaaaagagttagccaccactgccgttaataaaggaagcatgagaggaaaaatcagcttagcaaccgcgcttattgcccctttatctggtgaagtagattatcagcaagcgatggtattacttgaagaagccacacaagcacatcaacaagaacttgtttatgcccccatttggttaggtattttatatagtggtataggtaatattcctgtcgatatggaaaaaaccaataaattatttgcacaagccaatgaaatgacatttgaaggatttgctcaagcaatggcctcttttatgttctcaggtcaatatcatattatcgagcccaacaaacaaaaagcagatgcatttatgaaacaagcctgtgaagaagcgagaaaagttggcaatgaattttattgccaaccagaattaaattaa

SEQ ID NO: 294350 - DNA, 459 bp, Proteus mirabilis
atgagcacaatatcgatggcagtttccgttcaacttattgagcaagagcattatgctcaatggttaccatattggttaagttatcaggaattttataacgttgaattatcagaaaagataacattaaaaacatgggcgcgcttttttgatgagaaagaaccgatttactgtgctgttgcaacagatggcaaaaaaatactgggttttgttcattatctttttcatcgttcaacttgggctgaaagtgatttttgttacctcgaagatttgtttgtttcacctgaagctcgtggttgtcatgtggggaaaaaattaatcgattttgtaaatcaacaggctaaacaacgtaattgtgctcgtttgtactggcatacacaggaaaccaatttacggggtcaacgtctgtatgattgggtggctgaaaaaccaggtgtaattgaataccgtatggcgttgtaa

SEQ ID NO: 294351 - DNA, 1488 bp, Proteus mirabilis
atgaaacagaaaccaacagcttatttccctaaccttgtattagaagaagggtctattagctcacaagtctattacgccgttagaaaggctattttagaaggtgttctatctccgggtagccgtctaccgtcaagtcgcacattggctgaaatgatgtcgatttctcgcaattctgttattgccggatttgaacgtttaattgatgaaggctatttatttactcgtcgcgggtcgggcacttttgttacgaataccattcctgatagcattaattccaatcagtgggttaaaacaaccctgccgacgtcttcattgcatatcgataatgaattaggaacacttaatcctaatttgcaaaagatgcatgctttttggcaacaatcacaactaaataccaatagtcgctttatgtttcatgtgggtgttgggtgtattgatcttttcccccatgagctttggggaagattattaggacgagtttggcgacactccaaaaaagaactcgcaacctttaactcgccaacaggctatacaccattaaaaaagatgatatgccaatatgcccaatcaacacgtgggcttaactgtcaacctgagcaagtcatcattgtcaatggcacacagcaagcgattaatcttgctactcgagtgctattacaagagggagatactgcttggttagatgatcctggttatgacagcgctcgagctatctttacatcgtatggtataaaaatacaccccgttcgttcagatagtgacggtatggatatttctcaagctatagaccaatgcccgcaagcaaaactagttttcaccacaccttcacatcaattccctttaggtaatactctttcactttcacgtcgtattgccttattagagtgggcatcgtccaataacatgtggatctttgaagatgattacaatagcgaatttcgctatcacactaaacccattcaagctctacaaggattagacaaacatcagcgggttatttatgccggaaccttttcaaaaatgatgtacccaggatttcgtttaggctttttagtggtacctccatctttaattgacagctttaaagtcgctaaatactacaccgactctcattctggttttttagaacaagcaacattagcgctatttatatctcaaggacattatgctcgccatgttagacggatcagaaaagcctgttatgaacgttatctaacgttaaccaatacgataaaaaagtatctctctcacatttttcgtattgaaccgactgattctggcatccatattgtctgctggttacagtctggttatacagaagaatatattgtgaaagagggacggaaaattgggttagccatacagcctttatcgcgttattgtattcaatcttatcctaaacagggtatattattagggtatgccgcacaccatccctctgaaattgaaaaaaatattattttgcttgctcaagctttatctaaataa

SEQ ID NO: 294352 - DNA, 570 bp, Proteus mirabilis
atggatttatcaacctactttccattatcaacctattattcatatttaaagcggtttgtactgtctcctaccacaatgggaactattgcgccttcatcacgttggttatgttatgaaatgctcaataaattaaattggcaacaagatatccaaatcgccgaattaggtgcgggtactggggtgattacgcaacagatcttaaaacgtatgtcatcaaactcggtattagatgtttttgagatagagccggcattcgctaatgagctgaataagattaatgatccccgtttaaccatctatacagcgtcggctgaaaagttagatagtcattataatatgattatttctgggttgcctttcttgtctattaacagaaggttagggttaaaaatcttaaagcgggtacatagcgaattattaaaaacccaaggttgttttgtgttgtttcaatataccactcgatatgaaaaaacattatctcgttattttcatttagagaaaaaacgtgtgatgttaaatgtaccgccagcttgggtttattattgcacgcccaaaaataaaatagggtaa

SEQ ID NO: 294353 - DNA, 1107 bp, Proteus mirabilis
atgaaaaatgttggttttgtgggctggcgtggtatggtcggctccgttttaatgcaaagaatggttgaagaacgtgattttgatgggataaaccctgttttcttcaccacttctcaattaggtgaagcagcacctgcttatggcaatcatcgtagtacactgcaagatgcttatgatattgatacgctcgcctcactcgatatcattatcagttgccaagggggtgattacacccatgatatttatcccaaattacgtcaagcgggttggcaaggttattggattgatgcagcatctgcactacgcatgaatgatgatgcggtgattattcttgatcccgttaatggtcaacatatccaagatagcctcaataaaggtattaaaacctttgtgggggggaattgcaccgtaagcttaatgttgatgtctttgggcggactttttgctaacgatttagttgaatgggctagtgtctccacttaccaagccgcatccggtgcaggtgcgcgtcatatgcgtgaattattgtcacaaatgggtgcattacataaccaagtggttaaagagctagaaaatccagcctcggcaattttagatattgagcgcaaagtcactaactttactcgcagtggtactatgccgacagagcaatttggtgttccactggctggtagcttaattccttggattgataaacaattggaaaatggccagagccgtgaagagtggaaaggccaagctgaaaccaacaagatcttaaacaccggttcaaatatcattcctgtggatggtctttgtgttcgtataggtgcattacgttgtcatagccaagcattcaccttaaaactgaaaaaagatttgccggttaacgaaattgagcaattacttgcccaacataatgattgggtaaaagtagtgccgaacgatcgtgaattaacaatgcgcgaattaaccccagcagccgtaacgggcacattaagtacccctgtaggacgtattcgtaaactgaatatgggacctgaatttatttctgcctttaccgtgggtgatcagttgttatggggtgctgcagagccacttcgtcgtatgttgaagattttagcttaa

SEQ ID NO: 294354 - DNA, 2415 bp, Proteus mirabilis
atgtcgaatacatatgactcctcaagtatcaaagtattaaaagggctggatgcggtgcgtaagcgcccggggatgtatatcggggatacagatgatggaaccggtctgcatcacatggtcttcgaggtggtcgacaacgctatcgacgaagccctcgcgggttactgtgatgagattattgtcactatccattcagataactcagtctctgttcgcgatgatggccgtggtattccaacgggtattcatgaagaagagggcgtttctgcagcagaagtgattatgacggttctgcatgcgggtggtaaattcgatgataactcctataaagtctctggtgggctgcatggtgtaggggtttccgttgttaatgcgttgtctgaaaaacttgaactgactatccatcgtgatggtaaaattcatcaacaaatttaccgttcaggtgtacctgacgatcgcttaaaagtgattggtgaaacagataagtcaggaacctttgttcgtttctggccaagtcttgatacctttaaaggtgagactgaattccaatatgatattttagcgaaacgtctgcgtgagctctccttcttaaactcaggagtctctattcgtttaattgataaacgtgataaccgcgaagatcatttccactatgaaggtggtatcaaagcattcgttgaatacttaagccgtaataaaacgcctattcaccaaaatgtattctatttttctacagagaaagatggcattggtgttgaagtggcgatgctgtggaatgatggtttccaagaaaacgtttattgctttaccaataatattccacaacgtgatggtggtactcacttagttggtttccgtaccgcgatgactcgtacgctaaacaactatatggataaagaaggctttaataagaaatcgaaaatcagtgcaacgggtgatgatgctcgtgaaggcctgattgcggttatttctgttaaagtacctgatccgaaattctcatcacaaacgaaagataaactggtttcttctgaagttaaaacagcggtagaaacgctgatgaatgagaagctggtggaatatctattagaaaatccgactgacgcaaaaattgttgtcggtaaaattattgatgctgctcgtgcccgtgaagctgcgcgtaaagcacgtgagatgacgcgtcgtaaaggcgcactcgatttaggtggtttaccgggtaaattggcggactgctctgagcgtgatcctgctttttctgaactctacttagtggaaggggactctgcgggtggctcggcaaaacaagggcgtaaccgtaaaacgcaagccattttaccgttaaaaggtaagatcttaaacgttgaaaaagcgcgttttgataagatgctggcatctcaagaagtggcaacgcttatcacggcattaggttgtggtattggccgtgatgaatataacccagataaactgcgttatcacagcattattatcatgacggatgcggacgtcgatggttctcacattcgtacattattactgacgttcttctatcgccaaatgccagaaattatcgaacgtggtcatatctttattgctcagccacctctctataaagtgaaaaaagggaaacaagagcaatacattaaagatgatgatgcgatggatgaatatctgatgtctattgcgcttgatggtgcagcgctttacgtcagtgaacatgcccctgctatgcatggtgcacaattagaaaaactggttgttgactaccatgctgcgcataaaattattcgtcgtatggagcgtctctatccactgagtatgttaaatagcttggtctatcactcaacgctgacagaagatgatctctctgataaagcgaaagtggaagagtggatgagtggcttggtgaaccgtttaaataacgcggaagagcaaagcagtacttacagctataccatcacacaaaacgaagaaaatcgtttatttgagccagtattacgcattcgtacttacggtatcgatacagactataaattggattacgattttattcatagtagtgaatatcaacgtattactaatttgggcgatattattggtaacctgattgaagaaggagcctatattgagcgtggagaacgtcgtcaggcgatttcaagctttgaagaagccctagaatggttaaccaaagaatcacgtcgtggtcttgctgtacagcgttataaaggtcttggtgaaatgaacccagaacaattatgggaaaccaccatgaacccagatacgcgtcgtatgatgcaagtcactgtgaaagatgcgattgctaccgatgagttattcacaaccttaatgggtgatgctgttgaacctcgtcgtgcttttatcgaagaaaatgcactaaaagcagaaaatatcgatatctaa

SEQ ID NO: 294355 - DNA, 1089 bp, Proteus mirabilis
atgattttatcccgtttattgatccgccattttagaaatattgaacaggctgatttgccattagcggatggttttaattttcttgtaggaccaaacgggagtgggaaaaccagtatacttgaagcgatttacacattaggccatggacgggcatttcgtagtgcccaagcgaatcgagtgatccagcatgatgaaaatgcgtttattttacatgggcgattaagtggccttgatgaagaaagtcgcggttactcgattggtttaagtaaagatcgcgagggtaacagtacggtacgtattgatggtagcgatgggcataaaattgcagagttagcgaagttattaccgatgcaattaatcacccctgaggggttcacattacttaatggtgggcctaaatatcgtcgtgcttttatcgattggggttgttttcataatgagcctcgattttttgctgcatggtcagatttaaaacgcgtcttaaaacagcgtaatgcagcactcaggcaagcgtcgtcttatcgacaactcttaccttgggataaagagcttatcttactgacagaacagataagccaatggcgagctgaatatacagaagatatcgccaaagatattgaagaaacgtgccaattatttctccctgaatttaccttgaaagtcagttttcaacgaggatgggataaagaaaccgattatgcacagttgctagaacgtcaatttgaacgtgacaaagtgttatcatatacctcgttaggtgctcataaagcggatttacgtattcgtgctaacggcactccggtagaagatatgttgtcacggggtcagcttaagttgttaatgtgtgcattaaggctggcacaaggtgaatatttcactcgtaagaatgggcaaagatgcctgtatctgctcgatgattttgcttctgaattagacgcaaatcggcgccagttgttagccgagcgtttaaagtctacgcaagctcaagtgtttgtcagtgcaatcacttctgggcaagttaaagatatgctagatgtaaatagcaggctatttagcgtagaacatggcaaaatagaggttaaaccatag

SEQ ID NO: 294356 - DNA, 1104 bp, Proteus mirabilis
atgaaatttatcattgaacgagaacagctgctaaagccgctgcaacaagtcagcggccctttaggcggtcgcccaactttacctattttaggcaacctgttgcttaaggtgacggagaataccttatcgctaacaggtacagaccttgagatggagatgatggcaagagtgagtcttagccaatctcatgaaatcggtgcaacgactgttcctgcgcgtaagttttttgatatttggcgcggattacctgagggagcagaaatcagcgtagaattagacggtgatcgcttactcgttcgttcaggaagaagtcgtttttctttatcgacactccctgcgtctgatttcccgaatttagacgattggcaaagtgaggttgaatttactttgccaaaagccactctaaaacgtttgattgaatccacacagttttcaatggcgcatcaagatgtgcgttactacctcaacggtatgttatttgaaacggaaaacacggaattgcgcacggttgctactgatggtcaccgtttagcggtctgtgccatggatattggacaatctttacccggacattctgttattgtgccacgtaaaggtgttattgaactgatgcgtttacttgatggcagtggtgagagtttattacagttacaaattggcagtaataatttacgcgctcatgtaggcgactttatttttacctcgaaactggttgatggtcgtttccctgactatcgccgcgtattaccgaaaaatccgactaaaacagttatcgcaggttgtgatatcctcaaacaagcgttctctcgtgcggcgattttatcgaatgaaaaattccgtggggtgcgtattaacctcactaatggacaattaaaaattaccgctaacaaccctgaacaagaagaagcagaagaaattgtcgatgttcagtatcagggggaagagatggagatcggttttaatgtgagctaccttcttgatgtgttaaatacactcaagtgtgaagaggtaaaattattactgactgatgctgtttcaagtgtacaggttgagaatgtggcaagtgcagctgcagcttatgttgttatgccgatgcgcttgtaa

SEQ ID NO: 294357 - DNA, 1401 bp, Proteus mirabilis
gtgtcactttcgctttggcagcattgtcttgcccgattgcaggatgagttacctgccactgaatttagtatgtggatacgtcccttgcaggcagaactaagcgataacacgctggcactgtatgcacctaatcgttttgtgttagattgggtaagagaaaagtacattaataatattaatgcgttattagtcgacttttgtggttctgatgtcccttcgttgcgttttgaagtggggaataaacctgtatcagcacgtaccaccgagagtgttcccaaaaccgtgacacatcccgcggttaattccacaccgactaacagccagcctgtgcgtccaagctgggataatcaaccgcaatcccagttacctgaacttaattatcgttctaatgtgaatcctaagcataaatttgataatttcgttgaaggtaaatcgaaccaacttgctagagctgccgcaagacaagttgctgataatcctggaggagcttataacccactgtttttatatgggggaacgggtctgggtaaaacgcatctattgcatgcggtgggcaacagtattatggaacgtaaagccaatgctaaagttgtttatatgcattcggaacgtttcgtgcaagatatggtaaaagcgttacaaaataatgctattgaagattttaaacgctactatcgctctgtagatgcgctattaattgatgatattcaattttttgccaataaagagcgttcacaagaagagttttttcatacctttaacgctttgttagagggaaatcagcaaattattttaacctcagaccgttatcctaaagagattaacggggtagaggatcgattaaaatcgcgctttggttggggattgaccgtagccattgaaccaccagaattagaaacgcgtgtggcgattttgatgaaaaaagcggacgaaaatcaaatccagttacctgatgaagtggcgttttttattgctaaacgactccgctctaacgtccgtgaactagaaggtgcattaaaccgagtaatagctaacgcaaattttaccggtcgagccattaccatcgactttgtgcgtgaagcattacgtgatttactcgcattacaagagaaactcgttactatcgataatattcagaaaactgtagcagaatattataaaattaaggtagcggatttgttgtcgaagcgacgatcccgatcggttgcccgtccgaggcaaatggcaatggcgctggcaaaggaattaacaaaccacagcttgcctgaaatcggggatgcctttggtggtcgtgaccatactacggtactgcatgcttgccgaaaaatagagcaactgcgtgaagaaagtcacgatatcaaagaagatttttctaacttaatcagaacattatcatcctag

SEQ ID NO: 294358 - DNA, 144 bp, Proteus mirabilis
atgaaacgcacttttcaaccgtctgtactgaagcgcaaccgtaaccacggcttccgcgctcgtatggccactaaaaatggtcgtcaggttctggctcgccgtcgtgcgaaaggccgcgctcgtctgaccgtttcttcgaaataa

SEQ ID NO: 294359 - DNA, 327 bp, Proteus mirabilis
ttgttaactcccaagcatttcaattttgttttccagcagccacagcgtgcgagttcaccagaagttacaattttgggtcgccagaatgagctggggcatccccgcatcggtctaactatcgcaaagaaaaacgttaaacgtgctcatgagcgtaatcggattaaacgattagcccgtgaatactttcgtttacatcagcatcaattacctgctatggattttgtggtattagtaaggaagggggtagctgaacttgataaccaccaattgacggaagtgttgggtaaattatggcgtcgtcattgtcgcttggctcaaaaatcctga

SEQ ID NO: 294360 - DNA, 1641 bp, Proteus mirabilis
atggattcgcaacgcaatcttctattcatcgctttactgttcgtttctttcctgatctggcagcagtgggagggtgataaagtatcacaaaacaccaccactactactcaggtctcgcaacaagcggacatgccaagcagtgatagtcttgctgtgactggtaacagcaatgagcaggcaaaattgattaccgtaaaaactgacgtacttgatcttcgtatcaatactcagggcggtactatcgatgaggctgatttgttagcctatcccgccgagcttaattcaaaaacccctttccgtttactggaaactacacctcaattcctgtatcaggctcaaagtggcttaattggccctgatggtccagatcagaaatctcgccctgtctacagtgccacacaacaagaatttatcttaggtgaaaaccaagatgaattacgtgtacctatgacttttgtgaatgaagaaggcgtgaaattcgtcaaaacctttattctgaaaaaaggtcagtatgacattggtattgaatacaaagttgagaacccaacagataaaacactgacaatgaacttttatggtcagttaaaacagtctgttaagttaccagaacaccgtgatactggaagtagcaactttgcgctacatacctatcgtggtgcggcttattcatcagatgaaaccaactataaaaaatatagctttggtgatatcgaagataaaaacctttctatcacaaccaacaatggttggattgcgatgttacaacaatacttcgcaaccgcgtggatcccagctaaagatagtcagaataacaacttctactctatcactttagataataaatctatcgcactgattggttataaatcagcacctattactgttgcaccgaatagcacacaggatatcacttcaacattatgggtcgggcctgagatccagtctgaaatgtctgcaatcgcaccacatttagacctatctgttgactatggttggttatggtttatctctcagccactgtttaagctgctgaaattcctgcacagctttatcggtaactggggtttctccatcatcatgatcacctttatcgttcgtggtattatgtatccactcacgaaagcgcaatacacctctatggcgaaaatgcgtttactgcaaccaaaactggcggcacttcgtgagcgtattggtgatgataaacaacgtatgagccaagaaatgatggcgttatacaaacaagagaaagttaatcctcttggtggttgtttaccgctgattatccagatgccaatcttccttgccttatactatatgttaatgggctcggttgaattacgtcatgcaccatttatattatggatccaagacttatcagcacaagatccgtactatatcctgccattattaatgggtgtgacgatgttcatcattcagaaactgtcaccaacagcagtcactgatccgatgcaacaaaaaattatgacctttatgccggttgtatttactgtattcttcctgtggttcccatcaggtctggttctgtactatatcgtcagtaacctagtaaccattatccagcagcagttaatctaccgcggtctggaaaaacgtgggctacatagtagagacaaaaaataa

SEQ ID NO: 294361 - DNA, 1365 bp, Proteus mirabilis
atgcatagcactgatactatcgtcgctcaggccacacctcctggaagaggcggtgttggtatcctacgcgtttctggccctaaagcggctgttgtagcacaaactattttaggcaaagtacctaagccacgttatgccgactatcttccttttcgcaatgaagataactcagtgcttgatcagggtatcgcccttttcttccctaatcctaactcttttacgggtgaagatgttttagaactacaaggccatggtggcccaattattctcgacttactcttaaagcgtattctacaaattcccggtatccgtattgctaagcccggtgagttctcagagcgagccttcttaaacgataaactcgatttagcgcaagctgaagcgattgccgatttaattgatgccagttcagagcaagcggcacgctctgcgattaactctttacaaggtgctttctcctctcatattaatgagatggtcgagtccttaaccaatttacgtatctatgttgaagcggctattgatttccctgatgaagagatagactttctttctgacggggtgatcgagggcaaactcaatacggttatcagtcaattagacgatgttcgtgcgcaagcgcgccaaggcagcctattgcgtgaagggatgaaagtcgtcattgccgggcgccctaatgccggtaaatcaagcctattaaatgcattagcgggaagagaagcggccattgtcaccgatatagcgggtacgacacgagatgtattacgcgaacatatccatattgatggtatgccattacatattatcgatacagcaggtttacgtgaagccagtgacgaagtagaacgtattggtatcgagcgtgcatggcaagagattgagcaagcagatagagtcctctttatggttgatagtaccaccaccgaggcgacgacaccggaagagatctggcctgagtttatggctcgtttacctagcacactgccggtcaccgttattcgcaacaaatcagatttaacgggtgaacctgccgagatcacctcgcaaggtgactatccgatgatccgtttatctgcccgtgatggaatgggcattgaattactacgctcacaccttaaagaagccatgggctttaacagcaatactgaagggggcttcttagcgcgccgtcgtcatttacaagcattaaacacagccgctgaacacctacaacaaggctatcagcaattggtttatgccaagtcaggtgagctattagcagaagagttaagacttgctcaacaagcattaagcgaaattactggtgaatttacatcagatgatttattagggcgaattttctctagtttctgtattgggaagtaa

SEQ ID NO: 294362 - DNA, 258 bp, Proteus mirabilis
atgatcataattaatgcctatcaactcagtgtgcatctaaaagatgtccgattaacaaaaaaactgtctcaaagtaaagtcgcccaaaaagtagggatccgacaagataccgtgtccaattttgaacttaatcctaattccaccaaactagaaacctttttcaaactgctctccgcactaaatttagagatggaaattcatcctaaagatgctaaaaataatttagcacacaaaagtgaatggaaagaggagtggtaa

SEQ ID NO: 294363 - DNA, 1314 bp, Proteus mirabilis
atggcgagtcttgatgtatatatgaatgaatactatgtgggcatctttactaaaaaaagctcaggtgcgcattcattccaatatactgaagattgggttaatcaaccaggaagtcgtcccatctctctttcgatgccattacagcttcaagaatatcaaggagactgtgtctataatttctttgataatctgttacctgataatactgaaattagaaatcgtattgtgagtcgctataatgcgaactcaaatcaaccctttgacctattagcggctatcggtgcagatactgttggtgcattaaggttacttcctagtggcagtacgcctgcggatatcaaaaaaatagaatatcaaaaactcaatgatattgagcttgaaaaaattctactaggatataaatccaatactccactcggtatgcttaaagaatatactgatttcagaatttctatcgctggagcacaagaaaaaacggcattacttttaaaagataatcattggtgtgtgccacataataacacaccaactacccatattattaaactgccaattggtgttattgaaagtcattcttatacaatggatttatccaatagtgtagaaaatgagtatctttgtaccttaattgccaaagaatttgatcttcccgtcccccactgctctattattaaaacaaaaaatgttaaagcgcttgctgtagaacgttttgatagaaaatattcatctgataaatcgtggataatacgtttacctcaagaagatttttgccaaattttaaatataccttctgcgctaaaatatgaaaatgaaggagggcctggcattatcgatattatgaaatatttacttggctcatcaaatgccgatcaagatcgttttcattttatgaaggcacaagtgctattttggcttttggctgcaacggatggacacgcaaagaatttttctgtttttatcaaccaagaaggacgtttccatctcactcccctttatgacattatgtccatctatcccaatttcggaggacgaggacttaatccacgagatgcaaaacttgctatgggattaaaagcaagccgaggcaaaaaatacgccatagaacaaatttttcctcgtcatttctaccaaacagctgaagctgtcggtttcgatccttcattaatgagcgatattcttcgttatttttatcaagaaatggacgatgtcatacaacgcgtaaaacagcaattacccgaggattttccttctgagattagcaatacaatattagatggaatgaaagcacgcgctgttagattagctaacatttag

SEQ ID NO: 294364 - DNA, 312 bp, Proteus mirabilis
atgtggtatacaggcaattttgtactcgaggctatcaggttagctgaagcttgggattttaaagttaaaaatatgtttgggttcgcatgggttaaattaaataaaaatgcagaagatagaataaataaaaaacagccaaaggactttttcgatttcatggaaatattaaataatgagacgaaaattaattgtggtaattatattcgtcaaaatatcgaaatgtgtttaatagccacaagaggaaatggattacctcgtcaatctgcaagtgttcgacaagttatttatttgtgcttagatgaacacagctaa

SEQ ID NO: 294365 - DNA, 246 bp, Proteus mirabilis
atgaagcggataacattatcagaatggaataataaatatttcgccaaacctagaagtccacggcaattatctcgctatataaaggaaggtaggttataccctgctccagaaaaggttggtagagaatatgagttagagccgtggacaattctaacaaatgacaaaatggtaagggaaccgcaatatttaatggagaaaattaatgggcagaagcagaagtgcaaagaacaaggggctaccgcctaa

SEQ ID NO: 294366 - DNA, 1002 bp, Proteus mirabilis
atgggcagaagcagaagtgcaaagaacaaggggctaccgcctaacttgtatttgcgtaaagggatttactattacagggatgtaagaactaaaaaggaattttctgttggctcaaacaaatcattggcaataaccgaagccatacaagccaatttagctatttataaacctaaagagccattagttgacagaattaataatgttcactgtgtaacattgcatgagtggcttgatacttatagggggaaggtaaacagccgggggttaaaagagaagacgctctacgattacgaatcaagaataaagttaatcaaattacactttaatgactgtccaattgagaatgtaacaccaagagatgtagccacatttatttcagagtaccctaaaaaggcaatggcaaaattactaaggtccactatgctagatgcttttaatgaagccattgcggatggtgtgataaaggaaaatcccgtttccgtgacaaagccgccaaaaacaagcgttcagcgctcaaggttatcgctagaagagtttaaatacgccttggagcacacaaatgacaaatataggcatatgtttctactagcggtccttacagctcagcgcattagcgatattatcaatatgaagtgggatgatataaaaaatgataggctgtatgtcacccaaataaaaacaggttctaaagtagcaataccactctcattaagacttgagtctattggttattctattaaagatgttttaaatctcatgaataggaactcagataaaatctgtggcaataccacagcaaaaacattaagaggtaagtttatcgaagccctacctgagtatttggaaaataaaccaacatttcatgaaattagaagtttatctgcaagattatatgaagaagaaaaaagtgctgagtttgcaaagaaaatacttggccacaaatctatgagaatgacagataaataccttgatgatagaggtaatggctacgttgaattgtga

SEQ ID NO: 294367 - DNA, 2004 bp, Proteus mirabilis
atggtgcccgttgcgacattgcctgctgcagcaattctgatgggaataggctactggattgatccggtaggctggggaaacgataatgcgctagctgctttactgatcaaatcaggtgctgccattatcgataatatgtcagtattgtttgcgataggtgttgcttatggtatgtcaaaagacaaagacggggcggcggccttaactggctttgtcggctttttagtggtgactacactttgttcacctgctgcggtatcgatgatcaaaggtctaccacttgcagaagtgcctgtggcttttggtaaaataaacaaccagtttgtcggtattctggttggggtactttcagctgagctgtataaccgctttagcagtgtcgaattacctcgtgcattatcattttttagtggtcgtcgcttagtgccgatcctcacgtcattcttgatgattatcgtcgcctttattctaatgtatatctggccggtaatttacggcggcttagtgagctttggtgaaagcattaaagatatgggggctttgggcgccggtatttatgctttctttaaccgcctattaattcctgttggtttacaccatgcgctgaactctgtgttctggtttgatgtggcaggtattaatgatattcctaacttccttgctggtcagcaagcgattgatgcgggcttggcaacggtcggtgtgacaggacgttatcaagcaggtttcttcccagttatgatgtttggtttaccaggggcagcactggctatttatcattgtgcgcgcaaagagcataaagcaaaagttgcgggtatcatgatggctggggcatttgcggcattctttacggggatcactgaaccgcttgaattctcctttatgtttgttgctccagtgctttatgttattcacgcattcttaatggcgatttctgtttatattgccgcaagtatggagtggatttcaggctttggctttagtgcgggccttgtggatatgttcttatcttcacgcaaccctctggcggttaaatggtatatgttgattgtgcaaggtatcgcattcttcttcatttactatggtattttccgtttcactattactaaatttaacctgaaaacaccgggtcgtgaagatgaagtggcgggggatgaaaccgcagacggctatgatgaagatatcaaagccgtccccactaatagcaaagaagcagtgcaacaagaagcacgtcaatatatcgctgcagttggtggctcagataacttaactggtattgatgcttgtattactcgtttacgtttaaatgtaaaagatgccagtgtagtcaacgatgcttacgcaaaacacctaggtgcttcaggggttattcgcttaaataaacagagtgttcaagtgattgtgggcacacgggctgaaattgttgcaagtgccatgcgtgatgtattagcacaaggcccagttgccgcttatgctggtagacatacagataacgcggtatcgacagaaaaaacatcagaaaaacagactaataatgatgccaaagtcattcttgaaatggtcgcgccatttgatggtgaagtggttgcattaaaagatgtgcctgatgaagctttctcaagcggtgtcgtgggagatggtcttgctattaaacccacatcaaatattgtgatggcacctgctgccggtacggtagtaaaaatctttgatactaaccacgcattttgcattgaaacggataacggtgttgagattatcgtccatatggggattgatacggtcgcattaggaggaaaaggctttaaacgtctggttgaagaaggtacagaggttaaactcggccagcctatcttagagctagatcttgagtatttaaacactaatgctaaatcaatgataagtccggttatcatcagtaatatcgatgactttgataaagtgagtgatattgcatccggtcaagtgacggcaaataacaccataatctataaagtattaaaataa

SEQ ID NO: 294368 - DNA, 807 bp, Proteus mirabilis
atgaggttaatccccctatccacggcacagcaagtgggaaaatggtcggctaattatatcgttgagaaaatcaacgcatttgcgccaagcgccgatcgtccttttgttcttggtttacctactggtggtacgccattagcaacgtacaaagcgctaattgaactacatcgtgcaggtaaagtaagtttccagcatgttgtcaccttcaatatggacgaatatgttggcattccagcagatcacccacaaagttatcgtacttttatgtatgagaacttttttaatcatattgatattaaagatgaaaatatcaatttattaaacggtaatgcaacagatccacaagcagaatgtgcacgttatgaggcgaaaataaagtcttatggcaaaatcaatctgtttatgggaggtgttggtaatgatggtcatatcgcttttaatgaacccgcctcatcactcgcttctcgtacacggatgaaaacactgactgaagatactcgtctcgctaattcacgattcttcgacaacgatatcaataaagtgcctaaatatgcgctaactgtcggtgtagggacattattagatgcagaagagttaatgattttagcgactggcatcaataaggctcaagcagtacaggtggcaacagaaggtgctgttaaccatctatggactatctcttgcgtacaattacaccctaaagcaattttagtctgtgatgatccggcaacaatggaactgcgcgtgaaaacactgcgttattttcaacaaattgaagcgcaagagcgccagcaataccaagactaa

SEQ ID NO: 294369 - DNA, 1164 bp, Proteus mirabilis
atgtttgccttaacaaatgctgttatttatacaggttatgaccgtttagaagatcacgccattattattaacgggtcacgtattgagcaggtttgcccacaggatcaactaccaaaagatatagccactcgtgatatgcaaggtgcgattgtctcccccggttttattgatttacaagtcaatggctgtggcggtgtacaatttaatgacaccgcggaaaatgtcacagtaaaaacgctagagattatgcaaaaagccaatgaacgcttaggctgtactagctatttaccaacattaattacctgttctgatgaattgatgaaaataggcattgaagcaactcgcgcttatatgcaaaaacaccaaaataaagtgttgggattacatttagaaggcccttatatcaatatcattaaaaaagggacacatgatcctcaatttattcgtcaaccaagtgcacagatgattgactatttgtgtgataacgctgatgtcatcgctaaaattacactcgcaccagaaatggtcgatgaaaaatatgttcgtcaattaatcacagcaggtattgttgtttctgcaggccactcaaatgccacctatgaagaagcgcgtaaaggctttcgtaacggtatttcattgtcgactcacctttataatgcaatgccttatatttcaggtcgtggcccgggtcttgtaggggcaatttatgatacccctgaggtttacgcagggatcattgccgatggtttacatgtttcatgggcaaatatccgtaacagtaagcgcttaaaaggtgaaaaactgttattagtgacagatgcgacagctcctgcggggcttgatccaaataaaaatgagatggatagcttcgtttttgctggaaaaacgatatattatcgcaatgggctgtgtgtggatgcggacggtacattaagtggttcatcactcacgatgattgacgctattaaaaatagtgtacttcatgttggtattccattagatgaaacgttgcgtatggcaacactttaccctgcccgtgcgattggtgcagataacgaactcggtacaattgaagcaggtaaaatagcaaatattgcttcttttgataaggacttcaacctttgcacaacatttgtcaatggtattgaaataacagataactaa

SEQ ID NO: 294370 - DNA, 1233 bp, Proteus mirabilis
atgctgatgagtcacaacaacactgaaacgcaaattggcaatatcgatcttgttaagcaacttaacagtgcgattgtatatcggctcattgatcaacacgggccgatttctcgtattcaaatcgccgagcagagccaactcgcccctgccagtgtcactaaaattactcgtcagcttcttgaacgtggcttgattaaagaagttgatcaacaggcttcaaccggaggtcgtcgcgcaatatccattgttgtggaacatcgccgttttaataccgtcagcgtccgattaggacgcaatgatgccactgttgctctttatgatctcagtggtaaagccttagtagagcaacactaccctttagaacaaagcacccaacaagaagttgaaaccttgcttattaatgctattgatgattttattaaacaaaatcaacgtcgtattaatgagcttatttcaatttcaattatcttgcccgggttagttgatcctaataaaggcattgtccactatatgcctcatatgaaggtaaataactgggcattagttgatagcttagaaaaacactttgatctgccttgctatgcgggccatgatattcggagtctcgccttagcagaaaactattttggtgccaccagagattgtgaagattctatcttggttcgtattcatcgtggcgcaggggctggtgttattatcaacaacaaaattttgctcaaccagcgtggtaatcttggtgaaattggtcatatccaaatagatccattaggagagcgttgccactgtggtaactttggttgtttagagaccattgcgtccaatagcgcaatagaagctaaagtccgctaccaacttgaacaaggctatcccagccagcatttatctgcaacacaatgccaaattcaagatatatgcgatgcagcggtaaaaaacgatcccctcgctgttgaaaccattaaacaagtgggtcttcatctaggtaaagccatcgccattgcaattaacctatttaacccacaaaaagtagttctggcaggagaagtgaccgaagcggctgaaatattactaccgtcgatccaaagttgcattaatacccaagtgttaaaagagtttagagaagcgcttcctgttgttatctccgaacttgatcatcgctcagccattggggcatttgcacttaccaagcgagcaatgcttaatggagagttactacaatatttattcgacaaataa

SEQ ID NO: 294371 - DNA, 276 bp, Proteus mirabilis
atgccacactcaccagcagaaaaaaaagccgcgttaacccgtgtaagaaaaatcaaagggcaaattttggcattagaaaccgcccttgaaaacgaaaatgaatgcggtcaagttttacagcaaattgctgccattcggggtgctatcaatggcctgatggcgggcgtactcgaaagtcatttacgtgaaggtctaatggataccgtcgcttctcctgaagatcaaaaaaactccgttgatgatgcaatctcactaatacgcacttacctgcgctaa

SEQ ID NO: 294372 - DNA, 1113 bp, Proteus mirabilis
atgaaatctcgtgctgcggtcgcctttggaccaggagagcctttaaaaattgttgaagttgatgtgatgccacctcaagcaggtgaggtattgattaaaattagtcacactggcgtatgccatactgatgcctttaccctttcaggtgatgatcctgagggtgttttcccggccattttaggtcatgaaggcgcgggggtggtggttgaagtaggtgaaggcgtcaccagtgtcaaaccgggtgatcacgtgatccctctctatacagcagaatgtggcgaatgcctattttgtaaatcaggcaaaacgaatctctgtgtagcagtaagagcaacccaaggtaaaggcttaatgcctgatggcacaacgcgcttttcctataatggacaacctatttatcactatatgggttgctctacctttagtgagtatacggtagtagctgaagtatcactcgctaaaatcaatccacaagccaaccatgaagaagtctgcttacttggttgtggcgtgacaacaggtattggtgctgtacataatacggcaaaagtacaacaaggtgactcggtggctgtatttggtttaggaggcattggtcttgctgtactgcaaggcgctagacaagccaaagcaggccgtatttttgcgattgatactaatcctgaaaaatttgcattagcacgccaatttggtgccacagactgtttaaatcccaatgattatgacaaacctattcaagaagtactggttgaaatgactcagtggggcgttgatcatacttttgagtgtattggtaacgtcaatgtgatgagagccgctctagagagtgctcaccgtggttgggggcaatctatcattattggtgttgcgggggcaggacaagagatctcaacacgccctttccaactcgtcacaggtcgttcatggaaagggactgcatttggcggagtaaaaggtcgtagccaactacccaatatggttgaagatgcaatgaatgggaaaatcgaactcaaaccttttgtgacccacactttacctcttgaaaaaataaatgaagcctttgatttaatgcatgaaggtaaatcaattagaactgttattcatttcgattaa

SEQ ID NO: 294373 - DNA, 831 bp, Proteus mirabilis
atgaacaacattgaacgccatgcctgttttggcggttggcaagaggtttatcaacacacctctaccaccctcaattgtgagatgaaatttgctatctatctcccgcctatggaagatgggcaaaaatatccggttttatattggttatctggattaacttgtaatgaacaaaacttcattaccaaagccggagcacagcaatatgctgcgcaacacggtgttattttagtggtacctgatactagccctcgtggtgaaaatgtggctgatgatagtgcttatgatttaggacaaggtgctagtttttatctgaatgccacacaagcaccttggaatagtcattataaaatgtatgactacattgttaatgaactccctaaattgattgagacacattttcctgccaatgagcgacgtgctattagtggacattcaatggggggacatggtgcattgatgattggtttgcgtaatttgtctcgctattgcagtatttcagcgttttcacccattgttgcaccaacccaagtcccttggggacaaaaagccttcagcgcttatttaggcgacgatatggcacaatggcaacaatatgacacgattgaattactgaataaaacacaacagacagtgcccatacgagtggatgtcggtcttgatgatcctttttaccaacagcaactacagccagaacgtttagcacaagtgtgtgataaaaaacagtttgcgtgctgtttaaatttacatcaaggctacgaccacagttactattttgtcgcgagttttatcggtgaacatatagcctttcatgctaagcacttaaaggcttaa

SEQ ID NO: 294374 - DNA, 1188 bp, Proteus mirabilis
atgatgagaaatgtaaaaaacgattttgatgcagtcattgccggtggtggcatgattggcgcagccgttgccattgggctggcgcaagaagggttgcgtgttgcaatggtagaacggcaatctccagcaccttttgatgcctcatctcatcctgatattcgtatttctgcgatcagctgcgcgtccgttagtttattaaaacagctaggtgcatggcaacatgttttagcgatgcgcagtgcgccatacctaaccctcgaaacatgggaagaagataatgcccatgttatttttgatgcgaaaagtcttggtttacctgaattaggttatatggttgaaaatcgcattttgcaattggcattgtggcaagaagcagaacgttatagcaatatcactttattatgcccaaatagtctaagtaacatgaaatacttagataataaatggcaagtcacgcttgctgatggtcaggaaatcaccactcagttagttgtaggagccgatggggctaattcgcaagtgcgtcaaatggcggggattggcagtaatggttggcagtatcgtcaatcctgtatgttaatcaccgtgaaaacgcaattaccaccagaaaaaggtacatggcaacgcttttacccttcagggccacgggcttatttgcctctgtttgataattgggcttgcttagtttggtatgattctccgcagagaattagaaagctacaaacgatgtcaatggcacagttagaaaaagaaatcgaacatgctttccctgaacgcttaggcaaagtgacacctattgcagcaggctctttcccattaactcgtcagcatgctagtcgttatgttgataatggtgtgattttagtgggggatgcggcacatactattaatccattagcaggacagggggttaacctcggttatcgtgatgtggattgcttgcttaatttagtggcgcaagcgaaacagcattttgaaccttggcattcaatggcattgttaaaaaaatatcagcgccgtcgtatgcctgataatatgctgatgcaggcaggaatggatctcttttaccacgcttttagccatcaattaccaggcttaaaattagccagaaatatcggattattagcggcgcagcatgcaggaaaagcgaaagaagccgcgctacgttatgctttagggattaaatga

SEQ ID NO: 294375 - DNA, 1431 bp, Proteus mirabilis
atgtcgacgataaaaaaactgtacattaaaacttggggctgccagatgaatgagtacgattcatctaaaatggcagacctactcgaaagcacccacggttatcagttaaccgatgtcgccgaagatgcggacattctactgctaaatacctgttctatccgtgagaaagcacaagaaaaagtctttcatcagttaggacgttggaaaaattttaaagataataaacctgatattatcatcggcgttggtggttgtgttgcctctcaagaaggtgaatacattcgtcaacgtgcgcagtgtgtcgatattatcttcggaccacaaaccttacaccgcttaccagaaatgattaatcaggtaaaaggcaccaaaagcccagtggtcgatatcagtttccctgaaattgaaaaatttgaccgtctacctgaacctcgtgctgaaggcccttctgcatttgtttctatcatggaaggctgtaataaatactgctcattttgtgtagtgccttatacgcgtggtgaagaagtcagccgcccttgtgatgatattctatttgaaatcgcacaactggccgctcaaggggtacgcgaagttaatctattaggtcaaaacgtcaatgcttatcgtggtgaaacctttgacgggcaaatctgtagctttgcagaattactgcgcctagtggcagcgattgatggtattgatcgtattcgttttactaccagccaccctattgagtttactgacgatattattgcggtttatgaagatacccctgaattggttagcttcttacacttaccagtacaaagcggatcagatcgtattttaaccttaatgaagcgtaatcatacagctcttgaatataagagcattattcgtaaattacgcaaagcacgccctgatattctgataagctcagactttatcattggtttcccaggtgaaacgcaagatgatttcgaaaaaaccatgaaattaattgcggatgtaaactttgatatgagctttagctttatctattcagcccgtccaggaacccctgcggctgatttacctgatgatgtgagtgaagaagagaagaaacagcgtttatatctgttacaacagcgcattaatcagcaagcaatgaactacagccgtgccatgcttaacagcgtacaacgtattcttgtagaaggcccttcacgtaaaaatgtgatggaactttcaggtcgtaccgaaaataaccgcgtggttaacttcgaaggtacaccggatatgattggtaaattcgttgatgtcgaaattgttgacgtttacgctaactcattgcgtggtaaagtggtcagaacggaagatcaaatggatttacgtatccatgaatcaccagaatccgttattgcccgtactcgtaaagaagatgaattaggtgtaggtgtttaccaaccttaa

SEQ ID NO: 294376 - DNA, 1062 bp, Proteus mirabilis
gtgacagtaatagcccatacacaggtagcgacccaagagattttcttagagcccgcagataatgaccgtttaatgagtttatgtggcccatttgacgacaatattaagcaacttgaacgccgtttaggtatcgagatcaatcaccgtgataaccgttttaaactaacgggtaaatcactgaatgtgaatgcagctgcaggaattttgcgacatctgtatgtggaaacctcacccattaaaggtgtgatacccgatatcgaccctgagcaaattcaccttgccatcaaagagagccgagtgcttgagcaaagtgatgagcatgtgcctgaatttgggaaatcgaccaatattcgcactaaacgcggcgtgataaaaccacgtacgcctaaccaagcgcaatatattgccaatatccaaactcacgatattacttttggtatcgggcctgcaggtacagggaaaacctatctggctgttgctgccgctgtcgatgcccttgagcgtcaagaagtacgccgtattttactgactcgccctgcggtagaggcgggtgaaaagctcggttttttacccggcgatttaagccaaaaagtcgatccgtatttacgaccactttatgatgcgttattcgagatgttaggttttgaaaaagttgagaaactgatagagcgtaatgtgattgaagtggcccctttagcttatatgcgaggtcgtacactcaatgacgcatttattattctcgatgaaagtcaaaacaccacaatcgaacagatgaagatgtttttaacgcgtatcggttttaactctaaagcggtcatcacaggtgatatcacgcaaatcgaccttcctcgaggccataaatccggattgcgtcatgccatagaagtgctatctaatgtcgatgatttaagctttaacttcttccatagtgaagacgtggttcgccatcctgtggttgctaagattgttgtcgcatatgaagcttgggaagttgaagatcaaaaacgccgccaagcaattaaagcagaaaaagagagactgcagagagaaaatcatgagtga

SEQ ID NO: 294377 - DNA, 468 bp, Proteus mirabilis
atgagtgaagtgattcttgatttacaagttgccactgaaaatacacaagggcttccgagtgaagcccaattcatcacttggctggaagccgtactaccgcaatttcagcctattagtgaagtgactatccgtatcgttgatgaagcggaaagtcatgagttaaacctgacttatcgtggaaaagatagaccaactaatgtactttcttttccttttgaagcaccgcctgaagtggaattacctttactgggtgatttaattatctgtcgtcaggtcgttgaaaaagaagccgatgagcaaaataaaactgttgaagagcactgggcacacatggttatccatggttgtctgcaccttttaggctatgatcatattgaagatgatgaagctgaagaaatggaaggtttagagacagaaatcttacaaaaattaggttatgaagatccctatttgattgaaaaagagtaa

SEQ ID NO: 294378 - DNA, 882 bp, Proteus mirabilis
atgagcgacgaccaatcttcgagtaacgataaccctggtcctaaaaaggggtttctcacattgcttaatcagttattccacggtgaacctaaaaatcgtgatgatctgatggagcttatccgcgattctgaacagaaagaattaatcgatcctgatacccgtgatatgttagagggggtaatggatatcgctgaacagcgtgtacgggatattatgatcccccgctcgcaaatcgtcacattaaaacgcaatcaaacccttgatgagtgccttgatgtgattattgattcagcgcactctcgctttcctgtcatcagtgaagacaaagatcatattgaaggcttattaatggcaaaagatttattgccatttatgcgtactggtgctgagccatttagtatagacaaagttttacgttctgctgtcgttgtaccagaaagtaaacgcgttgaccgcttactaaaagagttccgttcgcaacgctatcatatggctattgtcattgatgaatttggtggtgtttctggtttggtcacgattgaagatattcttgaacttatcgtcggcgaaattgaagatgagtatgatgatgaggatgatattgatattcgtccattaagtcgccatacctactcagtgagagcattaacccaaatagaagattttaatgaggcatttggtactcactttagtgatgaagaagtcgatacgattggtggtttagttatgcaagccttcggtcatcttcctgctagaggtgaaactattaccattgataattaccaatttaaagttgttatggctgatagccgtaaaattattcaggtttatgtgcacattcctgacgatgcgcctgtacctgaactaggtaatgatgtgtag

SEQ ID NO: 294379 - DNA, 1524 bp, Proteus mirabilis
atgaataatttctctttattaaaccgccagtgggttcgcaccctactggcggtttttttcggtgccagtggcacactcgcgttttctccctttgatttctggcctgcagcgttaatttctttatcaggtttgctactgataataacgcaacgaaccacacgacaaggggtatggcttggttttgcctggggatttggattatttggtagtggtgtaaactgggtatatgtcagcattgctgattttgggggaatgccatttgctatcaatattttcttagtcatattgttagccctttacttatcgctttataccgccctatttgccggattattaaacaagttctttcctaaacctaccgtttggcgttttgtctttgcggctcccgctgtatggcaactcactgaatttttaagaggttgggtgttatcagggtttccgtggttacaatttggttatagccaaattgatggcccattaaaaggtattgcacctatttttggtgtcaccatgataacctttttgctgaccataattagtggacttattgctgtcgctatctatcgtaaatcactatatagtgcggtgatcggagcaatattattactcttacctatcagctttaaatcttatcaatggtatcaacctttaactgatgaaacacaagaaattgccttagttcaaggcaatatcgcgcaatcattaaaatggcaacccggtactttagaaagtacgttaaacacctatctcaccttaagtcgcccttttatcggtaaagcaaacttaattatttggcctgagtcagctatccctgatgttgaaattcagcaacaaggctttttagcgcaattggataaacaattaagagcacaagacacgcatctaatgacaggaattattgatgcgcgtcccaccttagaaggctatcgtttttataatagtgttattacattaggtgaacactatgcttaccaatatccggcaacagatcgctataacaaacatcatcttgtgccttttggtgagtatgtccctttagagtccttattgcgcccattagcgccattttttaatttacctatgtcatcattaagccaaggtgaatatatacaacctcaactgacggtaaatgatgccaaaataaccgccgccatctgttatgaaattattcttggagaacaagttcgtgctaactttaagccggatacacgtttcttattaactatttcaaatgatgcttggtttggtaattcaattggtccatggcaacattttcaaatggctagaatgcgttcattagagttaggacgcccattattacgttcaactaataacggcattaccgcctttattgctgctaatggtgatgttattgcccagcttccacaatttgaagcaggtgcattagctgaaaaaatgacacccacaacaggatcaacaccttattataaaatggggagttatccagtgtggattttagcaggggtatttttaattcttgcttttattaagcgtcgttcttaa

SEQ ID NO: 294380 - DNA, 684 bp, Proteus mirabilis
atgatccattaccctgaatatattcttgatattatttggcaaagagcgaaaaaaatatctgccgataatgaaacaaaaggatttcgtaaagataaagaaactaaatggatcaagcgccaaatgtttaatcaacaaaatgaatttggctgggtattatcaaaacaacccagttcgattcatcaaattattgaagatgaaacaattgtgcctttacattggcaaacagcgagagcctatgagcaaaaacaagaagcaagctctaaacgtctcaatatgatcccacttgacccaccagcactatcgaaactcattcaatcaccaacagatgttttaccttattggcaacatgcccatcagatttccagcgataatgaagaaaaaggttttcgtaaagattattacggtcgtattatccagaaaaatgcgtttggagataaacaacatcaatatggttggacattagctcaattaacaccagccaataagaataatcaaatcgttattcctattaatattgtaccaatacatattaatacctcaaaacgcacttacaatgaaaaggaattaattgttcaaggtagccaagaagcaaaaataaaacgcagacgtaaaaaacttgtctatgagataatcgattttattgtcagcctacctggcattattttttcttcatttaaactctga

SEQ ID NO: 294381 - DNA, 504 bp, Proteus mirabilis
atggcaaatcgtttacgaaaatggggtaaagaattagttattctcgcccttatttttgtggctatttcatttgctatggactggtggcgtcaaccaacgccaccagaacttactgatttatctacgctttatacagttgatgataaaccagtctcattgattgcccttagccaagagaaaccattactgatctatttttgggcgagttggtgtggcatttgtaagttaactacaccgacggtaaatgatttagcacaacagggttataatgttacgtctgtagttatcctctctggtgatgatgccaaaataatacgtggcattaactccaagcaactagtttttccggttattaatgatgatagaggggctatttctcaacgttgggggataagtgctacaccttcttttgttattctctataaaggtgaaatggtgcactttacaagtggctggacatcctcttggggattaaaacttaggttatggtgggcttcaatttaa

SEQ ID NO: 294382 - DNA, 732 bp, Proteus mirabilis
atgaaaaaaacactttctgcactggttatctcttcgttactttttggtgcaaatgttcaagccgctgccttgaatgcagctcaagaaaaagaagtacgtgcattagttcgtgatactttagtgagtaatcctgagattttggaagaagctatcatggcattgcaaactaagaaggcagatgagcaacaagcacagttccgtcaagcattggcctctgaacatgatgcattatacaacgatgcggcaagtccacgtattggcgctaaagatgctaagttagtgttagtgtcgttcactgattataactgcccgtattgcaaacgctttgacccattattagaaaagatcaccgaacaataccctgatgtggcggttatcattaaaccattaccatttaaaggtgaaagctctgctaaagcctctcaggcggtgctttctgtctggaaagaagatccaaaagcattcttagcacttcatcaacgtttgatgcagaagaaaacgatgctagataatgcaagtattgaagatgcaatgaagagcactaatactagcaaaattaagttaactgatgacagcttaaaaacgttgcaaaataacttagagctttctcgtaaactgggtattcaaggtacgccagcgacggtaattggtgatactattttaccgggtgctgttgattatgatcagttagaaattattgtgaaagaacaactggcgaaagtgaaaaaataa

SEQ ID NO: 294383 - DNA, 2037 bp, Proteus mirabilis
atggttcgttcttttttaatagcattgatgttgatgctattttcattatcttcattagccgccgatacaggttggctaactatgccagacaatgatcatgctcaggttagggctacggctgacaagtcatcgacaggcgatgttaaaatattgcttgaggtgcaattagcgccgggctggaaaacatattggcgctctcccggagaaggtggcgtagcacctgaaattaattggacgcaatctgtgtctgatatgatatggcattggccatcaccttccgcttttgatgtcgcaggtattcatacccaaggttacgataaagaagtcgtcttccccattgaactaaaatctgtcgatagcgataacttaaatggggtattaacactttcaacctgtagtaatgtctgtattttaactgattactcattaaatctggatttaaacgagcctgctcccgctgattttgaatggcaatataatcaagccatggccaaagtacctgtgacaagtggattaatttctgctgtttcatctgattatcgaaatagtcaattaaccctctcattacaacgagaacaaggtgactggcatcaacctaatatttatctcgatccaccacaaggaatgctatatggcattccacagttaacagcaaaaggtgatcatttatctgttactgtcgatgtaaccgatgattggggagacgctgcaggtgacattgtaggaaaaccactctcctttgttgtgactgacgatggctattcacgtcaagtcaatgacactataggccaaggcgatagcgtatctctgcctactgctgactcgggggttggattatggagtattttagcctttgcgctgttagggggcttaattcttaatttaatgccttgtgtgttacctgttttggcaatgaaattgggctcaattcttcatatcgaaaaacgtgatacaggggctattcgtaaacagttttctgtttctgttgtgggaattttagtgtcattctgggccttagcgctgtttatgaccgtattacgctacagccaagaagcaataggttggggcatacagtttcaaagcccttggtttattggctttatggtgctgatcacggctatttttaccgctaatttatttggcctatttgaattacgtttatcaagtaatatgaataccaaaatagcgacagcaggaggccaaggttatagtcgacatttctgggaaggggcttttgctacattgcttgccacaccgtgttctgccccattcttggggactgcggttgcttatgcattgatagcaccattaagtgagttatggttaattttcaccgcattaggtcttggaatgagtttaccatggatcatggttgctatgtttccatcaattgccaaagtgttgccaaaacccggtaaatggatgaatcgcctaagagttgttttaggctttatgatgttgctatcttgtatttggctgatcactttattgatcccccattttggtattggcattgttgcggctatttttgtggctatcgccctgatcttgctttttgctattgctaaacattacggcaaaaaaacgctatttgcttcaatggtgatcacccttattttaggtggtacaagctatctatttattgctcagcctgatactcagaccttggcggggcaagatcaggtgaattggcaaccactctcagaagaggctatccatcaagcgttagctgaaaataaacgggtgtttattgatgttactgcagattggtgtgttacctgcaaagcaaataaatacaatgtattattacgcgatgatgtgcaaaaggcactttcagagcctgatgttgtcgcattaagaggggattggacgaaaccgtcagaacagatcacccaatttttaaaacagcgcggtcaagtcgccgtgccgtttaaccagatttatggaccatgtaacaaggagggggagatcctaccgcctcttttaaataaagatctaatgttaactattctttcagaggctaaaggagcccaataa

SEQ ID NO: 294384 - DNA, 390 bp, Proteus mirabilis
atgcataattggcggtcaggtcgctggctagtgttgataacagtattgctgatcttgtgttgtattgttcagcgctctatgggggctcatgtgattagtgagcgcttagcatctgctgtttcgcaaacacagtcctcattctcgacgccaattgcagagcaacaaaatgcaagtgaagggaaatattcactttcaacctgcgaattaagtgctaaatcactcttatcgattcctcctttagcgattgaaccgcttttttatacttgggcggtattacttttatttggtatggctgccatttatgtttctcgtcaacgtagccagaaaaaacaacatcacccacctccacgaataaggcttcaccttcattactgtattctaagggattag

SEQ ID NO: 294385 - DNA, 894 bp, Proteus mirabilis
atgcgcatgcgtaaactagcattatcattaatgattttaggggctgcaggagctgtgcaagcagaagaactcactggtaccttaaaaaaaatcaacgataacgatattattattgttggtcatcgtgaatcctctgttcctttttcatactacgataatcaacaaaaagtggtcggatactctcaagactattccaacctgattgttgaggcagtaaaagaaaaattaggcaaacctaacctacaagttcgtcttatccctatcacttctcagaatcgaattccactattacaaaatggtacatttgactttgagtgtggctcaacgaccaataatctcgctcgccaacaacaagctgatttctcgaatactatttttattgttggtacacgtttacttgcgaaaaaagacagtggaattaaagattttgctgatcttgcgggcaaaaatgtggttgttacgtcaggcaccacatctgaaatgttactcaacaagctcaatgatgagaaaaaaatgaatatgcgcattattagcgcaaaagatcatggcgactcattccgtacacttgaatcagggcgtgccgttgcttttatgatggatgacgccttattagcgggtgaacgtgctaaagcgaaaaaacctgcgttatgggagattgtgggaacacctcaatcggaagaagcttatggctgtatgttacgcaaaggtgatacacaatttaagtcgttaattgatgaaaccattgctaatgcgcaaaaatctggcgcagcagaaaaatcgttcaatcgttggtttaatgccccaattccaccgaaaaacctcaatttagaattcactatctcggatgaaatgaaagcactgtttgcatcaccaaatgataaagcattgaactaa

SEQ ID NO: 294386 - DNA, 741 bp, Proteus mirabilis
atgtcgattgattgggattgggggatattcttccaagaagccccttttggaaataccacttacttaggttggcttatttcaggctttcaagttactgtcgctttatctctttgtgcttggatcattgcttttattgtcggctctttttttggtattttacgaaccgtacctaatcgcttgctctctagtttaggggctatctatgttgaactatttcgtaacgtccccctgattgtacaattcttcacatggtatttagtgatccctgaactcttaccacaagctattggtgattggttcaaaatggacttaacgccgaatatccaattctttgtctcttcagcactctgtttaggtttgtttaccgcagcgcgcatgtgtgaacaggtgcgggcggcaatcaattcattaccaagaggacaaaaagcagcaggcttagcactaggcttaacactgccacaaacctaccgctatgttttattacctaatgcttatcgcgtcattattccgccaatgacctctgaaatgctgaacttagtcaaaaactctgcaatcgcctcaacgattggcctgattgatatggctgcgcaagcgaataaattattagattattcagctaaagcttatgaatcctttaccgctatcacgctagcctatgtctttattaacgtcattattatgttgattatgcactggttagaaaaacgggtgcgtttacctggcacagcaggaggtcaataa

SEQ ID NO: 294387 - DNA, 675 bp, Proteus mirabilis
atgtacgagtttgactggagttctgttgttcctagcctaccttttttaatggatggcatggtcattactttaaaaatcaccataacagcaattgttatcggtattttatggggaacaatacttgcagtgatgcgcttatctacttttaagcccatcagttggtttgcggccgcttacgttaatacctttcgttctattcctttagtgatggtattactgtggttctatttaattgtgcctaacatattacaaaatgttctaggcctttcaccaaaaagtgatatccgtttaatttcagcaatggtagcgttctctctatttgaagctgcttattactctgaaatcatcagagcaggtatacaaagcatcagtaaaggccagttttcagcatccttagctttaggaatgacaaaatcacaaacgatgcgtttagtgattttacctcaagcatttcgtgccatgatccctttattgctcacacaaggtatcgttttatttcaagatacctcactcgtgtatgtattaagtctgaccgactttttccgaacagcggcaaatattggtgagcgtgatggcacacaggttgaaatgatcctttttgctggttttgtctactttataattagtttctccgcttcaatgttagtgaactttcttaaaaaaaggactacttag

SEQ ID NO: 294388 - DNA, 726 bp, Proteus mirabilis
atgatttccctaaaagatgtatccaaatggtatggtcagtttcaagtactgacagattgttccactgaagtgaaaaagggggaagttgttgttgtctgtggaccttcaggatcaggtaaatcgacgcttatcaaaaccgttaatggtttagagcctatacaacaaggtgaaatcctagtaaatgatataaaagtcaatgataaacgaactgatttagctaagttacgagccaaagttggtatggtgtttcaacactttgaattatttcctcacctttccattattgaaaatcttacactagcgcaagtgaaagtccttaatagagagaaaggtgcagcaaaagagaaagggctaaaattattagagcgcgtaggcttagccaaccacgctaataaataccctgctcaactttctggtggtcaacaacaacgcgttgctattgctcgtgctttatgtatggatcctattgcgatgctatttgatgaacccacatccgcacttgatcctgaaatgattaatgaagttcttgatgttatggttgagctggctaatgaaggcatgaccatgatggtggttacacacgaaatgggctttgctaaaaaagttgctgaccgtattatttttatggatgaaggtcgtattgtcgaagatagcccgaaaaatgacttctttgataatcctaaatcagaaagggctaaagatttcctagctaaaatcttacattaa

SEQ ID NO: 294389 - DNA, 2583 bp, Proteus mirabilis
atgcaagaacaatatcgtcccgaagatatagagcaaactatccaggaacactgggaaaagaacaatacatttaaagtgacagaagataataacaaagaaaaatattactgcctgtcaatgctaccttatccttctggtcgactacacatgggacacgtccgtaactacaccattggtgacgtgatttcccgttatcaacgtatgttgggtaaaaacgtcttacaacctattggttgggatgcgtttggtttacctgcagaaggtgctgccgtaaaaaataacactgcacctgcaccgtggacttatgaaaatatcaattatatgaaaggccagttaaaaaaactgggctttggttatgattgggatcgtgaagtcaccacctgtacaccagaatattatcgttgggaacagtggtttttcactaagctgtatgaaaaaggtttagtgtataaaaaaacctctgctgtaaactggtgcccacacgacttaaccgtactggctaacgaacaagtcatcgatggttgttgctggcgttgcgacacccctgtcgagcgcaaagaaattccacagtggtttattaaaatcaccgattatgctgaagagctgttaaacgacttagatacgttagatgaatggccagaacaagttaaaaccatgcaacgtaactggattggccggtctgaaggtgtagaaattacctttgatgtcgcagatagcgacgataccatgaccgtatataccacacgtccagatacctttatgggtgtcacttatgttgctgtggccgccggtcatccattagctcaaaaagccgctcaaaataatcctgaaattcagcacttcattgatgaatgccgtaacatgaagatggcagaagctgaaatggcaaccatggagaaaaaaggtattgctacaggtctgtatgctattcatccattaacccaagagaaagtcgctatttgggtagccaactttgtcctaatggaatacggtacaggtgcagttatggccgttccaggccacgatgaacgcgactgggaatttgccactaaatatggtttgccgattaaagcggttattgctgatgcagaaggtaaccaacctgacttatcaacaggcgctctgactgagaaaaatagcctgattaactctggtgaattctcaggacttgataaccaagctggttttaatgctattgcagataaacttactgcaatgggtgtgggtgaacgtaaagtgaattaccgtttacgtgactggggtgtttctcgtcaacgttattggggtgcgccaattccaatggcgaccttagaagatggtaccgttgttccagttcctgatgaccaattaccggttattttaccagaagatgtgaaaatggacggcattaccagtccaattaaagcggatcctgagtgggctaaaacaacgattaatggtcaaccagcgctacgtgaaacagatacttttgatacctttatggaatcttcttggtattacgcacgttatacctgccctgattacgacaagggaatgttagatccaaaagctgctaactattggttaccggttgactggtacattggtggtattgaacacgctatcatgcacctgatgtatttccgtttcttccataaattgatgcgtgatgctggtttagttaattctgatgaacctgctaaacgcttactgtgccaaggcatggtattagcagatgcattttattataccggtgaagatggcgctcgccattgggtctctcctgcagaagcgattgttgaacgtgatgaaaaaaatcgcatcatcaaagcaactgacagtgcaggccatgaactgacttacgctggtatgagcaaaatgtctaaatcaaaaaataacggcatcgacccacaaaccatggttgagcgttatggtgctgataccgtacgtctatttatgatgtttgctgcaccaccagaattaacacttgagtggcaagaatcaagtgttgaaggtgcgaaccgtttcttacgtcgtttatggcgtttagttcatgagcataccgaaaaaggaacgactcaatcacttgatttggcaacattaaccacagagcaaaaagacttacgtcgcgatttacacaaaactatcgccaaagtttctgatgatgtaggtcgccgcttagcattcaatacggctattgctgcgattatggagttaatgaataaattaacccgtgcaccacaagagacggagcaagatcgtgctttaatgcaagaagcattagaagcggtggtacgtatgctttctcctatcattccacatgcttgttttgttatgtggcaagcgttaggtggtaaagaggatattgatgttgcaccatggcctgttgctgatgaagaagcgatggtcgatgatacgaaacttattattgttcaagttaatggtaaagtacgtggtcgtatcactgttcctgctaattcagaaaaagattatgttcaggaaatggcaacaaaagagtacagtgttgctaaatatttagaaaatgtcaccgtacgtaaagtgatttatgtaccgggcaaattactgaacatcgttgttggctga

SEQ ID NO: 294390 - DNA, 549 bp, Proteus mirabilis
gtgcgatatctattttcgctgttttttgcgttagcggtgttggtcaccgctggctgcggttttcacctacaaggtaaaacccaagttccagctgaattaaaaacgctttacctaagctctggtgacccatacgggccactgtctcgtgtaatgcgtcaacaattgagattaagtggagttcagctggttgaaacgccaaaagcagatattcctgttctcaaaattgttggatcttcagaaaataaagagactgtctctgtgtatcaagacggtaaatcggctgaacgtcagctcacttttgtcctagatgcacaagtgattatgcctgatggaactatctaccctatttcatcacaggtttcacgtccattctttgataacccattagaagcattagctaaagatgccgaaaatgatattatcaaacaggaaatgcgtgaacaggctaccgctatcttagtacgtaaattattggtggttcacaatgctgaacgccaaaaagcgtcagaggcagctaaagcgaaacagataatctcaccagccaaatga

SEQ ID NO: 294391 - DNA, 1035 bp, Proteus mirabilis
atgatccgcctttatccagaacaacttaatgcgcaactccaagaggggttgcgccaaagttacctactttggggtaatgaaccgctattactccaagagtctcaagatgccattcaaacggtggcaaaatcacaaggctttacggaacattatcaatttacccttgataacagcactgattggaatgaaatatattcactctgccagtcactgagtcttttttcacaaaagcaatctatcttactccatcttcctgaaaatggtcctaatgcggcaatgtcagaaaagcttttacgcttatctcacgaattgcatgaagatctcttgttaattttacgtggacataaattaaccaaggcacaggaaaatagcgaatggtttaaaacactcagccagcaaggtatttatgtgacttgcttaacccctgagttagataaattaccaaattgggtagcgagacgcgccaagcaaaaaggccttgagcttgatgaacaaggtaatcaattactgtgttactgctatgaaggaaatttactcgctttagctcaagcaattgaacgcctctgtttgctctatcctgatggtaaattaaccctgccaagagttgaagcggctgtcaatgatgcctctcattttactgcttatcattggattgatgcattattagcaggcaaaacccaacgggcatggcatatcttgcagcaactaaaaagagaggatactgaacccgttattctgcttagaacattgcaacgcgaattaatgcaattaattaccttacatcgtagcgctaaaacggcctccttaaaatccgttttcgatcaacatcggatatggcaaaaccgacgtccgatatttaccgccgcgttacaacgtttgtcagagcatcaattactcactgccatgcgattacttacccagattgaaataacccttaaacaggatcacggacaaaacgtttggcctgaacttcatgcccttggcttattattatgtggaaaagcattaccggaaggatttattcgccatggctag

SEQ ID NO: 294392 - DNA, 672 bp, Proteus mirabilis
atggctagcaccaataataactcccctttaattcatcaagccattgctctatatggtggtacttttgatccgatccattatgggcatttacgtcctgtagaagccctttctggcttgatagggctaaaagaagtgatttggttgcctaataatattccccctcatcgcccccaaccagaagcctcttcacaacagcgattagccatggtgcggctcgcattacaaccttttagtgctttcaaagtcgacactcgagagttagagaaaccgactccctcttataccattgagacattaaaagcgtttagacaagaaattggtgagaaacagccattagcctttattattggacaagattcattactttcaattgatacttggcataaatgggaagagttgttagatgtgtgtcacttattggtttgcgctcgcccgggttaccaaaccacatttacatcaccacaaatgcaaacctggcttgaacaacatcaaaccaaacagcaagcagatattcactgtttacccgccgggaaaatttttcttgctgatactcctttatacaatatttcagctaccgatattagggctagacataaagcaggattagattgtcatgatcttctgcctgagtctgttgaaaactatatcaaacagcatcagttgtatcgataa

SEQ ID NO: 294393 - DNA, 756 bp, Proteus mirabilis
atgaaagaaaattattattatttggagcaaacttcagaaatagcgagtaacaaaaacgcattgttacaggcagattggcaacgattttgtcaattgttatgctatgaaggcattgaaattaaacaaaataatgatgaaaaacgacaaaataaggcagtgatttgtcgggttaaaatgaaaggggaatattcatcaaccttattcacgcagattttgggggaaggagagttacaattaacccttgaacaattttctcaacctagtggattggaacattttctgacacagttttttgccttaattgattatcaacagcaggtaaatgctaagttgagcaaaaaagcactgatccaatttcatagtcgatataaatatttgttaatggcttattctcaagtcgcttatcgagaattggggcgttatatggccaatatccctaattcgctaccgctgttacaatttgccgagcagtatcaaaaggccttaatgaaagcactgtcaataccagcaactcgagaagggcataccaatgcattaatgcatatggcgggatattttaagcgagcacttagcgcagagcaaaaacagttgttaacacaagagattttatcttatcggcaaggaaaaacgagtctttcggctcctttgtcacggttgaaaaactatttggcgttttatcctgataattatctactttctcaacgctatttttcaccttatccagctgtatttgatgacttaagagcgcaattttaa

SEQ ID NO: 294394 - DNA, 318 bp, Proteus mirabilis
ttgcaaggctcagaattacagcaatttattattgataaacttgaggattctaaagctcaagacattatcgcattagatgttcgtggaaaatcaagtgtcactgattacatgatcatctgtacgggaacttcaaacagacacttaatgtctgtcgccgataatctggttgatgactgtcgtgaagcaggattacaacctttaggcatcgaaggacaaggcgtttctgattggattgttgttgaccttggtgaagccatggtacacgtaatgcaagaagacagtcgccgtatgtacgaactcgaaaaactctggagctga

SEQ ID NO: 294395 - DNA, 471 bp, Proteus mirabilis
ttgaaattacagctcatcgccgttggtacaaaaatgccggactggatccagaccggctttatggattatcttaaccgctttcccaaagatatgcccttagaactcatcgagatccccgcgggtaaacgagggaaaaatgctgatattaagcgtattctcgaaaaagaaggcgaacagatgttagcagcggtaggtaaaggaaatcgtatcgtcacccttgatattcctggcgcccgttgggataccccaaaacttgccgagcaactcgatcgctggaagttagatggaagaaatgtcagcttattaattggtggccctgaaggtttagcccccgcttgtaaagcagctgcagaacaaagttggtctttatctccattaactatgccacatccgctagtacgtgtagtggtagcagaaagcctttaccgtgcatggagtattaccacaaaccatccttatcatcgggaataa

SEQ ID NO: 294396 - DNA, 1914 bp, Proteus mirabilis
gtgaaatcaactaatgggatgaagaaaagaaaacgcaccccgtttcgagattatacagcggagtcaaaactctttatccgccgtgttattgtcgcattttcagggatcttagttttaacgggcatcttagtttttaacttgtatcacttacaagtcgctcgccacgatgattatcaaactcgctcgaatgataaccggatcaaattagttcccatcccaccgagccgaggcattatttacgatcgtaatggggttccacttgccctaaatcgtactatctatcaattagaaatcgtaccggagaaagtggctaatatccaagaaacattggagagtttacgagaggtcgttgatttaactgacgacgatattgctgcatttgaaaaagagcgaaaacgctctcgtcgttttagttctattccgcttaaaacgtcacttgaccaagtgcaagtggcacgttttgccattaatcaatatcgctatcccggattagaaatcaaaggctatcaacgtcgctattacccttatggttcagcccttactcatgttattggttatgttgcaaaaattaatgataaagatgtagaacgtcttgaaaaagaagggctctatcctaattacgcagcaacccgagatatcggtaaattaggtattgaacgctattatgaatctgttttgcatggtaaaaccggttatgaagaggtcgaagttaatagccgtggccgtgtgatccgccaattgcatgagcaaccaccacaagccggtaaagatatctacctaactatcgatcttgaattacaaacctatattgaaacgctattaaccactagccgagcggctgtggtcgtcacagatcctcgtaacggcgagatattagcactggtttctaatccaagttatgaccctaacctatttgttgggggaatatctaatacagactatcaaggcctacttaataatcccgatagaccattaataaaccgggcaacccaagggctctatcctccagcatcaacggttaaaccctttatgtctgttgcagccctaagtgaaggggttattactcctaacacaactatccatgatccgggctggtggcaactgcccggctctgaaaaacgctatcgtgactggaaacgttggggacatggaaaactcaatgttactaaatccattattgagtcagcagataccttcttctatcaagttgcctatgatatgggtattgatcgtatttccacatggatgtcccgctttggctatggtgaatacacggggattgacctttctgaagagcgtaatggcattatgccaacccgagaatggaaacaacaacgatataaaaaaccttggtatcaaggggataccatccctgttggtataggtcaaggttactggacggcgaccccaatccaaatgtcaaaagcgttaatgaccttaattaacgatggtcaggttaaaacccctcacttactttatggcaccaagttaggtaatgaaatgctaccttacgtggataaagagacacgccaaattggcgatatcaactccggttattgggagttagcgaagtacggtatgtatggtgttgccaatctacccaatggtacagggcgacgtagctttgctgatgctccttataagattgctgcaaaatcaggtacagcacaggtatttagttatgaaacctataatgctagccaattagcagaacatcttcgtgatcataaattaatgattgcttttgcgccttatgaaaaccctaccgttgccgtctctataattttagaaaatggtggtgctggcccatctgttggggatattactcgccaaatacttgatcacattatacttggagacaacaacaccgagttgcctatttccccgccttcaccgcgtggctcagaggaataa

SEQ ID NO: 294397 - DNA, 1113 bp, Proteus mirabilis
atgacagaaaataacaagaaaaaatcactctggacgcgtttacatatcgatccattctttatgctctgtattattgccttattatgctatagcgcatttattatgtggacagcaagtgggcaagatcccgatatgatggaacgcaagctgggacaaattgctacgggttttatcgttatgattatcatggcgcagatccctccacgggtgtatgaaaactgggctcctcacctttacgtattttgtgttgtattacttatttttgttgatgtctttgggcaaattagtaaaggtgcacaacgctggcttgatttaggtatcatacgttttcagccttctgaaattgccaaaattgccgttcctctaatggtcgctcgctttatgaaccgtgatgtttgtccgccaacattacgtaacacagcaatagccttagtgttgatcttcgtccccacccttttagtggctgcacaacctgatttgggtacctctattttaattgctgcttcaggaatttttgttatcttccttgccggtatgagttggcgtttaattactgtcgcaacactattaattgctggatttattccgatactctggtttttcttgatgcatgattaccaacgaacacgggtcatgatgttacttgatcctgaaattgaccccttaggagccggatatcatattatccaatctaaaattgctatcggttctggtggattacatggcaaaggttggttacaagggactcagtctcaacttgagtttttaccagagcgccataccgactttatttttgccgtactcgcagaagaattaggactgattggtgttttaatcctactaacgctctatatactcttaattgctcgaggtctttatctcgcgacaaaagcacaaaatacatttggcagagtcatgattggtggattaatgctgatcttctttgtttatgttttcgtcaatattggtatggtgagtgggatcctcccagtagtcggcgtgccattaccactggtaagctatgggggatcggcattaattgtactaatggcaggatttggcattgttatgtcaattcatacacaccgaaaactattatcaaaaagtttataa

SEQ ID NO: 294398 - DNA, 996 bp, Proteus mirabilis
atgcgtttgcaatgggttttgatgggtgtcagtgcattgctacttgcaggatgtgttgctgataaacctgtgaataataatcagccaaccacaaggttgccaaatgtacctacacaacccgtattaggtatagagcctcgttatgagccttatcacccgactgcgaatcaagattatcgtaaaaatggggtaatttatcgcatagtcaaagatccggcgaactttagtgaacggggacaagcgattgtttacgacagcttagcaatgagtcgcttaacaaccataggtgaacgagtcaacccttatgagtttgctgcggcacacccaacattgcctattccaagttatgcgaaaataacaaacttaatcaatggacgcacaatgattgtgcgaattaacgatcgtggcccttacgttgaaggcaaacaaatacaggttacacctgctgtttataacagtttgcagttaatgccaacaacccctattcaaattgaaggtattgtcgttgatcaaaatggccaaataagtggtattggtactcaaggtgcacaaatagagaaaagagccactacattacctgagcgtcctaactttaatactcagccatcgacaatggctccccaaccctctgtaacagcaccgtctcccataacagtgactcaaccagctccagctccagctccagctccagctccagctccagctccagctccagctccagctccagctccagctccagctccacagccagtatcttcatctagcgcaatagcgcaaggatactatgtacaagtaggtgctttaagtaatcaaactaatgcacaaacatggttatctgaattaaccaatgctttaaatacccaaggtgtcattaatacaactgatggactacataaagtgcaattaggcccctactcatcaaaaacgcaagccgaaacaataaaaagtgctttgaaacaaagtaaaaatatcgatgggtttattgttagccaataa

SEQ ID NO: 294399 - DNA, 1212 bp, Proteus mirabilis
atgaaacagacacgcccagtgaaattactaagaacacgtctatttagtgcaacctttattttattagctattagccatcatgctattgctgatgacacattaaaaacaatgatacccgctgttcctaatatcgaagccgaatcctatattcttatcgactataattctgggaaagtcctcgcggaaaaaaacgcagatgtccgtcgtgatccagccagtttaaccaaaatgatgaccagttatgttataggtcaagccattcgtgcaggaaaaatatcgaacaacgatattgttcctattggtgaagaagcatgggcaacgggcaaccctgtatttcgcggctcatcattaatgtttttaaaacccggtgataaagtcaccgtttcacaattaacacgcggtatcaatctacaatcaggtaatgatgcctgtgtagcaatggcctcttatgttgcgggaagccaagatacctttgtcactatgatgaatgactatgttaagcgtctaggtttacaaaacacacaatttcaaactgtacatggtttagatgcacctgggcaatacagtagtgcacgagatatggcattgattggcgccgcattaattcgtgatgttccagaagaatatgccatttataaagaaaaagagtttacctacaataatatccgtcaaactaaccgtaatgggttactttgggatactagcctcaatgttgatggtattaaaacaggtcatactgaagctgcgggttataatcttgttgcctctgcaacagaaggaaatatgcgcttgatttctgccgtgatgggtggacactcatctaaaggccgtgatgctgaaagtaaaaaactacttacttggggttttcgcttctttgaaacggtaaaaccgctgcaggtgggtaaagagtttgccgctgaacctatctggtatggtgatactgataaagtgcaattaggggttgataaagatgtttatctcacgatcccccgtggccgactcaaagatctaaaggccagttatgtattagataatgttgaattacatgcgccagtcagtaaaaaccaagtggttggcaccattaatttccaacttgatgggcaagtcattgaacaacgtccacttgttgttatgaatgaagtgaaagaaggtggcattttcagccgcttgattgattacatcaaattattattttcacgttggtttggttaa

SEQ ID NO: 294400 - DNA, 267 bp, Proteus mirabilis
atgatgaaaacaaaattaaacgaactattagagttcccttgctcatttacttacaaagtcatgggtcatgctaaacccgaattagttgaccaagtcgttgaagtgatccagcgtcatgcacccggtgattatacaccttcagtaaaaccaagtagcaaaggtaactatcactcagtctctgtgactatcaacgcaacgcatattgaacaagtagaaaccctctataaagagttaggtgaattagagcttgttcgcatggtgttataa

SEQ ID NO: 294401 - DNA, 645 bp, Proteus mirabilis
atgaagattttcacggtgcaagataaaacaatcattattcgccaattgggtatgaaaccctatttaccggtttctgattctatgcatcagtttacggaaaaacgggaaagtcatacacctgatgaaatatggctggttcaacatgaacaggtttttacccaaggtcaagcgggtaaagcagaacaccttttaaacacaggctctataccggtgatccaatctgaccgaggtggacaagtgacctaccacggccctggccaacaagtgatgtatgttttgcttgatctaaaacgtaaccatattggcgttcgccaattagtcactgttttagagaatactgtgatcaacacactcgcagaatttaatgtagacgcatatgctcgtgcagatgcaccgggcgtgtatgttaatggtgataaaatttgctctttgggattacgtatacgcaaaggttgctcttttcacggtctagcacttaatgttgatatggacttatctccttttacgcgaataaatccttgtggttatcctgatctaaaaatgacacaactggttgatttggcgccgaatgcaacatcggaacaagtggcatcattattaatcaaccatttttgtacacaactgggattccaaccacagcaataa

SEQ ID NO: 294402 - DNA, 966 bp, Proteus mirabilis
atgagtaaacctattcagatggaacgcggcgtaaaatatcgtgacgccgataaaatggcacttattcctgttaaaacaatcgttacagaacgtgaagaactgctacgcaaacctgagtggatgaaaataaagttgcccgcagattcaagtaaaattcaaggtattaaagcggccatgcgtaaaaatggcctgcattctgtttgtgaagaggcttcatgccctaatcttgcagaatgttttaaccacggtaccgcaacctttatgatcttaggggcaatctgtacgcgtcgttgcccattttgcgacgttgctcatggtcgtcctaacgcacccgatccccaagagccaattaaattagcccaaacgataaaagatatgggattacgttatgttgttatcacctcagtagatcgcgatgacctacgcgatggtggtgcacaacattttgccgattgtattaccgctatccgtgaaaaaaatcctaatattcgcatcgaaactttagtccctgatttccgtggtcgtatggataaagcattagagatcctcactgacacaccaccagacgtctttaaccacaatttagaaaacgtacctcgtgtttatcgtcaagtgcgtcctggtgcgaactatcaatggtctctaacgttactagaacgctttaaacaagcccacccaaatattccaactaaatcggggttaatggtcggtttaggtgaaacaaatgaagaaattattgacgtgatgcgcgatctgcgtaaacatggtgtaacgatgctgacattagggcaatatttacaacccagtcgtcaccatcttcctgttcaacgctacgtcagtcctgacgagtttgaatatatgaaagagcaagcattagcaatgggctttacccacgccgcttgtggaccatttgttcgttcgtcttatcatgctgatcttcaagctcaagggattgaggttaaataa

SEQ ID NO: 294403 - DNA, 375 bp, Proteus mirabilis
atgcttaacattgcaatagctgtatttatcggcggtggtttaggtagcgtactacgctggctaattagctaccgcctcaattctctttttccccattttgcaacggggaccttggtcgctaactgtattggtgcctttattatcgcctttggcattgcttggtttagtaaggctcccaatattgatcctatttggaaaatcatgcttaccacaggtttttgtggtggcttaaccaccttttctactttttccgttgaggtggtcgccttatttaatgaaggacgaataggctgggcattaggcaccatgggggcaaacttagcgggctcgtttctgatgacggcattcgcattctggctactccgtgaaatgtag

SEQ ID NO: 294404 - DNA, 567 bp, Proteus mirabilis
atggtcaaattacagtttgcaggctatttacgcagatttggacgcaggttcgagcttgaggtaagtaatgcaggtgaggccttacgctgtctttgctatcaaattgatgggttgaaaaaagagattaaccaaggtcagtttcgcgttcgtatcgcaggtaatgatatgaccgaggatagtatttccacgggattaagtacgccattaaatgaaggtgatgttattacgatcgtccccatagttggtggtgctaaatctggcgggtggctaggcattattggtggagctgctttaattggcgcatcgtttttaataccgggcggatttttggcaacgatgacatcgaccgcattatttgccgctggtgtaggtgtggccgccgcggaattggcaaccatgttaactaaaacaccgccagcgccaagcatagaggggcgaaactcagaaagtaaccagtatttcagttcgttagcaaatagagtggggcaaggttatccggttcctatctgttatggcgagatggttgtgggttcaaatgtaatatcacaaggtttggagactgtttaa

SEQ ID NO: 294405 - DNA, 699 bp, Proteus mirabilis
atgagggatatacctcaagagatgcgcataaatgttgcagatttacagcaaaatgcaatgttagatttgtatgaggtcgatttaagtcgttttggtggtgatgtttaccggtttcatgacggcatgaatggcttattaaaacctattgtctggcagggtttacgatatgaaccttatcctgttcaggttacagggtttagtgtaacgactcagggtgcatcagacagaccaaaaatgacgtttgctaactttgacggaatgttaactgcgattaacaacgactatgatgatgcgctaggcgctatcgttactcgcaggcaggttttagagcaatatctcgatgctgttaattttcccaacggaaacccacaagcagatccaaccagagaagccgttcaaaaatacgttgtcgaacagcgagaaagttcagactctgattttgtgacgtatatattagcacttccaacagaaacagataacgccctgatacctagacgggttattcaggctgatatctgctcgtggcgataccgaggatttgattgtggttatgatggaccacctgttgcagatgaaaaagaccaaccaacaaccgattccttaaaagacaaatgctctcataaatacagcgggtgcaaattaagacacaaaggaaagatgccattcggcgggtttttaggttcaaataaattaggttaa

SEQ ID NO: 294406 - DNA, 330 bp, Proteus mirabilis
atggaagagtttaaatggcgacctgaaacagcttatcaggtgggtaatgagcctaaagtgaaagtagctaagtttggtaacggttacgaacaaagagtcaaagacgggatcaacaaccaactaaagacttatcaactctcatttgttaagcgtactgatattgggaaacagattgatgagttccttaaggctcgaggtgcagttgaatcattcttatggctaaccagtgatgataactctaaacgtaaatttgtttgccgtggctggcaggtaacgccaagggcgacggtatggcagatagattgcacatttgaggaggttgttgcatga

SEQ ID NO: 294407 - DNA, 312 bp, Proteus mirabilis
atgtcagaaaataataatccaatcgaaaaaccgattaaattaagtgaagctattaacaaaatggctgatacaattaaggagcactccgatgctattgaaataaatgcaaactctacctctaaattactagcctatagctcaatgaatagtaaagtgctaaggtttttagttgagttatcattaaatcccgaagataaagaaaaagcttataactatctattagaatccactaaaacgcccccaaaaactgaacaacacaatagctatgaaaaagatatgattgaatacctcgattatatattccagaggtaa

SEQ ID NO: 294408 - DNA, 201 bp, Proteus mirabilis
atgagtaatcaaaatttagaagcgttagttagtacgttatcagcacaagtggtacagcaagggcaacaaattgcagagttacaaaaacagctcgcggatatgcaattaacgagctgtgattttcaggtgttgcgaaagatgactagtgataattttgcgtatgcggtatctcgactaaaatattccgcatctcgtagctaa

SEQ ID NO: 294409 - DNA, 3336 bp, Proteus mirabilis
atggcacaagtaggcgaaattgtttatcaagttcaaatggatgttgagcaattgctaacatctcagcgtcagttagagcaacgtcttaatcgaatggatagcagctttaacagaacgtctcagtcggtgaataacactgaacgttcaatgttatctttatccaaagttgccgcatcacttgccggctatctatcagcttcaatggttgctagttactccgaagcatggactgagttaaacaacaaattatctaactctgttcgtgcaagtgagtcacttattgatgttactcaacgagtatttgatatctctcaagcaacgcgatctagtcttgatgccacagcaacactctacgcacgattagaacgaggaacgagagagtacaatacatcagcagaagacttagcaaaattaacatccatcattaaccaaggttttatcgtatctggtgctactgcgcaggaagcagaaaacgccattattcagctatcgcagggtatcgcgtctggcgttctccgtggtgaggaatttaactcagtagcagagcagggtagccgcttgatggttgcgcttgctgactcaatgggtgttggtattggtcagctgcgcaagatggctgcggaaggtaaactaactacagatgttgttgtgaaaggattgctttctcaaggtgatgcgatcggtaaagagttcgctaaaactactcgaacaatgtcacaggcatttcaagaggcagggaacaacttaaccaagtttcttggtgaaaacacaacaataaagacatctattaacgtattcagtgatgctgttatcgccgtcagtaggaatttagatgccatggctgacgttttaacttttgcagctggggttatagggtctagatttcttgctgcactatctcttgctggtgttgcacaattaaagaaagcaaaagataccataacggctactatagcgacaagaaactcagccaaagcagaggtaattgctgcaaaagagacgctaactagggtgcaggcagaaaaggcatttgctttaacgactcaacaatcattatcagctcagctttcagccgctcagactgaacaacaacgctcaagaataagaaatgaattatcggcaaattcagcaagaatagcagcactgaccagacaggaaaccctagaaacaaatagattagctgcggcccaagcaagagttgcatcaacaagtattactatggctagtgcaatgaaagctctcaatattgccacggctcctttgggtggacctatgggggcactaatgcttgctggtgccgcaatgtattacttccatcaaaaaacggagcaggcgaagcaagaggctcgagattttgctgatagtgtcgatcagttaacagctaaattaaaagagctttcatatcaagagattgctcgtgacgctcaggatgctgctgataagcaaaaagttctaaatgcagaaatgaaagagcaagaaaagcaactagctaggctagaagctcgattaaatatgcaacaagaagctcttggtgataatcctgaattaattgaaagaaacactataaatatattaagagaaaaaataaaactagaaggtgatctagctgaaaacaaaaaacgctcagaattaataactaaatatctaacagatgcacaaaatgagtacgataaaaaactgaaggaggctattgatttaagcgttaaaagcgcaacaactcttgatattgaaaaatcagcattaggcaggctcacccaacaaataagagatgcaacaggcgctaaaagtgaatttaatgccacacaattggaagttaaattatcagagaaggccttggatttgcgtaagactttagagagagaaataaagttagcaaattcaaaaagtgaggtagataagagattattgcaagttcaattttatgcagaagataataatctatccaaagaggaggttttggtattaaatcaggtagcaattgcggcccaagatgccaaagatgccgcagccgaacgcaacaaaacgaccaaggaatcaaccaaagccacagacgcagcatatgaggcactaaagcgccagagagaagaaattgagcttttaaacaaaggttacaaagacggatctcttgaaatggctaagtatgatgctgttaaagcattgggtgacaatgcatctcctaagcagattgaaaaagcggagcaactcgcagaagaaaaatacaacattgagcgtaatctagctgataagaaagctgcgcttgagcttgatttagtcgccaaggctaaggaatctcacgataagcagttggcagacttagagcggataacaaaagatgatgtatctctcactgaacaggcagcaaggcgtaaagctgaaattgaggcggaatatcagcaaaagatagccgaaataaaggctaataacactgtatcaccgcaagatgacatcaaagggaaagtagatcctgttcagcaactaaaaaacgaacacgagcgtaaacttgcacttattcgtgagtttgaaacagaaaaaggcgctattactcagcgtggcttagagttaatgaatgccgccaatactcaatatgagcaagaacggttaaatgctcaatgggagatatggcgtaatcagagccaagctaatcaattcttagctgatgggttggacgcattagggcaacgctctaccaacgtactcacagggctattaacaggcacgcaatcccttaacgatgctttccgtaatgtcgcattaaccatcgtagaccaagccgttggcgctctggttcaaatgggtatgcagcaggttaagaatatggttactgaaagtgccatgcgtaaggcttccaatgcacaagctatagctgaggctacaactactggcgcagcaattacaaatgctatggctccggcggcagcgacaaccagtattgccactatgggctctgctgctacatggggtatggcagcaatggcaacagctattcccgctatgattgcgcttgctggtgctcgtaaaaatggtgggcccgtaaatgctggctctatgtatcgagtgggtgagggtggtaagcctgagatattcaaggcatctaacggtagtcagtacatgataccgggtgataatggtcgagttattagtaatcgacaaatgggtaaaggtggtaatggtgtcagcatgggtgatatgcactttacattccaagttcaagcacctaatggcatcactcaaaaggaagcacaacagatacagcaaatggtgagaggtacggtttatgacgtacttggtaacgaaatgcgtagcggtggtgctttggaaaaagtaagaagttggtaa

SEQ ID NO: 294410 - DNA, 309 bp, Proteus mirabilis
gtgaggaaactattaattgcatctattggggtgttatcttccttggctattttatttagtgctaactctactgctaaagaaaatataaaaatatcagatgttgcaaaagcagtttgtattaatcataaagataaagaaccgtgtgaaggccttgttatcgcatcaatggggcatgctttcgatcaggggaggattagcatggtttgcgatttaatgcgtgaatctggggatgagataccagaagagcaaaaggatagatgtgatgaagcaaatgaaatgttgttagatgtgcgaagtgtaaaatattaa

SEQ ID NO: 294411 - DNA, 1149 bp, Proteus mirabilis
atgctcaacgttgatgagtttgaaaattttgtaaaaataatgaagggctcatctacatcagttgtcaaagggcattgtataattaaattcggatgccctcttgataacattgaatattttgagactttgttaaataaatacggcgtcacttcaatttctgaaaaaagacaggatgaatttgtcattagcactgattttttagatgagtccatcctgtatctttctatggataagctgtggtataaatcttgctcaataggtagagtacctgagtttttttatattctaaaagggaatcagtcttcattagaggaatcaaaagaaacactatcaatatctttgtttttaaagtggaaagctatagtaggaaaggtttcaaatcatgttattaatgataaatgtattctatatatgccaaatgatgatggcgggaaagagttggttataaccataaatgagagtttggattttgtaaaaaaaataaactataaaatagactcaaatctttctgctgacaacatactgaaagttttagatataaatgacgctcaatctactgagcgtgaatcaataatgagaacggcgatatttgaattaataaaagacaatgaaaccaaaagtttagtttcagttatagatgttggagataagatatatgttcgttatttaaacctacttgagttatatacaaaaagattttcagtaaacaaaatactttctgaactagagcaaaagcaacttgagtatacaactaaaattaatgattttgtctcatctagccagaataaagcatttgccattccgggggctttgattgcggttggcgggctagcaaaatcaggaggtcttgtcgactcagttctcatatttttcggtctatatttgatatatagggtcacttatatctcaaatgagatattgattaactcttatgactcattgaaaagtagtctaaatgatttaataaaaagatattctaagttcgatgaaggtgtcgaggtgcgagatgctgcatctaaaatagattcagatataagtggaaaaatagaaaaggccaaagaacgtattggtaagattaatgacatgggtgtgatcatgttagttgtaggtgctatctacttaattatgaagtggctgacgtccccatag

SEQ ID NO: 294412 - DNA, 1203 bp, Proteus mirabilis
atgacggttgttgctgatggtgaaggaaatgatttaatcgagtgcccattatgtggaaaccagcatgatgataatgaactttgcacttgtggttatgacccaaaattaaaagaaaaaagtaagtctaattatcgtgctattcatgcccttacagctactcttgattttgttgttggagataaaggtcgggatattaatgtagaaatcggcaaagaatggggattggattccgatgatgtagtgcagtttatatctagtgcggataaaaggttcatggcgaaaagaaagagccacggtgtcatgaaagaagatgctatgccgcacaataccccaaaaacattttcaagatatttagataaagacctttcatttgttgatttcgttacaggtattatgaagttaatgaaaagagaggcttatgaagatagatctaccctatcaggaggtgctttagtctttattcattatcaagtagatttagatgagagtagtgatggtaggttattgattataatggtaaataagaaaggtgtttttgacttcaatgaaagccttgtgcctaaaaaaataccgtctgtaaatttagacgctttaaggcaggcggtgttgattgacctaacgttatttaagtcaagttacccaaacaatgagggcgacccatatttacactttattacaggcatgtcaaaaagtggtttttttaaaagggcgcttggttgtaaccctaaaattgacaacaaaagaagtatagagcagttacatgaagccttagatggattctctaacaatatatcactaacaacagagcaaagaatcaaggtaagggaatcagtaaaagcctttatttacgttaaagccagaagtgttgataagaaaatgaccattagtgatgttggaaaagttatagagaagtgtatacctgaaatacagaatgtagcgggtaaatttgaacagtatgttgatataaatgagtacacaattgatcagtacttcgagcctcattacacatcatcgaaaccatttggagagataaaaatctcagatgatgatgacgagtatgaagtaacgtgtaatgttaatacaatcggttccagtaataaatcagacaagaaaataatttacgataaagcaaattctcgcttaattatccgcttaacagattcgggtataacagaaatagagaaaattattaagggggcttaa

SEQ ID NO: 294413 - DNA, 726 bp, Proteus mirabilis
atgagtgagatcactttaacaaatagttttaacactgtcacgaacaaaactatcgatacccagaagttattatcaatgattaacgtggctcgtaagtcatgtggtgaaaatcaaattcgtaataacgtattgattgaaagagtaaaagacgaattagatggcgagacctacaaaatttttgtaggtcataaaaatggcgctcaaattgaaataattgaaatggatatcaaacaagcgcttcgtgtagccgctagagaatcaaaagctgttcgtcgtgttctggttgacaagctggaatcaatgcatgtagcttctcaaaaaagtggcaaaagccaatcaggtttacctgaataccgccaagctagaacgcttaaaatgtcggttgatgccattactaacttattcgacttaatgccgaacctgagtgatgaggcaaaacagtgtgcagcagctaatatcgtcaatccgattgttgggtttgaagccgttcctttgccggcacttgaacaaaaatattatacagctggtgaagttggagaaatgcttgaagtatctgccaataaaattggtcgcatggctaataagcatgggttaaaaacagaggaatatgggaaatatttcttagataaatctgcttattcttcaaaacaggttgaagcattcagatataacgacaatggagtaaaagcattacgacacgccattcatggtgttgaagtagcttaa

SEQ ID NO: 294414 - DNA, 630 bp, Proteus mirabilis
atgactaatttagcaaatattaacgacatgagcaattcagttaaatccatcccagcaattatgcataacggaatacctgtagttacgactgaactgttagctgagttatatgatactaaaagtaacaacataaaagtaaaccactcccgtaatgcaggtcgctttattgagggtaagcattacttcaaagttattggaaatgctctaaaaaatttgcgagttactttaagtaacctacaaatttcaccaaaagcgagaagtttaattctgtggacagaaagaggtgcggctcgccatgcgaaaatgttagacacagacaaagcatgggatgtgttcgaattaatggaagatcactattttaataaaggaaaaaatgaggttgttgttagcacgcgcccaataacccaaagggaaaaagatgctcacaacattaacgctctatttaatcactacgatgttttttattcagcatggaagtcagaaatatatccaatactaagacaacttgaatcaccacttgctggaaggttggttgatagatttcaagatggttatgcgtttctgatgaatttaaggagagatattaacgggagattacaagaaggtgagttgccaagaatatgcaggtaa

SEQ ID NO: 294415 - DNA, 171 bp, Proteus mirabilis
atggaaaagaaaaacagaattatgccgtacccatttcgaatgaagccagatatgaggcaatggattgataatgttgcggagaatagacggcgctctactcaagttcagcttgaatatattttagaggtatttagagagaaagtggaaaatggtgaacttgagatgccgtaa

SEQ ID NO: 294416 - DNA, 774 bp, Proteus mirabilis
atgaaaatagatgatggttttaaaaatagaattagcgccgccagacaagctgctgaattaacacaaggtgaattagcggagaaagttggtgtagtgcgcagacagattgcagcttatgaggctggaaactccaaaccaagaaaaaatgttttaactaatttggctgctgcacttggtacaacatcagaatggctagcagaaggaactggagaagccccagatttaagtaaggttgttaaaactataactctacctcttattccagtcctctcttattctgactcagttttcgacttgaataatcctgctagtttttcaaggtttgtcccttcaatccctgaagctagtgataaagcatttgcttatgaagtcataggtgattcaatgacctcttcttatggagtcagctttccatcaggtactattgttatcatagatccgtctttagagcctaaccatatggattatgtgcttcattacattgatgggttttgtagctttaaacaattaatatttgaccaaggcgactggtatctttactcattaaatgatgactatccatcatgcgttattggagatatacgccaagtaatcggggttgcgctacaggctcaactacccttaacatctgatagggtcaaggcgaataacaaatttagcccaactggtacgaaaataggtaatgataacaatttacaagaaaaactaaacactatggaatccaagctacagagaattgaaaatttactaaatgctcttaccgaaaaaaaataa

SEQ ID NO: 294417 - DNA, 990 bp, Proteus mirabilis
atgtcagatgaagaagatgattcaaaaaaagatgtaaaaggtaaagctaaggggggggttgctagggcgaagtcattaacaaaagaacgacgctctgagatagcaaaaaaagcagccattaaaagatggggaaatagaccaccaaaagcgatacataaagggaactttaaagatcaatttaacattgatgctgagtgttatattttggatgatgcagataaaacggttgtggtttcaaaaacagggttatccaaactacttggtattggtgagcatggtagggatattgatcgactgctaaaaacaaattatatggcagaatttgttgatccagaattactggaaaaaatagaaaaacctcttatttttcaatggaggtcaacagtcccaaaaagtgaagttgaaggggctttttttgactcagctcatggctacgacataacgctaattggggatgtggctaccgcactgatcaaggctgacatggctggctcgctaccttcatcaaggaagaagtcagcagcactcgctcaacagttagtgacagcttctatgaaattagggctgaaaggccttgggtatgccattgcagggtatagacctgaagttcaagaggttattgatgcattcaaggcctttgttagggaggaagctaggcagtatgagaaagagttccctgatgaactatatgaggcatggtacaaaatatatcaattaaacaagccagagagaggaagaccttttttattcagtaagctaacaaatgaacaaatttatatacccttggcaaaaagtaacggaaaaatccttgatttagccagaaagaataaagatgaaaatgggaagaaaggggataaaattcatcagtttttagctgaagttggggtgaaagctctaaaacaacagattggtaaagttcttgctgtgtctgagttatttgatgataaagagtcttatgaggcggctttaatgaaagtaaataaagcataa

SEQ ID NO: 294418 - DNA, 693 bp, Proteus mirabilis
atgacgcctattttagaaatcggtgagatggttatctctactgataaaaaggattacttatttagaccatcgttcatcaatatgacaagaatcggtgagcctaaacagattgtgagtgcatacggtcaattaaatggtgctgaggtgcaagagttaattgcacgcgccgtaatgagctacagggttattcctgagtggttaataaaagcgattagcaagccgacatatggacgcaatatcctacaaactgcaatgatagtgatgcaggcgtgttgtgatgatgattgttctgaaatcattggcgagtggaagtcaggtaaacgtggcattgtctataaaaacggcaagatgccaatcgctgacattatcgtcattgctcgagaattattcactcacggaattatcggtaaagcgaagatccgcaaacttcaacgtaacgaaggcaaaaatgaattctcagatgagtttatggcaattgactacatcagctctgctcgtgctcattttggtatgaatcgagagggagccgaacggctaaccatgactgaatttcagatgatgctcaaagctaaataccctgatgagaaaggcttcacaaaagaagaatatgacaacatcatgaagcaagatgataagcgtaatgatgagctgatcagcggtaagcgtcgattagtgagtaggaagagaaagtaa

SEQ ID NO: 294419 - DNA, 756 bp, Proteus mirabilis
atgtcacaatgtcctgacaaaaaaggattggtaatgggtaatgcgggaattatccgtattgcaaaaggatgccctgaccaagtaccagcacaagatcaattcttacgcttaggtgcattaacaaccaagtcattcgattttggtatggagacggtaacgtctaatgctgatgatatcaaagggttaacagaatcaatcgtcactggtgctgacttcaccattagttttgatggggaattgaagaaatctggcgtaactggctctacttctgctttcgatattgcaaaagaaattcttgatgaaatcaaagctggtcgccaaccagattattggattcaacttgatatgaaaggtgatggttctgatgttgttcagagctatatgttatttacatcatggtcaatggaatttccaacaaaagaaatctctacctattcaggtgaattgaaagttgctgatgcagaaacggttgaatggctacaagaagaaatcgtggttgaaagtgtcgcagtagagccagctactctgtctgtaaaagtgggtgaaactaagacatttactgtcaaatttaccccaaccgatgcgacgaacaaaaactacactgctgtgagcgataagccaaactttgcaacagttactcagcttgtgaatgtagtcactgtgcgtggtgttgctgaaggtactgcaaatatcactgtcacatctaaagatggtagtaaaacagcaaaatgcgtggttactgttacctcagcttaa

SEQ ID NO: 294420 - DNA, 372 bp, Proteus mirabilis
atgacgacctttgagagactgaaaaactatttttctgaatcagggttatctgatggtttcattcagcaggattatatttggaatgaaaaagaaggtaatgattcagattcatatatcgtatttcagcaactaaatggaactggtcgtattgatgatttaagtggcgatgatttcttcaccgttttactcatatctggcaaggcgtggattgagtttattgttcagagagctaacgaaatactagagtatgtaaggtgtcactctagaagtcataacattggctttattatcaatacatctggttttgttaatccaattcaaacaacagaaggtaggtttattatcccgctttctttccgctgtacatcttaa

SEQ ID NO: 294421 - DNA, 369 bp, Proteus mirabilis
atgggggcaaaagtaaaaggaataggtaatgcgatatctaacttaaactctctggttggaagcatagcatcaaagaagatagctcgagccatgcatagagcgctagatattggtggcaggcaagctgcaaaatacacaccaattgacactaaaacgctcattaattcacaatttagagatgtaaaagtaaaaggtactctatttactggtcgcgttggttattctgcttcgtatgctgtttttgttcatgatcctaatgttaaacaaactttccgcaggcttaatgctaagaaagaattcctcctgaagggatttgaggaaacgaagcaaatgattgatcaggccgttgctgaggaacttaaaatatga

SEQ ID NO: 294422 - DNA, 342 bp, Proteus mirabilis
atggggaaaatcctgcgacgattttgcaaagggtgggcaaccatctggaaagttgaggggaaagataaatatggtaaacctatattttcagagccaatccatatccggtgtgattacggaagtagctttaaagatggtagtaaaactattggtactgaaataattattaagaatgttatttggactgagtatagcgaagcttctcaagaagactatatcgccatcggtaagcatgaagacagagatccatttttgcatggtgctagcagggttaagtctatcgatagagaccgtgatattaatggcggtctagatgattacacactaacaacggaggtgtaa

SEQ ID NO: 294423 - DNA, 378 bp, Proteus mirabilis
atgtctattgcgattacggttgagcaagttaatgagcaattagaggtgatggggtttgaggcaacaagtcttgtcataaactctgctatatctatagtggacactattgatacttgccttgatagcgcagggtattcagatgcggtaattgctttaattaaactgtattcggttatccttatattatcatctgctgatgttcgtaaaatcgcgtcagagcacgcaccttctggcgcttctgtttcatatcagtatttttctgatggcagaaaaacattgctaaaaatgctgtcttccctagataccaatggatgtactaatagccttcctattgaacgccccgtaggtgtcattcagtttgatgtagttcgggggtga

SEQ ID NO: 294424 - DNA, 951 bp, Proteus mirabilis
atgtctttatatatttttcaaaaacaagtgtctctagcggcaacagagttggttgctcaggctgtccgtcaatttaacgaagcatctggtggtgctttagttattggcgatggtgatcatatcggtgattacattgagcaaacatcatggcagttgcttggtggtctggctcagcgacgcaatgcatatggttcaggtaatctaacgccacaagaattggggcaaatccttgaccgtatgattaagattgatggtcgtattggccctgtctcagttaccccgacaatgatgaagcgactaggtaaggacgtatcagaagcggctgcggtagttgctgctcaatcagcagaagccatgttacaagattacctgaatactactggcgcggcattaaaagcagctatttctggtaataaaacagccgttactgttggaggtgaaacaccatcattaagaggtttaaataaagcaacacgtccattcggtgatgcatattcgcgtattgttgcttggttgatggatggtgcaacattcaacgactttatggatgagacattaaccaacgcaaataacctattccaaattggcaacgtcgccattaaacaagataaccttggccgtcgttttgttatctctgatattccagctttatcagatgcagacaaacaacattcgctaggtttagtgactggtgctgctgcggttcaaacatcaccactaatcatgaaggctcaggatgtattagggcaagaaaatattaaggcactaatgcaaggtgagtacgactttactattggtttgcgtggttaccagtggagcaaagatagcatcaaatccccaactaacgaacagattgccgcggtagctaactggaagcaaattgctacggatattaaagatactgctggtgttatggtttcatttggcaaagatactagcgttggtgggtaa

SEQ ID NO: 294425 - DNA, 687 bp, Proteus mirabilis
atgtttaaatatttattaacgaaagaagaatttgacgcattaactgatgagcaaaaggctctttacaaagagtctggtggtaattaccaacttcaaatcgaaggtatgccagaaattccagatgtgtcaggtcttcaaaagaaagttgatgaattactttctgagaaaaaatcagagcaggagaaacgccggcaagctgaagaggctgcaaaaaaagcagcagaagatcaagcgcgtaaaaatggcgatatcgaatcactagaaaaaagctgggctgaaaagttaaagacgcgtgaaaacgagttattagcacagctgcaggagaaagacgcgagtctacatacgctattagttgataacgttgctcaaactgtggctacaaagcttgctggtgacgctgctccgttaatcatgccacacattaaatctcgattatcagtagaagacggtaaaacgcgagtggttgatgctaacggtcatccttctgcatttaccattgatgatttagaaaaagaatttcgtagtaacccgttatttgctccagtaattattggtagtaaagccaccggaaccggaggggaaggcggtaaagggaaatcaccagccggaggcagtgaaaaacccaaaagcgcgaatccgttagtggacagcgcacgtgaaatcattgctaatatccaagaggattaa

SEQ ID NO: 294426 - DNA, 1065 bp, Proteus mirabilis
atgcaatcgcagttgatgttagataattcaatgatgatccaaattctcctagaacgactcaaagctggcattgttgatagagaggaaatgcaaagagagctaagggcggctgttgctaaggcgttagctaatttctcaggtcagataacatcgaggtcaaaactaaacgccataattgctgagttaaagcgagagctatcaccagttctgaccagttactctgagcatttactgcaatctgttctcgatatcggtgttgagtcaagccaacttgaagttgatagcttatcgcagatagtaacaaatgaagtaagcaagcctggtgctgagaaagttaaaaaagccattttaaatgtgccgctgatattaaccgcttggggcggctctttatttctcaagaaatttatatcatcttgggtgactagctctatccagcaagtagagaatcagactgttttggctatggctgctcaaagtaacattcaagttctacagtccactattaatggggctgcaattgataaaacacaggtctctacatcgacgatatctcgaattacttacaactacagaacaattgcaaatacggcaattcagcatgctcatacatgtgcggctcaggaattttataaggagaatgacgatttaattaaagaggaagaattcagcgcaatactggacaacaaaacatcatcgacgtgtagggctttatcaggaaaccgatatcctgttggggctggcccaatgccaccattacacccaaactgccgaagtcagcgattgccaatacttaatgataaatttgctaatttgataataactaaaccaataggaagatctgaatggggagaagaaagctattatgaatggctatctaggcaaccggccaaaagacaggatttaatattgggtccgactagagggaagttgtttcgtgatggtggtttatctccagagcgattcgcacagttgcagttacataaaaactttaaaccaatgacacttaaagatatgcaaaagtttgcgcctaaagcgtttgagcgagcaggaattgaattgaaataa

SEQ ID NO: 294427 - DNA, 1377 bp, Proteus mirabilis
atgaatacaaacgttgattacaagcatccagcttacaatgagtttttgcctgaatgggacatggttggcgattgtgttgatggcgaacgagttgttaaaagcaagaaagagaaatacctccctcatccggcagataacaaagatgaagatgataagggtaatgagcgttataagcgctatttagctagagcatcctttctgaatgccacgggtaggacacttagtggtttacttggtattgctttcagtaagccagtaaagattagtattagtggtgatgttgagtatttagaaactgatattgacggtcaaggtcagccacttactcaaatgataagggatgcgttatcgcaaaacttacagcgtggtcgagcaggtttattaagtgattttagtggttcaggtattcagtcagaggctaataaaggtcgctcctatattcggttgtttacagcaaaagaaattatcaattggcgtgtaacgaacgggaaaacatccctcgttgtcctcaaatatcaggagccagtagatacagatgattttgaactgcaaatgcagaataactggattgaattaaggcttgttaacaatgtagcttgctctcgtcgctggtatgaagatggagatataaaagttacagagtgggttgtattaaaggatgcacacggcattccattaagggagttgccgtggtcatggattggttcaatgaacaatgatcacacccctgatgctcctcctcttgcagatattgcgtacttaaatatcaaacattatcaagttgaggctgatatcgcagagtctgcacatactgtcggtcagccgatgattgcactaactggccttactgatgattgggttgaaagacacgtgtctgaagggtttactgttggttcacgcaaaggggtgttgctgccacagggtggtgatatgaaatttgcgcagccagaagacagaaacattcaaataaacctagctgagcgcagagaaaagcagatggcaatgctaggagctaagctagttgaacgcgggacatcagcaagaacagcgactcaggcacaggatgaggctcaaacagataattcagtgctttcgttgtgttcaggaaacgtcgaaaaggccgttaaccgagcacttaatttctgcattcagtttgaggggagtggtgaggcaactattgagataaacaaagtttacgatattgctcaactggattcgcaagcaatcacagctctccttgcttctctccaatctggggctatgcgattgattgattttgttaagtacctgcaaagtatcaatatcatccctcaagatgagaaagctgaggatgttatcgaagagatagaattatcgcgagctaactcaatgatgtag

SEQ ID NO: 294428 - DNA, 1485 bp, Proteus mirabilis
atgaagccagaacatcttgcattattgagagataagctctggcgattaaatcacctctactggataaccaataaagaaggcaagccagttcgatttaaaatgacgcctgagcaactcgaatattttgaagggatgcacacgcgaaacattatccttaaagcccgtcagcttggcttcactactgaggtctgcattatccagctagacgcagcgttatttgaggcggctaaatgtgcattgatagcccacacacttaacgatgctaagcggctatttagggaaaagataaagtatgcctatgacaagctacccgatgaaatcaaagcggctaacccagcgagtaatgatgcggttggtgagttggtgtttagcaaaggcggctcgctttatatcagcacgtcatttcgtggcggtacactccgttatttgcacgtttctgagttcggtaagatatgtgctaagtatccagagaaagcccgtgagattgtcactggcgcatttgaggcggtatcaagcgattgttttacgacgattgaaagcacagcggagggtcgagcaggttatttcttcgattattgccagtctgctgagaaagcgcaaattcagaataagactctctctaacctagactggaagttctttttcttctcatggtggaagaatccagagtatgccattaaccctgttgagccattaccccagcggttagttgattactttgatgagatagccagcaaacatggtgttcaattaaacgagcgccagaaagcatggtattacgccaaagagaaaacgcttggcgacgatatgaaacgggaatacccgtcaataccgtctgaggcattccaacaatcggttgaaggcgcttactacgccaagcagttccgcttcctgtacgaaaataaacgcattggcacacttcctgataactcgcacttaccggttcacacgtactgggatattggtgtgggtgactcaacgtcaatttggtttattcgtgaagtgggcgaggagttccacattatagaccactactcaaacagtggtgaaggtctacggcactacatgaaagtactgaaagacaaaggctacacatatgcaagtcacaatggccctcatgatatcgataaccgtgagtttggctcggatgcgaaatctcggcgtgaattagcgcgtgaggggtacgaaatcgacggacaaatttactcaatccgatttgaagtagtgccgaagctttcagttgatgaaggtatcgaggcagtacgtgaaattctgccactttgcgtgtttgatgagcataaatgtagtgaaggcattgctcatctagaagcttatcgtaaagagtgggatgacaagcgaggctgttggaaagataaaccgcttcacgattacacgtcacatgatgctgatggatttagatattttgcagtgagtcgaagaaatactaaacggttgactaagaaaatagaatttaactggaactaa

SEQ ID NO: 294429 - DNA, 603 bp, Proteus mirabilis
atggctaaaagaccagattgggaggccatcgagtcggcttaccgagctggcgtgatgtccataagggaaatagcctctcaatacgagataacccatcaggcgataagtaagcgtgccaagaaagaaggatgggagcgagatttaaaggcaaaggttaaggctagggctgaaaacttggttgccaaaagggaggttgccagtctggttgccaccgaaaaggctatttcagaacggcaacttattgaggctaatgccgaggttatcgctaatgtccgcatggagcatagaggcgatattcgaagggctagagaattaaccaacaacttatttgatgaactatctgctgaatgtgctgatgtgccagccttaagaaaacttggcgagttaatgtttagtcctgatgataacggacgcgataaactcaatgaaatttatcactcaatcatctccctgcctgagcgcgttaagtcagccaaatcattaagcgaaacatttaaaaatttagttggccttgagcgtcaagcatacggccttgatgatgttcagccgaataagacagctagtcagctatcagaactaatggacgacttatctaaggaataa

SEQ ID NO: 294430 - DNA, 159 bp, Proteus mirabilis
atgaccaaacaagaaaaagcaaacttatccattctctatcgtcaattacagcaatcacttgaatacttacactgtggaagagttgatgatgggagaatagttgctgaaatcgtcgagcgcgagttaggcaagttagtcaacaaagagaaaaccaaatag

SEQ ID NO: 294431 - DNA, 207 bp, Proteus mirabilis
atgaaccacgaacaattcatagagcagaacgtactagccgagttaaaaaagctcggcttttctttacctgtttgtcgtagagcaagttacatggcggtagatcattatcgccgaagctctcaagcaagtagaaaagggcgaatgtttgacgactgcttacatattgccaaagtgtgggcgagtaagttcgctaaggagaaagtatga

SEQ ID NO: 294432 - DNA, 321 bp, Proteus mirabilis
atgttagctaatacagatgtagcgaaagccttgcgtcgatggttgcttgatctagctgaaaaagagtcaaaaccacaaacggggttagcaaaccttgacatgaatgagcttaaaaccctgactatcaatgagatgcaaaatagattagtagcagccgataactggtcgttcgagaactttggcaggaaaggtagtgacttaatgaatttacgcaagcgtcacttaaagaaaatacgcaaagcgaagaaggcaattaaagaactatcacaattaaccttgcctgatatgggcgaatttccagatggagaagagccagcatga

SEQ ID NO: 294433 - DNA, 276 bp, Proteus mirabilis
atgagcaaatcattagttttcaaaggtaatgaaattactccatttgataatggtgataataagatttggtttaccagctctcagatggctaagcttctcgaatacaaaaatgagaagtcagtaaccaatctatataacgccaacaaagacgagttttctgatgatatgacaatggtcactgaaacaatgaccaatggaataaacaacaacttacgtaagaaaaaggtcaggatcttctctgttagaaggtgcacatctaatcggaatgttagctaa

SEQ ID NO: 294434 - DNA, 462 bp, Proteus mirabilis
atgaaatacgggaaactctatgccgttattacgatggtaggcatcattgtgggaggctattgggtggttaattggcaagctaataggattaattcactgacagataccaacaaaaaactgacagtagctctcgaagaacagaagtctattaatactgattatcaagcacgcataatgcggttaaaccaactggatattcaatatacgcaggagttagcgaatgccaagaatgaaattagtcgcttgcgtgatattagcgagcgtcatcctgagcgggtgtatatcaaagccgagtgcccaaaaagcaaaaccacttccgccaccagcttggcttatgcaaccaccgcccgacctattgacaccgctatccgaaattattggttactcagagagcgaattgcagagtcagaacagatgattaaagggttgcaggattatatcaaacaagaatgcatggaataa

SEQ ID NO: 294435 - DNA, 471 bp, Proteus mirabilis
atgtctctcaaacagaaaatagcggtgataacaacagcaggagcaacagccatcgcgttagtagtaatagcccattttgaaggtgtacgttatgaaccttatcgtgatgtggcgggtgttctaactgtttgttatggacatacaggcaaagacattattcaaggcaagagatacacacaacaagaatgtgatgcgttattacaaatcgattttattaagacacaacagcaagtcgatgcattaatcaaagtatcactcgatgactacaccaaagctgctttatattcctttgcttttaatgtgggtacaaccgcatttgctcgctcaacattactcaagaagctaaacgctggtgatagagcgggtgcctgtgaagaaatgaaacgttggatatatgcaggcggaaaggtctggcgagggcttgtcagtcgtcgagaggcggagtcagcactatgtcatggaaacctttaa

SEQ ID NO: 294436 - DNA, 270 bp, Proteus mirabilis
atgcgtatggaaaaattaaccaatgtaacttatggaacagcaggcctaacggccttttttgccagtctctctttatatgaatggggatttgttatcgggatggcgttcagcatgcttctgggtttagccacttattttatgactcgtcgagaacaacgaaaacgcactcaattatttgaagagcttgttcgtcatgttgacccacaaaacccgaccgaaaccttaaaaaagcttgctgaattaatggtgaaagcgccaaaggatatttaa

SEQ ID NO: 294437 - DNA, 423 bp, Proteus mirabilis
atgtcaaaagagataagcgaattacagtttagtcttcactatgcctcagaaacagacagtgaaaagaatacctccatcattttaacggcgaatatccatacggctgatggtgaaactcaacaactgacacaattaatttgcacgacatcttccgcaggtaaaaagcaatatcgaatcggcttgcaaaaaattagtgatgctggtgctccattgctggtggcgattgaatcctattggcgtaaaaacacacaagagagttgtgtttatttgttagagaaagcgaagcaatttattcaaggacacttacaacaaacgaatacatggatatctatgtatggtcttgtgattgtttctaatgcgtcactggaagaacagttgcctgaaggtttattaaaggcacttaaagtatcaatccccgcctaa

SEQ ID NO: 294438 - DNA, 927 bp, Proteus mirabilis
atggatacgttgagccaactcttatacctttctcaagggcaattgcaattagatgtgttttgtcaaatgaaaggacatttttccttaccgcatgtttcatctgttgaacatgaaactatttttcacttagttctatcagggcagtgttatgttcagattgaaaaatcagcccctatagttttatccgaaggcacttttttaatgttaaacagaaggcaatcacataccctttggagtggagaacgagatatagaacctcccccttttttgcataaaaataatggcttcttacctgttaagtacacaaaatctgaagatcagactcaacatgttgatttgctttgcgggcgaatgacttatgctaaaggaagcgggttactattattaaatgggtttcctgatatggtagtggcaaatctggtggaaatgccagggctaacagtattgaatttatttagccagttgcttcgagaggaagccattaatgcaaatcaaggggcggctgcgatattaaatgggcttgctcagactttattcgcttttgcattacgtgtttatgggcaaaaaccagatataaactcaagttggttagcattattagctgaacctcggttaagtcgtgtatttaattctatgttaaatgaaccacaaaaagggtggacacttgattctttagctaatgtcgcttcaatgtcacgagcgacttttgtgcgtcaatttaaagcaacggcgaatacgacacctggcgaagttctacaatccattcgtatgctaaaagcactttcattattacaacaaaataaatatacattatcagatatcgcagaaagagtcggataccaatctgaagctgcatttagtaaagcatttaaaagtgtatttaattgcagaccagggcagtggaagaagcaacagagtaaagtgtaa

SEQ ID NO: 294439 - DNA, 336 bp, Proteus mirabilis
atgcttaattggaatgaatatcgaaaacaattaatggggcgtattggtgagttaggaaaattaacacctgatacggttactggctaccaagcactttccaatgcaggtaaaaaaactaatcatttagatgcaaaaacaagagaattaatcgcattagcagttgcagtcacaacacgctgtgatggttgtatcgccgtacatgctgacaccgctttaaagttgggtgctagtcatgaagaaattgcagaagcactcggtgttgctgttgcattaaatactggtgctgcgatggtttattctgctcgagtattggatgctattgcacctgaaaattaa

SEQ ID NO: 294440 - DNA, 384 bp, Proteus mirabilis
atgcgtgatattcagcaggtattagaacgatggggcgcttggtcggcagataatacagaattggttcaatggtattcagttgctgcggggtttagtggattaataccaagcaaggttaaagctcgtccccaatgctgtgaagatgatgcaatgattatttctagttgtatggcgcaattgaataaaaagaatagtgatatgcatgacttactgcttgattactatttattcggaatgacatttatgcaactagctaacaagcacaactgttctgatggacacataggtaaaaaattacaaaaagcagaaggaataatagaaggtatgttaatgatgctagatgtctcattagagatggatcgatacgtagaaaaaattacataa

SEQ ID NO: 294441 - DNA, 960 bp, Proteus mirabilis
gtgaagacggtagaggcagtaataggtcgatggcctgagatatttgaatattacaaattaccgccaatcacagggaaaaaacactatcaaggggaatgccctatatgcggaaagaaaggaaaattcaggatagataataaaaacggtaagggaacttggatatgctcatgtggtgctggtgatggctggaaactactggaacttacccagcaaaaagattttagagttttagcaagtgagatagatcggttaatcggaaacagttattcaggccaagtagtaccgcacgcaaaatcagatgtaaaagccactcgttcaaaagttatcgcaaggttcgcttcactaatcccacttaaagatacatcagctcatagatatttgatgagcagagggatcaacgttttaccatctcagcacgtcagatacagtaacacacaacaaaatggatttacttcgctctggtcaattgcaacagatgatcgtggtgctggctgttatctgcataggacgttcttagagggcgaaaaaaaagcaaactttgaagggaataaacgacttaccaagttacaggaagataactatttagattttgctggctctattgcaattcgaatgaccccagtagcatcaacgctggggatcgccgaggggatagaaacggcgctttcttgtaagcaactctatggtgtaaatacttggtcggtcatcaatactaacttcatgaaaaaatttaaagcaccgaagggggtgacccaccttgttatctttacagatatggattggaatgcagctggtcacgcggctgctatggagtgcgctcataaaaatctactttctaataacgatgtagaaacagtcagtgtgagatggcctgataatggtgattttaacgatatgttaacagaagcctgtgaagtaagagaattggtattttcaagacaacataaggaagtggcgtaa

SEQ ID NO: 294442 - DNA, 1638 bp, Proteus mirabilis
atgctcagtataacgccaaaagctaagcaagtcactgcactggatatgctcaggaagaactggaatcaacaccgaacgatgttactttctgcaagtgttggatttggtaaaaccgcgatagccgcattcgtggctgacggtttagtttctaggggaatgagggtcatgtttgtcgccccctacacagtgctgattgaacagactgcaacacggtttgttgagtacggactgccagtcgatgagattagttacttgtggcgcgaccacccactgtatgaccccagcaagttgattcaaattgcatctgcagacacgttaattcgccgcaaattccctgacaacattgatttactcatcatcgatgaagcccacatgaagcgaaaaaaaatactcgaaattatccgagatacggatattcgtgtagttgggttatcggggacaccctttgctagttggatgggcgaatactacgaaacattgattaaaccaacgacgatgaaggagttaatcgaaattggtgatttgagtccttatgaattttacgcgccagataatcccgatgttagcggtgtaaaaacatcaaaactatcggcatttggcaatgactacaacgaggagcagttagccaaaatcatgggcgattctgatttagtcgggaatatcgtcaaattttggttagaacatggcgaggacaggccaacagtttgcttttgcgtcaatgtcagccatgcaaactacgtcacgatggaatttaaccgagcggggatcaacgctgaggtgatgaccgcagagacgccacacgatgaacggcagttgattattaaccgttttgagagtgggtctacaaaaatcatcgttaacgttggtgttttggttgcagggttcgatagtgacgttcgctgcatcatctacgcgaggccaacaaaatcggaaatccgctgggtccagtgtcttggtaggggattgagaacagcaaaagggaaagacaagtgtctcatattcgaccattcaggatcagttcacttgttgggatttcctgatgaaattgaatacgacgacctgcaaaacaaaaacgatggcatgaaaacccaaagcagctaccgagatcaggtcaaggtagagaaaaaaccgaaggaatgcccatcttgtcactacatgaagccggcaggtgtttacgtttgccctaaatgtgggtttaaaccactcgctggggaaaatgttcaagtcgatgaaacgcgagaactcaaaaaactgaaagcaggtgaacagatatttaccaaggagcaaaaacaaagttggtggtcacaaatcaagttttatcaaaaacagcgtgagatatcaggcaagcctatttctgatggttggtgcgcccacacgtacaagaaaaaattcggggtatggcctcgtggattacatgatacaccgcaagagataactcccgaagttagtaattatattcgttcaaaaaatatcgcttttgcaaagatgcaagcgaagaaaaatacaaaagaggtaaaaccgaaaacagaggctgaaaaaatagcatcagcaaggtcacacttggaagatatacgggaaaagctcagcttaggaggtaatcgtgaagacggtagaggcagtaataggtcgatggcctga

SEQ ID NO: 294443 - DNA, 435 bp, Proteus mirabilis
atgagaatatggtcaagagttttttacgcacgagagttttacaagcgtttgtcaaaagtatcccctaccgccactgagctatacgggctaatcactgacagttgcgactggagatatggacggtatgtagcgacgagggctgaggtagctgagatcctcaacgtgagcgagagaagcattcagagagccaacaaagagcttgaggcggtagggttaatcaagtttaagcgtggcatatacgcaataaacccagagtttaactggggggggaggagttggaatatatcgaaatcctgttactacacgatggacaggaaaggtgctcaagttattgattttaatgacgcagcagaagccattaactcaaaaaaacttgaggaaatagcccgaaaaaccttgagggaggtaaacgggcgtaacgcaaaaaggaattaa

SEQ ID NO: 294444 - DNA, 327 bp, Proteus mirabilis
atggataattatgagtataacgtcaatattttaatgccaaattgttattttgaacaagatgagaaatggattaaggaaatgttattgaggctaaggccatcgataagagcaaaggtatcggttaaatattctgaagtttatcaagagcatttcgacgatgaacctataccttacaaaaaaataaatgctggtagaaaggctgcaaatacacggttaagaaactttgtaaaaaactactcttcctacctcgatggatatgtttccgaaccgagagtttttcaacaaggcactggtcagagaaaccaaccctctcaaggtgtcgcctga

SEQ ID NO: 294445 - DNA, 348 bp, Proteus mirabilis
atggaatgtgcaaaaaatatcaaagtagagtgttcatcaaacgaattgatgacattttacattcaacaaatgtattcaatcggtaataacggactcgctaaagcgctaggaatacacccatcaaaatccagtcgagataaagccagaatattcgatttagcttgccagttggtgagtaagttcggattaccccctgactctgtaaatatcagtgagaagccaacgaaagttgttattgaaggtgattatgcagaaagggttattcaggctcttgaagggaagggaaaggttaaaagaaaagccccagagacggcaatcaatgaggctcagatcagtttaaacatttaa

SEQ ID NO: 294446 - DNA, 210 bp, Proteus mirabilis
atgaacaacataagtcgctatagaaaaaaattgggaatcacccaaaacgacttagcaaaagagcttggatgtacaaaaggaaatgtcagtcattatgaaaacggtagacgtaaggctgacttagatgtttgtagaaagctcgttgatttctttaataaaaaaggtgtgaaagtcacaattgatgacttgtttccacctaaagttgcttga

SEQ ID NO: 294447 - DNA, 684 bp, Proteus mirabilis
atgtttgtatacataacgtataatgctggtatgaaaatgaaatggtacgaactagccaaatccttaatgaaggaaaaaggcattacttatgatgatttagctgagcgcttttcggtttcgaaaggtgccgttggtcattggatgaccggcaaaagagagccatctctgcatgatatagcgggaatactggcgtttgttggcgtgaataatgcagttattaattcagatggttcgattagcatcgaaaaagaagatattaatcatcaaccaccaatttaccaataccctctattcacgaaggtacaggctggcgctttctcaacagaatttaactcatatactcagaaagatgctgtgtcgtggattcctacggctaagaaagccagtgagcgcgctttctggttagaggttgaaggtcaatcaatgacagcaccaccaggaggtaaaccaagctttcctgaaggaatgcttatcttggttgatcctgaggaagaagtagagttcggtgacttctgtgtcgctcgtttgctaaatgatgagttcacattcaaacgattgattagagaaggtggagttgagtatctggagccattaaacccacgctatgacctgatccctattaacgggaactgcacaatcataggtaaggtaatcaagtcacaatggcctgacgacacgttttag

SEQ ID NO: 294448 - DNA, 969 bp, Proteus mirabilis
atgacgaatgaagttattattgagacacccgacccagaagatgaagacaaaaacgtaataaaggcaatagcaggagcaaaggataccccccttatgcttggcgaagccagacttgaatgttatgtcctggaagatggaaccagggtattctcaggaagcggcttacaaaaagcactaaacttcccagcgaacgcaggtggtagtgcgcttttaagcatgctaaatactgggtcactaaaagaaaagctaacttttgacatcctggacaaaattgaaaatagaaaagaatttataaggcctggagcaggcggtaaactatctagaacatatggatatgatgcaaccttactcatagacatttgcactctattaatagaatgcagagagaacggctctctaacaccaaaacaagaagagtacgcaaaaagagctcaggtaataatcaccagcgttgcaaaagttggtattattggtcttatcgatgaagctacagggtatcaacaccagagagagaaagacgagttacaaaaaatattaagtgcctacatatcagaggacttattaccatggcaaaagcgcttccctgatgttttttataaagaaatattcagattaaacggatgggattataccataaaatcaataaagaaaagacctggtgttattggcacatggacgaataagctaatatatgaccaattgccgccaggagttttatcaaaattaaaagaaaaaacaccaaagagctcttcaggcaacaacacagccagatatcaccagtctcttactgaagatgtaggcgaacccaatctcactgcccaaataaataaaactattacattatttcagttatccgataacatgcaacacatgtggcaacagtttcaaaagcttcaagagagacaaaacggacaagagcaaatggaaatgccatttgagtttgatgaaaaaggccataccaaagattaa

SEQ ID NO: 294449 - DNA, 318 bp, Proteus mirabilis
atggcaactattacagttaaaaagtcacgcaagcctgagtttttacgtggagcatctgcaaatagacgtcacgccagacggaaagcagaagctattgcaaaaaagaatattgaattgaaattagaatcagtattccctcaagagaaaagacttacatcagtagaaaaaacactgtcattaagtcacataccagttactagaaatattgaacctaaattcaaaccatcggtagataactgctgcttacctaatgtagcagtatattcaggagttaaaacaaaacagccgagcagtaagttcggggttacggcgagatag

SEQ ID NO: 294450 - DNA, 207 bp, Proteus mirabilis
atgaataatgaaactgaaattgagcaagcaattaaagagtttaaagaaagtggtgagttaagtacttttcatattataaaaatagctaatgaggtgatgctaaaaataagaaatgaaattaaaccatactctaacgatgataatttcaactcaaactcaatagcaagagccatactaaaaacagcccttgcagcattagatacttaa

SEQ ID NO: 294451 - DNA, 213 bp, Proteus mirabilis
atgagcattaaagtaatttctgatgacaaccctgttaaacgagttgcttttgatatggcgctagctttagccgctaaacaggattctattaaaactcctgagcaacttatggctgaaattgaatcgctttatcctgagtgtttagaagtggctgaaaagcaatacaaaaaagagactccacctcctattggtttttttacaaaaaaacgttaa

SEQ ID NO: 294452 - DNA, 261 bp, Proteus mirabilis
atgggtgatgtaggagacgattttcgcgcatacaaggaaatggtaaaagagcggaaattagagcgacttaaaaataatacggagcaactaaaggatatagatattccgtacaccagagattcaagtggaactattcactttcaaacaaagaaaggaaaggttctattttatccaacaacaaacaaatatcagcacaagcgaagcgttaaacgaggcggactacttaaggctgttgagttagcaaaacgcctcggaatttaa

SEQ ID NO: 294453 - DNA, 177 bp, Proteus mirabilis
atgaaaactaactattacagcgctatgcgtgattgcatggcggtgcgcatcactacgccttttttacaactcgcacgtcaggcggcaaggattgccgtctcaaccaataacaagaaagtttggaaattagcgattcaactacagatgagagcttatgggagaaaagtatgtcactga

SEQ ID NO: 294454 - DNA, 276 bp, Proteus mirabilis
atgtcactgaccatacgttacacctatgcagatatgaccagtagaaaccgaaataatggcacggaaatagcctttcagaatcttaacgatgtccgcattgaaacagaatcattcagagagcttactcagtattaccaaccagagccatcagaagtcgttgattacgtcgttaatcagtatgacgcaaagtcactcgcagcagctattcatctctcaggacgaggggaagtagtcgcaaagatactcaatgagttgtatttcaggagggttgcatga

SEQ ID NO: 294455 - DNA, 153 bp, Proteus mirabilis
atgacaagacgtcaacaatggttagaagaattacgcaggaagcgtaaagaatcgcaggaacgcgaacacgatgaatttatgtatcaaacggaagtgttaggacgacaaggattgtcgataccgttaaaggattttgcaggagattttcaatga

SEQ ID NO: 294456 - DNA, 321 bp, Proteus mirabilis
atgaacgtttctaactcataccctaccgataaatacccccaattaacatcaccgtcattagcaaaaaacagagaggaagctctggcgcaagctattgcaatgattgaggggtgtttgccaaatacgagtgcgccagacagggaaaaacgattagcaatggaactgctacacatgaacttggacgcatcgaaaaatcaccctcctctacctgctcatattcaggcattacgtgatgcggaaaggaattctgcaccgagtaataagtttgaagtcgattactacggaagcgatcgccgtcagggtcaatatttaggggattaa

SEQ ID NO: 294457 - DNA, 495 bp, Proteus mirabilis
atgccgaatagtgaagaaagaaaatcaacctcatactattggatctacggtataatggtgaagtttgtcagtgaaacgtatgatctaataaggctgtttatgatagataaaaaaaaactacatattgctgcaggtgtgatttgtgataagcaaaataatgtatttattacccaacgccctttgacatctcatatgggaggatattgggagtttcctggtggaaaactagaagataaagagacgccagagcaggcattataccgtgagttgcaagaagaaataggtattaatgtgacgcaatgccagttgcttgaaacggtagagcatgattttattgataggcatattacattatcattctttttagtcacagagtgggaaaataaaccttacggtaaagaggggcaactttcccgctgggtacctattatgtccttaaatgccgaagattttccgccagctaatcgctctattgttgccttattgcaaaaataa

SEQ ID NO: 294458 - DNA, 216 bp, Proteus mirabilis
atgagcgaaaaattaatagtgaaatgcccaacatgccgaaccgaggtaatatgggatgaaagtagcccttatcgtcctttttgttgtaagcgttgccagttaatcgatttaggcgaatgggcggctgaagagaagcgaattccaagtcaaagcgaaagcaatgacagcgatgaatggagtgaaatgccagagcaagatcctaagccgtttaattaa

SEQ ID NO: 294459 - DNA, 753 bp, Proteus mirabilis
atgagtgaagaaacctcaacaattatttttgaacacccgcttaatgagaaaatgcgttcatggcttagaattgaaaactcattaattcaattaaatagttttcaatctattaattcattatcttctgcattatctttttttcgtgccgtttcagaatttattgaagttttagatcgcggggagatccgcgcagagctacttaaagagttagaaaaaagacaaaaaaaactgcaacagtggttatcctttcctaatgtcgataaagagattgtcagtcatattattaatgagttatcagaaagtgcttgcgcattaagtaaagcaccacgtattggacaacatttaaaacaagataaaatcatcagcttagtaaaacaacgcctcagcattccgggaggatgttgtagctttgacgtccctactttgcatttgtggttaaatcttcctcaaacggtgcgtactgaaaagttaacttgttggcaggaagggttatatcctctacaaaatgcattaaatgccttattaacacttattcgtcaatcagatacatttaagccggtattaagccatagtggtttttatcaagacagtacggaagaaggtgaattattgcggatcaagctacttgccagccagcaaatttaccctcaagtctcaggacacaaaaaccgttatgctattcgctttttgcctcttgatagtgagcatggcacaatcccttctgaactaccttttgagatttcatgttgttaa

SEQ ID NO: 294460 - DNA, 615 bp, Proteus mirabilis
atgacttatacagttgctcttacaggtggtattggtagtggtaaaacaaccatcgctaatggttttgcctcactcggcgtccctcttgtggatgcggatgtcattgcccgattagtggtagagccagattcgccgggattaaaagccttacagcaacacttcggtgacacaattttattgcctgatggcaagttaaatagagcacaattacgtcatattatttttcaaaatcaacaagaaaaagcgtgggtaaaccagttactccatccacttatacaacaagagacgcaaaaacaaattcaacaaattcgcgccccttattttatttgggttgttcctttattagttgaaaataaactaacacatttagccgatcgtattcttgtggttgatgtgactgaagaagaacaaattaccagaactatgcaacgtgatggtgtaagccgagatcatgtactcaaaattttacaagcccaagctaaaagagaacaacgattagccgttgctgatgatattattgaaaatcacgataatagcttaaatcaagatgaacaaataaaacaacttcatcagcattacttagaattagctcaaaaaagcaatacaggacaatag

SEQ ID NO: 294461 - DNA, 1200 bp, Proteus mirabilis
atgaaattacattttatctatcgctataatgcattaacttatcaaggaaaatggctaagtggcaacgttgtcgctcaatctaaacatgaagttattgatcaacttattcaacaacaaaaattaccagtaaaaattcgcctatatagggtaataatctttcaaaatagtgataaacaataccgcattcaacttcttgaacagttagcgttattacttcattcaggcttagcacttttgcccgcattaacactgcttaaagaagaatgtcgttatttacattggcaatgtgttttaaatgatattatttttcacctaaatcaaggaggcgcgctgtctaaacagttaagtcgttatccactctattttcctgctaatttaacccattttatttatattggtgaagagagtggtaagcttgatgaagttctcttattacaaacaacacaattaaaaaaccagcgggatttaataaaaaaaataataaaagcttttcagtatcctctattcttattattaacattaatcgttattacaatatctatgttgatctatgttttacctgaatatcaatctttatacagtgcatttaatactgagctaccgatgctaacattaaccttaattagatgttctcaatggttttctcaatatagtttaattatcctgctgtttatattaataatttcttatagctattacactattaaacaccatagtgctaaatttcgcgacattgaacaacgatgttggcttaatcttccttacttgggggtcttattaagatatcaccagctacatattatttttcagataatgacgattacacaacaagctggattaccactgttacaggggttaaaaattattacagagcaattaacgcattcactgtatcaacgagcactcactgatatgatagcgcatattactcaaggcaaatcacttagctcatttatgcgacataatcctctattcccgccaatctgttatcaattgatctcttcagcagaaaattctggacaactacagtttttttgccagcaacttacccactggttttatcatcaattagaagaacgccttgatagtgtaaaaacatggcttgagcctattttaatgacactgatcgcattgattactggcacgcttattattgcgatgtatcttccggtgttacaactaggtgataccatacattga

SEQ ID NO: 294462 - DNA, 1104 bp, Proteus mirabilis
atgaataatactatccatacagcaacagagtttattgagcaattgttacgtcacagccttgctcaacgtgtttctgatcttcatttagagccacaacaaaatagcctgagaattcgcgcgagaattgataatcatctagtgttgttttctccccctgacaatcaattagctaacgagatcctgacacgtttaaaaatcctcgcgaatattaatattgccgaaaaacgcctaccacaagatggtcaatttaattggtcttaccagaaaaacaattattcaatacgtgttgcgacacttcctactttatatggagaaaaaatagttttacggctcatgaataatctgcaacagccacaattagcacagttaggttttcaaacaattcacctaacactattaaaaaaatatcttactcaacctcagggaatgattttagtcaccggccccacagggagtggtaaaactttaacactctatagttgtttacaatatttaaataaagataatcgtaatattaatagtattgaagatcctattgagttacctctccatggcattaatcaaacacaaataacagaaaaagctggtattacttttgcaacaatattacgggcgctattacgccaagatcccgatgttattatgataggtgaaatacgtgatcaacaaacagcagaaatagcaataaaagcggcacaaacaggccacctagttttatcaacactgcatactaactctacccaagcaacactcgcccgtttggctaatttaggcatcgcaaaagatttaatcgactcttgtgtaaaattaattatttctcaacgtttagttcgttgcttatgtagcaactgtaaatacccatcacctgaacagaaaaatttcattattaataatcaacaaattatattacccaattggcaagcaacaggttgtcaattttgttattccggctacaaaggcagaacagctatttatgattgttttgaacttgccaagcaatcacttccctcaccttacgcactatttaactcaggtattgaactgataaagaaggggatcacgtctttagatgaagtttatcaagtagtcggagatattgaatga

SEQ ID NO: 294463 - DNA, 444 bp, Proteus mirabilis
atgaatacattaaattatcactcaacagagaatggattcacgctaatggaattgatgattgtgattgccattatctcaattttaagctcagtggcgatccctgcttatcatggttatatccaaaaggccgccttaactgatgtattacaaaccctgtcgccttatcgttctgcagtggaactttgtcactatgaacatcaatataaccaatgccatgctgatgccagttttatgcctcaacaatttcgtagtcgataccttactgatattcatgttgccaatggcgttattagtgcaaaaggtaaggctcaactagaagggctaaccatcgtaatgactcctgcaacaaacagtaaagagacacttccccattggcaaattaactgcacatcaactaacaccgcgttacaaacgctatgccataaggtttttaaatctcattaa

SEQ ID NO: 294464 - DNA, 543 bp, Proteus mirabilis
gtggagattaagcaaggctggctaacgggagtaaaacacgttccatcgccaaattatgacaatagacctgaaggtgaaatcccttcattgttgattatccacaatatcagtcttcctcctgggcaatttggtggaccttatattgatcaactgtttaccaatacgcttgctgttgatgatcatcctttttttaatgagattgcacatctgcgtgtttctgcgcactgtttaattcgccgtgatggtgaaattgtgcaatatgtgccttttacggcacgagcgtggcatgccggggtttccttctataaagggcgagagaaatgcaatgatttctcgattggtattgagctagaaggaaccgatgagtgtgactttacgccgctgcaatatcagcaattatcgacactcactcagcaacttattgaacactatccgggcattaaagaaaatattaccggacatagtgatgtcgcacctggtcggaaaacagatccgggacctcattttaattggtcatattaccgagcactattagcaaaataa

SEQ ID NO: 294465 - DNA, 786 bp, Proteus mirabilis
atggcttctagcaatatggcttacacaaagatccgccaaccaaagctttctgatgtgatagaacaacaacttgagcatcttattttagaaggcaccctacgtccgggggaaaaactcctgcctgaacgtgagctggcaaagcaatttgatgtatcgcgtccttcattgcgtgaagcaatccaaaaattggaagcaaaaggttttttattacgccgccaaggtggtggaacctttgtgcaagataacctttggcaaagctttagcgatcctctcgctcaactcctcagtgggcatccagaatctcaatttgatctgttagaaacacgccatgcccttgaaggtattgcggcttattatgctgcattacgcggtactgatgatgatcttgagcgtattaaagccagtcatgctcgcattattgatgctcatgataaaggggatatcgcggcggagtcggatgcggtattgcaataccaattaatcgttacggaagctgctcataatgtcgttttgctacacttattaaggtgtatggtgccaatgcttgagcagaatatccgacaaaattttgagtttctttatacacgtaaagagatgttaactgctgtaagtgagcatcgcacacagatttatcaggcgattattaatagagagccagaagcagcccgtgaagcttcacaccgccatctggcctttattgaagatgttttgttggatatgagtcgtgaacatactcgtcgtgagcgttctttgcgccggctccaacaacatcctgatttattttag

SEQ ID NO: 294466 - DNA, 2667 bp, Proteus mirabilis
atgtcagatatgctgaaaaatgacgtggatccgatcgaaactcgcgattggttacaagcgatcgactcggtcatccgtgaagaaggtgttgagcgtgcacagttcctgattgatcaggtattaaaacaagcccgtaatggcggtcttgatattgctttaggtggctctgtacacagtgattatatcaatactattcctgttgaagatgaacccgcttaccctggcaatctggaattggaacgtcgtatccgttctgctattcgctggaacgcagtaatgatggttctgcgcgcgtccaaaaaagatttggaactcggcggacacatggcgtcataccagtcttctgcaactttatatgaagtttgctttaaccacttcttccgtgctcataatgacaatgatggcggtgacttagtttacttccaaggtcatatctctccggggatctacgcacgtgcattcttagaagggcgtctgactgaagagcaattaaataacttccgtcaagaaattggtggtaaaggtttatcctcttatccacaccctaaattaatgcctgaattctggcagttcccaaccgtttcaatgggcttggggccactatctgcgatttatcaagcaaaattcttgaaatatttagatcaccgtggcttaaaagataccactaagcaacgtgtttatgcgttcttaggtgatggtgaaatggacgagccagaatctaaaggtgctatcactatcgctgtacgcgaaaaattagataacctgtgcttcgtggttaactgtaacttacagcgtcttgatggcccagttacaggtaacggcaaaattgttaacgaattagaaggtatcttcgccggtgctggctggaacgtgatcaaagtgatgtggggcgaccgttgggatgcactactacgtaaagacacttccggtaaactgatccagttaatgaatgaaacactggatggtgactaccagactttcaaatctcgcgacggtgcttatgttcgtgagcatttcttcaatcgttacccagaaactgccgcattagttaaagatatgactgatgacgaaatttgggcgttaaaccgtggtggtcacgatccgaagaaagtttttgcggcattccaaaaagccaaagaaaccaaagataaaccaaccgttattttagctcagaccatcaaaggttatggtatgggtgaaacggcagaaggtaaaaacatcgctcaccaagtgaaaaaaatgaacatggacggtgtgaaacatttccgtgatcgtttcaatatccctgttagcgatgagaaagtagcagaactgccttatatcacttttgataaagattcagaagagtacaaatatctgcatgctcgccgtcaggaactagaaggttacttacctgctcgtcgtactcgttttgatgaaaaattagaaattcctacactggaagatttcagccagttattagaagaacaatctaaagagatttctactactatcgcattcgttcgtgcgttgaacgtaatgttgaaaaacaaatctattaaagatcgtttagtccctattattgctgatgaagcacgtactttcggtatggaaggtctgttccgtcaaatcggtatctacagcccgaatggccagcaatatacgcctcaagatcgtgagcaagttgcttactataaagaagacgttaaaggtcagatcctgcaagaaggtattaacgaactgggtgcgggtgcatcttggttagcggctgcaacatcttacagcactaacaacttgccaatgatcccattctatatctactactcaatgtttggtttccaacgtattggtgacctatgttgggctgcgggtgaccaacaagcacgcggtttcttaattggtggtacttcaggtcgtacaacgctaaacggtgaaggtttacaacacgaagatggtcatagccatattcaatcactgactattcctaactgtatctcttacgatccggccttcgcgtatgaagttgctgtcattatgcaagatggtttagagcgtatgtatggtgataaacaagaaaacgtttattactacatcacaacgttaaacgaaaactatcatatgccagcaatgccagctggagcagaagagggtatccgtaaaggtatctataaactggaatctctggaaggcgcgaaaggtaaagttcagttactgggttctggctctattttacgtcacgtacgtgaagcagcacaaattctgtcaactgaatatggtattggttccgatgtgtacagtgtaacatcattcactgaattggctcgtgatggtcaagattgtgaacgttggaacatgctacatccatcagaagagcctcgtgtaccatacattgctcaaatcatgaatgatgcacccgctgttgcttcaacagactatatgaaactgtttgcagaacaagttcgcacttatgtgccagctgacgactatcgtgtcttaggtacagatggtttcggtcgttcagatagccgtgaaaatctgcgtcaccactttgaagttgatacttcttatgtgattgttgctgcattaggcgaattagctaaacgtggtgagattgatgtgaaggttgttgaagaagcaatcaaaaaatacaacatcaaccctgaaaaagtaaacccacgtctggcgtaa

SEQ ID NO: 294467 - DNA, 1872 bp, Proteus mirabilis
atgtctattgaaattaaagtccctgatatcggcgcagatgaagttgaagtcaccgaagtgatggtgaaagtcggtgatcgtattgaggaagaacaatccttgatcaccgtagaaggcgataaagcgtctatggaagtgccatcaccacaagcgggtattgttaaagagatcaaaattgccgtgggcgacaaagtcgaaactggctctcttatcatgatctttgatactgaagagggtgctcaggcacccgctcaagaagccgctcctgcgccttctgctgccgcacctgctgcgagcgaactgaaagaagttcatgtaccagatatcggtggtgatgaagttgaagtcaccgaggtgatggtcaatgtaggtgataccatttcagaagagcaatctctgatcacggttgaaggtgacaaggcttcaatggaagtcccagcaccttttgctggcgtagtaaaagagatcaaaattgctgtcggtgataaagtgagcacaggctctcttatcatggtatttgaagtagcaggtagcgcgccagcaccttctgcatcagctccggctcctgcagcatcagcaccagcagcctctgctattaaagatgttaatgtaccagatatcggtggtgatgaagttgaagtcaccgaagtgatggtgaaagtgggtgataccattgctgaagagcaatctctgatcacggttgaaggtgataaagcttctatggaagttccagcaccttttgccggtgtagtaaaagagatcaaaattgctgtcggtgataaagtgaaaacaggctcactgatcatgacctttgaagttgccggtgccgcaccagcagcacaagcgccagcagcgcctgcagcgtctacatcagcagcaccagcaccttctgctccagcaaaagcgcctgcttctgcaccagcagcaaaagaagaatttgttgaaaacgaagcttatgtccatgcaacacctgttatccgccgtttagcacgtgaattcggtgtgaacttagcgaaagttaaaggaaccggtcgtaaaggacgtatcttacgtgaagacgttcagtcttatgtgaaagagttaattaaacgtgctgaatctgcacctgctaatgccggtggtggattaccaggtatgttgccttggccgaaagttgacttcagtaaatttggtgaaattgaagaagttgaactaagccgtatccagaaaatctctggcgctaacttaagccgtaactgggtaatgatccctcatgttaacctgtttgatgaagcagatatcactgaggttgaagaattccgtaaacagcaaaataaagaagctgagaagaaaaaactggatgttaagatcacgccattagtcttcgtgatgaaagctgcggctaaagcactggctgatatgcctcgctttaacagctcaatttcagaagatggacagaaactgatcctgaaaaaatacatcaatatcggtatcgccgtagatacacctaacggtttagttgtacctgtgtttaaagatgtaaacaaaaaaggcatcttagagctctcttatgaattagcagaagtttctaagaaagctcgtgcaggtaaactgactgcatctgatatgcaaggcggatgcttcactatttctagccttggtggtatcggtactaccggttttgcaccaatcgttaatgcgccagaagttgcgattatgggactgtctcgttcttcgatgaaaccagtctggaacggtaaagagttcgtaccacgcttaatgttaccaatgtcattatctttcgatcaccgtgtgattgatggtgctgacggtgctcgatttatcactctgattaatcagtacatgagcgatttacgtcgtttggtaatgtaa

SEQ ID NO: 294468 - DNA, 1428 bp, Proteus mirabilis
atgagtactgaaattaaagcacaggtagtggttctcggtgcaggccctgcgggttattccgcagcgttccgttgcgctgacttaggtttagatacagttttagttgaacgtcactctacattaggtggtgtttgtctgaacgtggggtgtatcccttctaaagcgttactccacgttgctaaagtaatcgaagaagcgaaagcattatctgaacacggtgtcgtttttgatgcaccgaaaacagatatcgacaaaattcgcatctggaaagacaaagttatttctcagttaaccggtggcttagctggcatggctaaaggccgtaaagtaaatgttgttaacggcgaagctcgattcacaggctcacatacattgtctgttgaaggtagtgaaggtacaacaacaatcactttcgaaaatgctatcgttgccgcaggctctcgtccaatcgaattaccttttattccacatgaagatccacgtgtgtgggattcaacagatgcactacaactgaaaacagtaccagagcgtttactggtcatgggtggtgggatcatcggtttggaaatgggtaccgtttatcatgcgttgggttcacaaattgacgtggttgaaatgttcgaccaagttatcccagcggcagataaagacgtagttaaagtctttactaaacgtatcagcaaaaaattcaatctgatgctagaaaccaaagtgaccgccgttgaagcaaaagaagatggtatctatgtcacaatggaaggcaaaaaagcacctgctgagcctcaacgttatgatgctgtattagttgctatcggtcgtgtaccaaatggtaaattattagacgcaggtaaagctggtattgaagttgatgatcgtggctttatccatgttgataaacaaatgcgtactaatgtacctcacatctttgctattggtgatattgttggtcaaccaatgctggcacacaaaggtgttcatgaaggtcacgttgctgcggaagttatctctggtaagaaacattactttgatcctaaagttattccatcaatcgcttatactgagccagaagttgcatgggttggtatgactgaaaaagaagcgaaagagaaaggtgttagctatgaagtagcaactttcccttgggcagcatctggtcgtgcaattgcatcagactgtgcagatggtatgactaaactgatttttgacaaagaaaccaaccgtgttatcggtggggcaattgtcggctctaacggtggtgaactgttaggtgaaattggtctagctattgaaatgggttgtgatgctgaagatatcgcattaaccatccacgctcacccaacgctatacgaatcaatcggtatggctgcggaagtatttgaaggtagcatcactgacctgccaaatccaaaagcgaaaaagaaaaaataa

SEQ ID NO: 294469 - DNA, 13863 bp, Proteus mirabilis
  misc_feature (5766)..(5775): n is a, c, g, or t
atgtcaaaaattttaaaagatttagagtttacttttacaggaaaacgttatggtacagatggaaatgacgatattgatgccataggttttggagggatcatttatgcaggaaagggacacgatacaatcacagtcggaacatttgcagttaccgcttacaccggagacgggcacgattttgtcagagggggaagtgcttatcttaagattattgatgagaacggtgatttagatgtcagaggattaaatgcatggggagaaattgaaaagtccggtcatggcgatctgaaatatgttggtgcttctgccgcgattaagattaatcatactggatatgaatatggaaatatcaattattcaggagctgctattgcaaatatcatcacccgtaaaggcgcaattagtaatatcaactaccaaggtgctggcggttacaatcaaatttggcatgaaaccaatactggcaatatgacgtttaaaggggggggaggctataataaattggttcgtacttggtttaatagctatcaaaattcaaaaggaaatattaattttgaaggattaggcggaggcaacggaatcttctctcgcgttgaaacaggtgatattaaatttaccggaggtggcttagaaaacgtcttaatacgcgaaggtaaatcaggcgatatctttatgtatggagcaggagccaataataggcttacacgtatcagccgaaatactgatacctataaagaaacaagtggcaatatctatttttcgggggggggaggttataatcatatctattccaatatagcacaaggcaatatcacattttatggagctggggcttacaatgagatcattcgtacaactcaagttcatcctcataatgatttattagttgaatatacgaaagctgaaaatatttttctaacaagtgcttatatgttaaatctagacttagataaaagtattaattttctaacaagtgataataagcaaaatttcgaatccggtaaacctgttgaagtaaaagcgattaaatcattgcgagaaccaaatacttatttgtttaaaacaccgggcccaggggataccaatttattcatatcagactatggtcgtcgagattatacctttaataaagtcaaaatttacaatgatcctgaaacgggaaaacttcaatacgattccgaactttggcgtataacgcctgatagtggggacattaggaacatacgttttgataaaaaaaattttgaggatacctataatcttagtgtggtcaataattgttggaatacattagaaaaacaagaaattatcgaatcaccacgtttcacaaaaataaatgctgatagccactatcaattatctaatttaaaagtatttcaacacattaatacagaacaaatccaaagaaagtctctagaaacaatcaagttgggcgtagcacaagaactttttaaagacgataattctgctgaatgctctggtgatatcaatttcacaggtggtggcgctggtaatgtcattaaatctgatgttacacaaggtgatatcaattttacaggtggcggcatagcaaatgtaataaaacataactctaattatggtaataccaactttactggtggaggcgcagccaacatcattgtaaaaaaaggtcaaagaggagacctaacatttgatggaggaggattagcaaatgtcttactacatcaaagtaaagaaggaagaatgaacattaatgctactggtgccacgaatgtattaatccgaattggtgacggtgaatataaagcacatcttacggcattagggaatgtttctattcacaaaggacaaggtgatagtcatatcacaatgttaggaggattaaatacccatacccagattgatagtcatcagcgtgataaggctttatggcgagcattaggcggacttaatgtcatgacacaagtcggtgctggtactattacatcgttactcggcggcggtggaaatgtcctgactaaaatgggtgaaggcgacctaagtagcatcatgttaggtggtgctaatatcattacacatatcagcaataacaaaataaaatcaaacacttacactatcaccctaggtggattaaatattttaacaaaaaaaggtcaaggtgatattttagccataatggggggaggtggcaatgtcctaacacatatcggaaacggtaacatacatggcgttatgcttggaggtgccaatatcttaactaaagtaggtaatggtgatctttcaggcattatgctaggtattggtaatgtactaacacatgttggcgatgggcaaaccctaggtataatgggcgctgtggggaatattttcactaaagtcggtaatggaaccagtatgggtgccatggtcggtggtggcaatatattcacccatataggtaatggtgaagcttgggcactaatgggaggtttaggcaacgtctataccaaaataggcaatgggaatactttggcactaatgatcgccaaagggaatgtgttcactcatgtgggtgatggaatgtcggttgctctaatgttagcgataggcaatatagccacaaaagtgggcgatggcatgacattagctgcaatgattggcagtgctaatatttttactcacattgggcatgaagaaacctttgctgcaatggtgggtaaaggtaatgtccttaccaaagttggcaatggattaacgttgggattaatgctaggtgtggctaatatttatacccatgtcggtgatggcattggtattgggctgttttctggtaaagcaaatatcatgaccaaagtgggtaatggaaccacattatcagcgatgtttggcaaagccaatattatgacccatatcggtgatgggataactggcatacttgcattaggccaagccaatatcataacaaaagtgggtgatggcattgcgggaatcattgctggtgcgaaaggaaatatcgttactcatgtaggtgatggaataaccgctgcgatcctcggcggaaaagcgaatattttaacaaaagtgggtgatgggctcaccgtaggtctgctgatttcaaaggtgggaaatattatgacccatattggtaatagcaccacgattggttttgccaaaggcaacgccaatatcatcacaaaagtaggctatggtttaggcattaatgcggcatggggtaaagctaatattttcactcatatcggcgatggtgaacgatataacttcgccaaaggaaatgccaacatcattaccaaagtaggtaatggacaagaaacctctgttgttaaaggtaatatcaatattattacacacgtaggtagtggaaataattatactggtgcatggggcaatgggaatgttgtaacacaaattggtgatggtcgtcaggtcgccttagcaaaaggtcatgcaaatattgtcactatgctcggaaaaggtgacaactatggcatagtttggggtaaagccaatatttcgacaaaagtaggtaatggcacgcaagtcaccatagcaaaaggccaagcaaatattacaacaaccgtaggtgatggcctaggtgttaccgttacatacggcaacgcaaatatcaatactaaagtggggaatggtgtatctgtaaacgttgcttgggggaaatataacgtaagtaccaaagtgggtgacggcttaaatgtttcggtcatgaaaggtaccgctaatgcaaatatccatgttggtaacggtttaggtattaacgcctcttacgcaaaaaacaatgtcatcgttaaaattggcaatggtgatatctacagcttatcggttgcttctagtaatactcaaagtaataaactcgctactttcttcggcaatataaaacagagtgtacttggtgtggtcgggagtcaggctattaactatttagtacaaggtgatgatgtaaccacttccggctcccgcaaaggcaaaggcgctattcatttaattgaaaaatcttcaatcgacggtttcaaaatgaacaaaatcgacgaagtgaagagtaacattgatataaatttaaaaggtcatatcacagaggtagaaacccctagtttaagtgatgttaatacagatgaatccaacttaaccaataacagtccgaatttgatcataaatggtgactttaaacatggatttaaacctgtaacagaaggttggaatattgcatatactcaggataaaattacagcaattagccaatatggacatagagcctctattgatacaccaactaatactaataataaagattattgggatggtggacttatagcagaatacaaggaagaatatgaaccaaatatcgctatatatcaagatattagtggtttaatgcaaaatgaggtgattgaattaagttttgagtatgaacgacaagataatacgccaacagagaataaattaagtgttatctggaatggtgaggttgtcttcacttcatcaagtgatgataagtcaatagcatggcaacaacaacaaattaaattaaccgcaaatgcagaaaataatcgtcttatttttaccattccaggctctgatggcttgcaaggaaataattacagactaagaaatattgtcgctaaatcagctgtagcaaatataaacaagcatatctcagattctgatgcgacaaaaaatgccctcgctgacaaaaagaaggcagatgccaatcgtcaaaaactaactgatgaaaaacaacgcctattagaccacatctctaccacacagactgaacttgaatcgaccgatcaccttgcactggagaaaaacggccatagagaacgcgatgccattcttgaagaagctaattcagtaacacacaatttgaccacagttggtcaaacactggaagtactcagcgaatattcacaagatgcccccccctcagatcaaccatggagtgagccattcgcggaaggaattttaaaggatgtacagaagagcttaattaatactaaaaaaattgtttcagtgcctgttaataatattaaaactcagtatgttgcaaaccttacaaaggtgaaaaaatcgataaaaaaatcggaatatggcgttattcaaagtgaagaacattgtcaagaagtgcaactcgatacttccaaagcaaaaaatgatgcagataaaagatactcagacgcgatagataaaaaaaatagtgctcaaatggcagagaaaaaagcatcaaccatggtggaagatgcgagatcacgaggagatacggagcaaaaaacagcgactagcatatcggataaagcacaaaaagaagctaaatctgttcaactgaaagaaagtgataaacctaatcgtcacagggcgcatggtagcggtttatccggagaagcggcctatgtagagggggctgatgataatccatccagttatatcaaaccaatatcaactaaaaaaaatgatggtcgtttcaataataaactgacaacatttaatcaagaattacttgatgatgctcagcaagccattaatcgtttaagcattaatgctgggatccgacaaaaatcggcaaacgttcttccctcttttacatcagaccttaatggagatgacgtagcaacctatcaacaaccttctcttcgttcaggcaatcttcaatatcacaaaataggagctatcgcggtcaatctttctggattaggcgaaagccccatttttgaaacgctaaaacaaaaattcaatgtaaaaattaagaatagaaatacttactttacttttattttnnnnnnnnnnaatagtggtcgtatccaaaaaaatatttatttggataacatcaatgatcccactcagcaaaaaataatagaacactttattttagctaattattcaaattttgaagcaatgcctaatgaacttcatttagaaaatgacaaaattaaatcaagtcataacaacaaagataggatacttgcagaatacgtagaacataaatggcaaatgctaactgattcaaaagtcatgtcagttgatgaactacataaagttgcaagtgttaaaggcaaaatacaaggcgaaagttataaatcaatcattacaactctctcggaataccatgaaaaagaatcgaatacaaactgcttaccaatagagaaattgagagtgctagctcagttgcgaaaccaaattgatggttacctattaggacaccccgactctgaacgcaatgatggattgaaacagttacaaactcaagtcaatacacgttataaacacgcatcggctttaatacaagatagtcacaccatcaacgctgatagcagctttagtcgcttatacgattcactttcaaatgccaatttaaaaagaagtaaacacatttatattgatattaacggacactttgtcactgaaggaaaaaacaatctgcaagggaaaaatagactaaccagcggaaaagaagtgattgagcgagtaaaaaatgccgtagaaaaagaatatggcgcaccgattgccaataaagtcttcagtcaatttgcaaataatgaattcgctgaaaacggcgagggtattgatgtttcagggttaaaaaaaattcacagagctattgagcgggaactatctcctcatagtgcaaccttatatatctggaaaccaagcaatcatagtaatttgggacacgccacactacaaataggtcaaggtcgcttactgttaaacacagaagacgcacaaaataatcataaagaaaactacatcagttggtggcctaacaaggcgaagtcatattttgatgtgatgggagtcccctcacaaccaaaagagtcgttagcatcggatgttgcagcagaagaaaatgatggctttggtttaaattacaaatataaagaactaaacagatatgaccgactcatgaatattgcgaaaggtgaaacggtcaccactgcagatgatttatctcttgcagacgcaaaaaatatattgacgatcccaaattatatagaaaattcaaaaataccgcgaacaattggacagccttttattgatgaatgggtaataactcagaaaaaactcaacaacatcgccacaaattttctagaagctgtacaaggtaaatttagtggaaataccataactataaatggtgccatgatactattgacagagcccacgttactatcaaaaagaaaaatcccactttctgttgcacagccttttattgaacaatgggataatataaaaacacaacaagaagatatatctattcaattattaaaagcgatgaagacttggatacaagaaggtaaggatccaacgttaacgaaaaaacgaattgctttagtagaaaacgaatttgctgagcaaaaacaaaaaagtattgacagatttaaaaccagcttacctgatgaaggacgagtattccgtattaatttagaggggttagacgttgctgctatgcaagctgaatggcaacgaattaaaaattcacctaatggtcgttatcatttattaacccaaaattgttcgagtatcgtagcgaaaattttaaaagcgggtggcgcagatgaactgattggctataactggcaacctaaatataatatttggacaccaaatcaaatgttcgcatttgctcaagagttacaagaagcgcaaatggcacgacaacaaagtagaatgattccacctaacttacacgcgttgtcaggttctgaaaatatccgtcaagagctagaaaacacctcccctcttatttctgctgaacaaaagctcaatattgtttttagtgaacaggaaacgggttttctactgacacaagcatcagatgaaacgaatgaaaaatttatttatataaaaaatggagataatcaagaacaacaaaaaataatgagtaattttatactcactcattatcgtgattttgactctatccctgagcaactttatttcttagataatacaatcgtgtcactcgataaaaaccattcacgaatattatcagaaaaagtcggtgaaaattggcaacctgttgcctattcgaatctaatgactgctgatgaattaacctccgctgcagaggtgacaggaaaagcacgcggtgaaaattataaagcgatcattcaatcgcttagagattatgaattacaaagtacaaatacaaacaacacaccaatagatatatttcagcaactatccacattacgtatacaaattaatagttatctgcttaaacaccctgattcaaaacgtaacgaagcattgcaacaattacgcgaccaagttgatatacgttataaacatgcttctatcttattaagtaatagccagcaagttgattcaaataatacttttagttatttatatgagattttttcaaatgctaacttaaaaatcaacaaacatatttatcttgatgaaaacggcaactttgttacaaaagggaaaaataatttacaaaaccaagacaaacttatcagtggtaaaaatgcaatcacaagcattaaaagattggtcgaaaaagagtatggcagtgaaattaccaatcaggtatttaatcaatttacagaaaatgaatttgcccaaaatggccatggtattgacctgtcaggattgaaaaaaattcaccaagcaattgaacaacaagtttcaccaatcagttctacactatatatctggaagcccagcaaacatagtcgcttgggacatgctgcgctacaaataggttctgggcgcttacaattagatagcgatagtgtgcaggataaccatgataataattatgtcagttggtggcctgccgggagcaaatcgctcgcaaacccactgaatattacaacagaaaaaaatcctgatttaaaattacgctggtatgatttaagccaaccagtgagtcgctcaacaaatttcatgactttacaaattgatattcaagaagaggaaaagacgaatttcaaattaaataaagatgaaggggaaaatgacaggcagttaaaagaatttagagataaaacgaatcttacccgaggtctcgaaaatattacacctgaaatcgcaggcttactgttgaatgctcctcattggataccagaaacacttatcccacctgaaatttcacacccctttattaaacagtggaaaagcccaaatagtaatctacttgaagtatcaacaaacttttcaatcgcagtgaaaaactggctaaaagtcgcctttccaacagcgatgattaaccaaacctttgcattggaaatcaagaaaattaaagaaattgaagaccgaaaaacagaaaatttcaaaacaagtgtcgctgatgatacaaatgatggcgtggtgtttcgcattaatctagagggacttgatgccgccgccatgcaaaaagagtggaagcgcattaatagccagtctgatcctcgttaccaattattaaccaagaactgttctagtattgttgctagaatattaaaagcaggcggagcagatcaactgattggtcatcattggaaacctcgatttggcatatggacaccaaatgagttgtataaattttctcaaaagatacaggaagcacgcttagcccaaattgcggtacaacaaggcaaacctatacattctaatttacaagcattatcagaccacaataaagtggctattgataatgacggtacatcaccaaacgagagaaaaaatcttagtccattaacacgtttttttaatgatcattttttcggcagctatgaacgtcgtagagacatgacaacggtgatgagaataaaaaatgaagaaaaaataacattaaaaggggatgcaggccgtcttacaggatcatattacagaggaaacgacaatattccagaagctaccgataagaaagtagtactatttttacatggttcaaattcccctaccgaaaaacaatcctctagtttttatcattattataaccaacaaggcatcgatatgttagcgattaacatgagagggtttggcgaaagcgatggctcgccaacagagcaaggaatgtatgctgatgcacaaaccatgttccgttatctcgttaatgataaaggtatcgatcctaaaaatattattattcatggttattccatgggggcaccaattgcggctaaattagccagcgatatttcagctaacggtcagcatatagctgggctattcttagatagaccaatgccaagtatgtcaaaagcaattgaatcttatgatgaatatagccttaagaaattgactggacaactcgcaaaaaaaatcaatggccaattctccgtagaaaaaaatctacagggtttctcaaaagatatccccattatattgctcactgactgtggcgagctgggcattggtggtgaaaaaatgcgcactaaattacttgataaaggatatctagttaaaggagaaagaaccgatgtttctcatttagagagccttaagttgatgaatcaatacggtaaacaaataatatcaagtttactatccccagagtatgtaaataacaccaatcacagaaatgcgttagattcgatacaaaacccgataaaaaagaataaggtgactgattgggggatggtatatgtaaaacccaatgataatgggggtgatagtcgttttgatagccagattattatccaaacagaggatgatccgatagtcgctcaagcagcttcggcacttgccgctaaacatgccaaaaatagtatcgtggtacaattggatgccgatggtcattaccgcgtagcttatggcgacccagcacaactttcaggtaaaatacgttggcagcttgttggccatggtcgtgaaacaaccgaaaataatcatttacgccttagtaactacaatgctgatgagctttccaatcaattggttaaattcaataccgtattcagcaaagaaaatcatatcaatacaactcctgaacatatcagtattgtcggttgttcattaataagtaatgacaagcaggcaggatttgcccaccagtttatcaatgcattagatcaacaaggcattcgtagtagcgtttctgctcgagtaacagaggtcgccgttgatagcaatggtcacaaatacaccaaagataacaacggagagtgggtagccaaacaaacccaaaacaaggtagtgttagattggaataaagaaggcaaaatcacgactgaatttgagcaaatacataatggtgttgctgaaggtgatattgatttgactaaagtaggtgcttcagctgacaacaaagtacgtggcgcaattgcagataataatgaagtctttaccgcccccaaaaaaggtaaaaaatcaaccaaacaaagctcatcaggaagtgataattcatcactaagctattctggcaatatccaagtcagtgtgggtgacggcgagtttacaacggttaattggggaacctctaatcttgggatcaaagtaggtactggcggatttaaatcactggttttcggtgataacaatgtgatggtacacgttggtaatggtgatagtaaacatagtgttgatattgctggctatcaagctttcgaaggtatgcaattatttgttggtacacgtaacgtcagctttaatctggggcgtagtaatgatcttattgtgatgttagaaaaatcaattccaacccctccactgatcaacccttttgatggtgctgctagaatcaccaaagttctagagtcaatcgcatgctcaggtgaaaataatgataatgattggttgtcggtacaaaacgatcagtggacactcgctggcgctaaaaaatttgccatagatatgtcaggaatagaccaaacgagcaatgttgactataaaacactgactgatctgaattcacagaataagcgtagtagccgtggattaaagagtgatctagaagccacactaaacaaaaaatataaccagtggttaggtggtagtggcaataacaacgagatgggaaaaatcagccgagctgagcaacttcgtcaactagatagtaaaatcgcttttaatttcgccattggtggtcaaggtgctgatattcaagttactgccgggaattggaacttgatgtttggtgataatatccagtctattatagacactaatcttggctcattatttggcttaatgacgcagcaatttacagcaactggtatggtgaaaaccacctttacttataccccccaaaacttaccaactaagttaaaaaataaattgctaggtcggttagccagcgtgagttcagacacgactctgggggatatttttggagtagactctaccgcagatggaaaaataatctctcgtaatggtgagcccattgatgttgtcgctattttgaaagatatgctcgctgtagtgactgagtttggaggtgaacaactgtccgcatttactgatccgactaaattattagataacctccaatcatctattaatctgggcaaggatggtattatttcatttgctgaaagccatggtttaaaagaaaaagcgacagaagatcaacaaaatgaatctgaagtttcaattaatgcccaaacaccaataacaacgagtcaaactgaaaatagcaagatcacagaggaaaatgatcgccctttcggcttcaattcgctaaatatccccaatctatttgccacaatctttaataaagataaacaaacagatatgcgtgatctcgcagaaaacctcaaagaaaatttagcagctgatgtactgaacatggagaagaaaacgctcgatttcttgcgtaatagtggtcatttaaaaggcgatggtgacatacatgtctctcttggcaactataatttcaactgggggggagatggtaatgatctcggcgcttacctaggagataataataatttttggggtgggcgtggttcagatactttctatgcaacggggatctcaaatatttttactgggggttacggaaatgatctcggcgtcttgatggggcgctcaaacatgatgtttggaggcgatggagatgacactgctattatcgccggtcggatcaataatgtctatttaggtgacggactcgataaagcatttgtctttggggaaggcggtgaaattcacactaatgcaggtaatgactatgctgtcactaccggtaactacaatcgcattttcagtggtagtgaacaagattttgttgtcacaattggtaaccacaaccaaatatccttagaagaaggcaatgattttgccaaaatttttggtaactacaataggttgaatggagggggcggtgatgacgaaattcaactaatgggttatcacgccgtagttgatggaggcgatggaaatgatcaactaattgcagcttcattctcgaaatttagccttcttaatggtaatacaggtaatgatattatcatattaggtggatatcagaaccacttcaaaggtggaaacggtatcgatagcttcctgattaataataatgtgattgattgttatatagacgatattagccaagaagataatattgtacttggagatattgattggaataaattatggtttgaacgcagtggctatgatttaaagatctcacatattcgcttcccacaaaatacaggggaacaagccacatttgagcgcattggctcaactacttttactgattatttcaatggtaatcaggcaaaaatcgttatcgcaatgactgataaagatcactctgatcagcgcgaatatacggctttatcaagcaatgcactcgctattcaaattcaggccatgagtacatttcctatgaaggcaggcgcatccggatttttcgataatataagtgatgaggctaaacaaatgatagccgtagcttggacagatacaatttcaggaaaaggcatattagtgtag

SEQ ID NO: 294470 - DNA, 147 bp, Proteus mirabilis
atggcaattaacgaaaaatttgtccaagaaatatcaagcattaattataataatagtatattttcactctattttgtcggtcaagatcctcataaaatagcacaaggtatcatgccagaaaaagatgaagaattagccctaaagtaa

SEQ ID NO: 294471 - DNA, 2598 bp, Proteus mirabilis
gtgctagaagaataccgtaagcacgtagcagagcgtgcagctgaaggtgtcgttccaaaacctctcgatgccacacaaacagccgcacttgttgagctattaaagtcccccccaaaaggcgaagaagaattccttcttgatttaattgttaaccgtgttccacccggcgttgatgaagccgcttatgttaaagcaggttttttaacggctctcgcaaaaggtgaaacaacatcaccgcttatcacgccagaaaaagccgtagaattattaggtactatgcaaggtggctataatatccatgcattaattgaagcgctagataacgacaaactggctcctattgcgacaaaagcactttctcataccttattgatgtttgatagcttttatgacgttgaagaaaaagcgaaagctggcaacgtttacgcgaaacaaattatgcaatcttgggctgatggagagtggtttactgaacgtccagaacttgctgaaaaaatcacggtaaccgtgtttaaagtgacgggtgaaaccaatacagatgatttatcaccagcaccagatgcttggtctcgtcctgatatcccattacacgctctagctatgctaaaaaatgcccgcgaaggcattgaacccgaccaaccgggtagcgttggcccgattaaacaaatcgaagcactgaataaaaaaggtttcccactggcttatgtgggggatgttgtcggaacaggctcttcacgtaaatctgcaaccaactcggtactttggtttatgggggatgatatcccttatgtaccaaataaacgcggtggtggagttgtattgggtggcaaaattgcccctatctttttcaacacgatggaagatgccggtgcattacctattgaggttgatgtttctaaattaaatatgggtgatgttattgatatttacccatacaaaggtgaaatccgtaaccatgaaaccaatgagttattggaaacctttgcactaaaaacagaagtactgattgatgaagtgcgtgcgggtggccgtattcctttgatcatcggtcgtggattgacctcaaaagctcgtagcgccttaggtttaccacctagcactttattccgtcatgccaaagcagtggaacagagcgatcgtggtttctcacttgcacaaaaaatggtgggacgcgcttgtggtcgtgatggtattcgccctggtgaatattgcgaacccaaaatgacctccgttggctctcaagatactacagggccaatgacacgtgatgaactgaaagatttagcatgcttaggtttctccgctgatttggttatgcaatcattctgtcataccgccgcttatccaaaacctgttgatgtaaccacccatcacacgttacctgattttattatgaatcgtggaggggtttcactgcgtccgggtgatggcattattcactcatggttaaaccgcatgttattgccagatactgttggtactggtggtgactcacatacacgtttccctattggtatttcattccctgcaggttcaggcttagtcgcttttgcagcggctacaggggtaatgccattagacatgccagaatcggtgttagtacgctttaaaggtaaaatgcaaccgggggtaacgctacgtgatctggttcatgccatcccactttatgccattaaagaagggttattgaccgttgagaaaaaaggtaaaaagaatattttctctggtcgtatcttagaaattgaaggtttacctgaacttaaagttgagcaagcttttgagctagctgatgcatcggctgagcgttctgctgcgggttgtacgattaaattagataaagcaccgattatcgaatatctacaatctaacattgtcttattaaaatggatgatagcagaaggttatggtgatcgtcgtacacttgagcgtcgtattacggcaatggaaaattggttagctgatccgcaattacttgaagcagatgcggatgctgaatatgctgctgtaattgagatcgacttaaacgaaatcaaagagcctattctttgcgcgccaaatgatcctgatgatgctcgtctattatcagaagttgcaaacagcaaaattgatgaagtctttattggctcttgcatgaccaatattgggcatttccgtgcagcgggtaaattactcgaccaacataaaggtcaattaccgacacgcttatgggttgcaccaccaacaaaaatggatgcagcacaactgactgaagaaggttattacagcgtctttggtaagagtggcgctcgtatcgaagtgccgggatgttcattatgtatgggtaaccaagcgcgagtggcggatggggcaacggttgtttcaacatcaacacgtaacttcccgaatcgtttaggtacggaggcgaatgtctaccttgcatccgcagagcttgcggcagtggcttcactgttaggacgtctaccagagccacaagagtatcttgattttatcaataaagtcgatgaaacggcggaagatacttaccgttatctcaattttgaccaactagagcaatatacagataaagcaacacaagtgattttccaaaccacggtataa

SEQ ID NO: 294472 - DNA, 372 bp, Proteus mirabilis
atggactatgaatttcagcgtgatcttactggcggtatattggcccgtttttcaatggatcatgaggcgattggttattggttaaatgatgagatccaaggtgatatcagcttaatcgatcaaattttgactgagatggacgaagttaaaggcagtgagaaacagtggcaattgattggtaaagaatacagcttatctattgatgatgaggaaattatggtaagggcgaatactctccattttgaaaccgatgatttagaagaagggatgagctactacgataatgaaagcatcgcattttgtggattagatgattttgctactatgctacaaaaatatcggttatttattctggaaaatagaagaagttaa

SEQ ID NO: 294473 - DNA, 861 bp, Proteus mirabilis
atgaatgaattacctgcgagtttagatgaagcaacaggttggtttgttgctaatcaagaactctttattcaatatgctgtgaatatcgttgctgcattcttgatcctatttattggtctttttgtcgctaaaatggtcagtaaaggggttgcacgaattttaacgttacgccatatcgacgcaactgttgtgacattcttgtctgtcttggtgcgttataccgttattgcattcactttgattgcagtattaggtcgattaggggttcaaacagcttctgttatcgcagtacttggtgcggcaggtttagcggttggtttagcattacaaggctcactctctaactttgcagcgggtgttttaattgttatcttccgtcctattcgtgctggtgaatacgtgatgattggtgctgtcgaaggtacggtgcgagatgtacaaatattctcgaccacattacgttcagcggatgaccggatcattgttattccaaatagcaaaattatcagtagtgaggttattaaccttagccgtgagccaaatcgtcgtacacaaattattgtcggcgttgcttatgatgctgatattgataaagtcaaaaaagtgctcggtgatgttgttgcgcaagataaacgtattcaacataaccaaggcgtgacaatacgtttacatgaaatggcgccttcttcattaaactttgtggtacgtgtttggaccaccaatgatgatgcatggccagtttattgggatcttatggaaaactttaaacgcgcgctagatgcaaataatattggtattccattcccacaaatggatgtctatatgcatcaagcacaaaataccgtgatgaaagcagaataa

SEQ ID NO: 294474 - DNA, 624 bp, Proteus mirabilis
atgttaacaacattttttcaggggtttttattaagtgcagcaatgatattgcccattggtgcgcaaaatgcctttgttttgcaacaaggtagtaaaaaacaataccatttaatgagtgcatttttatgcgctttaagtgatgtgatattaattagcgggggagtctttggtggaagtgcattactgagccaatcagaatatcttttattactgatcacttggggcggtgtggcttttttattgtggtatggatggaatgcgtttaaaaccgcttttacaaaagagattgaattatcacaacataaaaatcaagtgaaaagtcgttggcgggtgattgtaactttagttgccgtcacttggctaaatccccatgtttatcttgatacctttgtagtgcttggcagtatcggagggcaattatcagcagaattacgtccttggtttacttttggcgcggtattcgcatcgattagttggttttttgctttatcactactagcggcttggttttcacctattttaagccaagtgaccgctcaacgtatcatcaacttgtttgtggggtgtgtgatgtggtttattgctctgcaattggccgctcagggatggaaaaacctcttttaa

SEQ ID NO: 294475 - DNA, 735 bp, Proteus mirabilis
gtgaaagtaaaagcaatggtattagcatccatgttagcccttggagcaccctcaatcgctttagccggggcggtacctgaaggaccccatataactacatcaggtaatgcaacaattaaagcgactcctgatatggcgacacttaatattcaggttagtgaaaaagcaaaagatgcagctcaagctaaaaaacaagtggatgagcgtgttgcaaaatattttgcctttttaaaagaaaacggtgtgacgaaagaagatattgatgctgccaacattcgtacacagcctaattatgagtatgataaaaaagcagaacgttcggtgattaatggctatacagcaacacgaaccgtagatgtaaaaatcaaaaaacttgatcagcttaataccttactggatggggcattagcagcagggctaaatgaaattaataatgttgagtttggcgttaatgatccagaacagtacaaagctaaagcacgagaagtggcaattaaaaatgccatacaacaggcaagttcagtggcaaaagggtttggtgctgatttaggggctgtttatagcgtaagttatcgcgcaccagaagcaacaccttatccaatagcacgaatgaaaatggatgctatggcattaagtgccccgtcaccggaagcagtaaaagagacctatcaacaacaaagcattgagtttaaagattacgttgacgtggtatttgaattaaaaacagctaaataa

SEQ ID NO: 294476 - DNA, 531 bp, Proteus mirabilis
gtgccaatcataaaaaaacctatttcgggcgttgatctccgtgcaagtttttatttgacttcccaaagtttaggatatccttcaaataaacaggcaatattaatggctgatattgccacattaatagctaaatggaggaatggcttagaggtcgaaatttatacggaaaattatgaatttagatatggtaggatcaagtcttcacgttttaacgcctctggtgaggaaagcgtatattatgcaacttactttcatactcgtgccaagccaaaggacaatgatccacttctaataattacttttgatcccgttgttggacaagacgattttatgttcattgagaccattattgatcatagaacctattttggttcaccgggtgcaggtaaaactaaatctcatattgaaagacggtcatctgatttaaaacgccgtattgaaaatggaaaaaaaattagttccgaaccttcatcttcagttcaaaacgttaataaaaataacaatgattcgcctgaccaagaaaataagtaa

SEQ ID NO: 294477 - DNA, 222 bp, Proteus mirabilis
atgagcacttttattcgtcgaagtcgcaacgttgctctagccattgatgctggacgtaaaagtggtagtgctaacatagaaggtaatacccctgctgatattcaagccagcctgctgaaaagcttaggtgagtttactgcatctattccaactacaaaacaacaaccttacgtgaaaggatctcacggtgccaatcataaaaaaacctatttcgggcgttga

SEQ ID NO: 294478 - DNA, 900 bp, Proteus mirabilis
atgaaacgtcctgattatcgggccctgcaagcccttgatgccgttattcgagagcgtggttttgaacgagccgcacaaaaactatgtattacgcaatctgccgtttcacaaagaataaaacaacttgagaatctatttggacaacctttattagtacgtacggttccgccccaacccacagagcaagggcaaaagctactcgcattactgcatcaggtcgaaatgttagaagagcagtggttaggtgatgaaaatagtggctcgacgcctcttttactctctttagctgtcaacgcggatagtttagctacttggttattgcctgctttgcacccggtattaacacaacttcctatccggcttaatattcaagtagaagatgaaactcgtacccaagagcgattaagacgtggtgaagtggttggcgctatcagtattcagcctcaagcattgcctagctgtctagtcgaccaattaggcgcattagactatctttttgtggcatcccctgattttgcccaacgttattttgctaatggggtcactaaatcatctctgttaaaagcccccgccgtcgcatttgaccatcttgatgatatgcatcaggctttcttacagcaaaacttcggtttatctcccggtagtgtgccctgccatattgttaattcttccgaagcctttgttcagttagctaaacaaggctcaacatgttgtatgatccctcatctacaaattgccgatgagctaaaaagtggtgaattgattgatttaacgccaggattatgccaacgccgcatgttgtattggcaccgttttgccccagaaagcagaacgatgagaaaggtaacggatgcgttacttgattatggtcgtaaagtgcttaagcaagatgaagagtaa

SEQ ID NO: 294479 - DNA, 657 bp, Proteus mirabilis
atgactcaagatgaattaaaaaaagcagtaggttgggccgcccttgaatatgtaaaaccgggtactatcgtgggcgttggaacgggctctacggcttctcattttattgatgctcttgcaacaatgaaaggtcaaattgaaggggcagtttctagctcagaggcttcaacggcaaaactaaaaagctatggcattcccgtttttgactgtaatgaagttgattcgctcgatatctacgtagacggtgctgatgaaattaaccatcaaatgcagatgatcaaaggtggtggtgcggcattaacccgtgaaaaaatcattgcagcggtggcaaaaacctttgtgtgtattgtcgatgaatcaaaacaagtggatgttttgggtaaattccctctgcctgttgaagttatcccaatggctcgctcttatgtggctcgcgagctggttaaattaggtgggttacctgaatatcgtgaaaacgtcgtgacggataatggtaacgtgatcttagacgtttataatctcactattctgaatcctattgagctagaaaataaaattaatagtattgcaggggtggtcactgtcgggcttttcgctaatcgcggagccgatattgtattaatggggacttctgaaggtgtgaaaaccattaaataa

SEQ ID NO: 294480 - DNA, 1251 bp, Proteus mirabilis
atggtcaaggtatctttggaaaaagaaaagataaagttcctactattggaaggtgtacaccaaagtgcggtagagaatttaagagcagcaggttataccaacatcgaatatcataagggtgcattatcgggagaagaattaaaacaagctatccgtgatgcacgctttgtggggatccgttcccgcactcacttaacagaagaaatttttgcagccgctgaaaaattagttgctgtaggctgcttctgcattggtactaaccaagttgacttagatgcggctgcccgtcgtgggatccctgtttttaatgcacctttttcaaacactcgttccgtggctgaaatggtgttaggggaattactgttattactgcgtcgtattccagaagctaatgctaaagcccatcgtggtatttgggataaacaagctaaaggctgttttgaagcgcgaggtaaaaaactggggattattggctatggtcatataggcacccagttagggattttggcggaaagtgttggtttagatgtctatttttatgatattgaaaacaaacttcctttgggaaatgcaacccaagttcgccacttatccgaactgctgaatatgtgtgacattgttagcttacacgtgccagaaacgccatcaacaaaaaatatgattggtcacgaagagctattacgaatgaaaccaggcgctattcttattaatgcctctcgtggaactgtggttgatattccggcattagcacaagcgctagagagtaaacatttatcaggtgcagcggtggacgttttccctacggagccgggggcaaataacgatccgaacgatccttttgtatcagaattaattaaatttgataatgtgatcttaacgccacatattggtggttcaacccaagaagctcaagaaaatattggttatgaagttgctggtaagttagctaaatattcagataatggttctacattatctgcggttaatttccctgaagtatcattgcctagtcatggtgatgatgtaaaccgtttactgcatattcatgaaaaccgtccgggtattatgaatagtatcaataacgtatttacagaagaaaatattaacgttgctgcgcaatatctgcgtacagctggtaatgtgggttatgtagtgattgacgttactacacaaacgaaagcacaagctgagttagtattgcagaaactaaaaggactaccgggtaccattcgtgctcgtatgttgtactaa

SEQ ID NO: 294481 - DNA, 642 bp, Proteus mirabilis
atgggtaatatcgtgcttagctatttattaaagcgttttgctttatttttgttttccgccatgattgtggcaataacaacagggtttattttcctcgatattttggtgctgaataatggtatttctgaaacctcagcaaccgaactggggcaagaacttattgtggctataatatgtcttcttttctttatacctgcttataaacagccagaaatgagagggggatacacactgattatgggctttttcttgtgtatcttaattcgtgagttagatggtgtttttgaccaattagcacatggttcatgggtttggtttgcattaacggtaacatttgtctgtatagcgatcgctatcagagaagggaaaaaaacattatatggcttaacccattttataacgcattctagtcaaggaatgcttatggcgggtttactcagtgttttactattctctcgcttatttggtatggggattttgtgggagaaattgttaggtgaagactataaccgcacagtaaaaaatatggtggaagaaggtagcgagttgttcggctatacactctgtttaattagtgttatttggtatcgctattcgtctaaatatcatgttataccgacatcaataaaatttacttattaa

SEQ ID NO: 294482 - DNA, 1191 bp, Proteus mirabilis
atgttagatgcacaaactatcgcgacaattaaatccactattcctcttattgctaaaacaggccccgcgttaacggcgcatttttacgacagaatgttctctcgccatcctgagttaaaagatatttttaccatgagccaccaaagcagtggcgcacaacgtgaagcgttatttaatgcgatatgtgcttatgcaacgcaccttgaggatttacctgctattttgccggcggtagaaaaaattgcacaaaaacatgccagtttgaatattcttcctgaacattatcctattgttggagaaaacttattagccaccattgatgaaatgtttaacccgggcaaagaagtgcttgatgcttggggagccgcttaccaagttttggctgatgtctttattaatcgggaagagcaaatttatcaacaaaaagaacaagcttcaggaggctggcgaggattacgtcactttaaagttaagcataaagtaaaacaaagtgaggttattaccagctttgaattagagcctgaagatggacaagcggttacaccttaccgtgcaggccaatatttaagtatttatattcgtgatgagaaacttacaaatcaagaaattcgtcaatattccttaacacaatcggcaaacaataaaacctatcgtattgcggtaaaacgtgaagacaagggaattttatctaattttcttcatgaccatatccaagaaggggacatcttacaagttgccgcaccagggggcgatttttatttagatatctcatcaacaacgcctgtcacattaatttcagcaggtgtaggcttaactcctatgttagcgatgttgcacactctctcttctcaccaagcacaagtcaattggttacatgcagcagagcatggtggcgtgcatgcttttaaggaagaaatcgcacaagcaggaaagcaaattgaacaatatcaacaagcagtatggtatcgtctccctcgtactgaagacattatcaataaagactatcaatttgaagggttgatggatttaaccaagatacatgaatggctatcaatacctaatatgcagttctatttctgtggaccattaccttttatgcaatctgtcgctaaacaacttattgctctcggtattgaaagcgataaacttcattatgagtgctttggccctcatactgttattagccaataa

SEQ ID NO: 294483 - DNA, 1254 bp, Proteus mirabilis
atgttaaaacgtgaaatgaatattgctgattacgatccggaattatggaatgcaatggaaggtgaagtgactcgtcaagaagagcacatcgaattaattgcttctgaaaactatactagccctcgtgttatgcaggcgcagggatctcagctgaccaacaaatatgcagaaggttatccaggtaaacgctactacggtggttgtgaatacgttgatgttgttgaacaattagccattgatcgtgccaaagcactatttggtgctgattatgcaaacgtacaacctcactctggatcacaagcgaatgcggctgtgtatatggcattacttaaaccgggtgatacagtattagggatgaatttggcccaaggtggtcacttaactcacggctctccggttaacttctctggtaaactctacaatatcgttccttatggtattgatgaagcaggtaaaattgattaccaagatatcgctgagcaagctaaaaagcataaaccaaaaatgatcattggtggtttttcagcttattcaggtttggttgattgggctaaaatgcgtgaaatcgcagatagcgtaggggcttacttatttgtcgatatggctcacgttgcaggtatgattgcagcgggtgtctatccaaacccagtaccacatgctcacgttgtgactacaacaacacacaaaacattagcgggtcctcgtggtggtcttatccttgctaagggtggcgatgaagagttttataagaaattaaactctgccgtattccctggctctcaaggtggtcctttaatgcatgtgatcgcgggtaaagccgttgcattaaaagaagcaatggaacctgagtttaaagtttaccagcaacaagttgcaaaaaatgcgaaagcaatggtagacgttttcttagcgcgcggttataaagtagtatctggtggcacagagaaccacttgtttttattagacttagttgataaagatattacaggtaaagatgctgatgctgcactgggtcgtgctaatatcactgtgaacaaaaatagtgtgccaaatgatcctcgcagtccatttgttacatctggtattcgtattggttctccagcgattacacgtcgtggttttaaagaagcggaagcaaaagatttagccggttggatgtgtgatgtccttgataatatcaatgatgaagcgaacattgaaaaagtgaaacaaaaagtcttggatatctgcgctaaatttccagtttacgcataa

SEQ ID NO: 294484 - DNA, 1176 bp, Proteus mirabilis
atgttaaaaatggggggttggatggttattccatcaacactgtggcttgccttagattattttacgtattttttctcatatggtattttcttgcctttttggtctatctggttaaagggcgagggggttgatcctgcgatgataggcttactacttggggtgggcttaaccgctcgttttgtaggaagcttgattttaacgccggctgtaaaagatccatcaaagctcattactgcactgcgactttttgcttttttatctctcctatttaccgttgcatttatgttgggcactcattgggcttggctctttttggtaatgaccggatttaacgttttttttgcacccatggtgcctttgggagattcacttgcgggaacatggcaaaaacaatttcctttagattatggcaaaattcgggtttggggatctattgcatttattattagttcctcattattggggatattgattgatgcttttggacacccgattattctttatggattgattgccagcactcttgcattattccttacctcaatgttacgtccgaaaatcatgccccaaggtaaggtcaaaaaaacggaacaccatcatgtttcatttatgaaactgatttcagatggcccagtctggcgttttctattatgtgtttctttactacaaggtgctcatgctgcttattacggttttagcgcactttattgggaaaaagcaggctatgatacagcaacgattggttatctttggtccttaggcgtagttgctgaagtggttgtctttatgtttagccgtcgtttattccgccgttggagtgctcgaaacttattattactttcagcatttgcagggctattgcgctgggggatgatgggcagttttacagcattaccggcacttattattgtacaaattttgcatagtggcacatttaccgtatgccatttagcggcaatgcgttttattactgcacgtcaagagcatgaaattattcgtttacaagcggtttattctgctctagcaatggggggaagcatcgctattatgacgattgtatcgggatggttatatgaaaaacttcctaaccaagaataccttattttctggttgatggcggcattaactattcctgcaatgtttattagaccgaaagtacaaccgcaaaatacttaa

SEQ ID NO: 294485 - DNA, 1269 bp, Proteus mirabilis
atgaaaagtaaatcagtgatcccagctagtttttctttacaagaaagagaccgacgctggcagttagctagagacattatgagagataaccaattagatacattgattatttatggtgatagagaatcggcagcacctgcaccgttttgtattgaccactattttacaaatgacagattagggtcggttgttatttttcatgaagataagaaaccattgatagttacttttgcactaatgatgatagctgatcatatgcaggcaaaactacgtggtgatttgcagtggattgatgaagataatcttgttgtaggaaaaacagggcgtagtattgctcattttctaaaagagatgggagtacaacaaaatgcacatattggtattattggcttagaaccttatcccccattttattttgatggtgcaatgccatttaatactctaaatggtattaaagaagcatttccttatgcaaaatttagcagtgtatatcgtgatttctttagacgggcatcagttaaaagtgaagaagagctcgctcatgtaagatatgctgccgccattggtgaagcaatgagcgaggcaatgcgagtgacagcaaggcctggtgcaacagaggcggagcttgcggctgcaattactgccacttgtttatcaaggggaggatttaccgctgaaattttaatgggatcaggatctgagtatatcggttggggacctcctgcttggcaatatcgctcacaagcacctcgtgaaattcaaatgggtgatattatattatcagagatttttgctttatatggaatgtatgaaacgcaacatcaagcggcggttgctgtaggtaaaattcacgaaaacttagaaaaagcagcattagttacacgtgaatgctatgaaattggcgttgaatatttaaaagcagggataacctttggtgaagtcgttgatttaatggaaaaaccactattagaatcagggggatggcatgttcatccacttattcacagtattaatccttatggtccaatcggctttggcacagcgccaggtattgaatcattacctcttgctcatcgttataaacaaattgagcgattacctaatccagggagagaattggtattacaagaaggtatgacatttgcttttgaacctaattgtggcttcggccaccacttatgtaatttaggtggtactgttgtggttggcaaaagcaaagggattgagttaaattctaactcaacacaattaatgcgggcagatatatag

SEQ ID NO: 294486 - DNA, 675 bp, Proteus mirabilis
atgaaaaacaccagtaaaactgcagtaagtacagaacaaactcaagagaaattagtgcaagaaggtattaggctttttgcactatatgggatcagtggattgagaacgcgacaacttgcgcaagatgctggtgttaatcaatcagcaataccttaccactttggcggaaaattaggggtttatagagcagtgatccgatatattgctacagaattagcctctgaaattcagtttgaccaatttgataataagcttcagtttttattgaaagaaaaccgaccttataaaaatgaaaaagtggctgaattagttctattactagtcacaggtttaactcgtgcattattatcaccaaaacgccattattacagtcagttgattctacgtgaacagttagaaccgacggaaaattacgatcttatttatagtaatctgattgagccttttcatcttcgtctttctcgtttagttggattaatggatacaaagagtgatgaagtaacaatcactattcgtgctcatgctcttattggtcagatattagggtttgtcattgcaagaaaagcttttctattacgtgttaataagcaagagataacatcacaactattggataagattgcacaagaaattagccaactttcagtaaatgcccttttaattgaaaacgcatag

SEQ ID NO: 294487 - DNA, 804 bp, Proteus mirabilis
atgcatccgatgctgaatattgccatacgtgctgcacgtaaggctggtaatttaatcgccaaaaattacgaaaatcctgaatctgtagaaacgagccagaaaggtagcaatgattttgtcactaatgttgatcgcgaagcggaacaggcaatcattgaaatcattcgtaaatcttatccaaaacacaccattattacggaagaaagtggcgagttactcggtgaagatcacgatatccaatgggttatagatccacttgatggcaccactaactttattaaacgcctaccacatttttctgtttctatcgctgtacgtatcaaaggtcgcacagaagttgctgtggtttatgatcctatgcgtaacgaacttttctcagctgttcgtggtcaaggtgcacaattaaatggttaccgcctccgtggctctaatgcacgtgatttagatggtgctgttttagcaactggtttcccattcaaagcaaaacaacattcagcagcttatatgaatatgctgactaaactgtttgtaccatgcgctgattttcgtcgcacaggttcagcagcattagatttagcttatgttgccgcgggtcgtgtggatggcttctttgaaattggtttaaaaccttgggatttcttagcaggtgaacttattgctcgtgaagcgggtgcaattgtatctgactttactggtaatcacggctatctacaaactggtaatattgttgcgggtaatcctcgagttgtccgagcattattggcagaaattcgtagcgaattaactgatgctttaaaacgttaa

SEQ ID NO: 294488 - DNA, 729 bp, Proteus mirabilis
atgttagaaaatattcgcattatccttgtcgaaacttcacatacaggcaatatgggctcgacagctcgtgctatgaaaaccatgggattaacgaatctttattttgttaatcctaaagaaaaacccgactctcactctatagccttatcagcaggggcaagcgatgttattggcaatgctcatattgttgatactattgatgatgccattgaaggctgtgggttagtgattggaacaagtgcgcgtaatcgtacgctctcttggccaatgctagcacctcgtgaatgtggtgaacgttgcgtaaaagaggcatcaaataagcccgttgcggtgatctttggccgtgaacgcacaggcttaactaatgaagaattacaaaaatgtgattaccacctctatattcctaccaaccctgaatatggctctttaaacttagcgatggcggtgcaacttgtttgttatgaaattcgcatggctgcacttgctcaacaggaaaaacaagaggaaaatgcttcatcagagattgattatccacccgctgaagatattgaacgcttttatgttcacttagagcaggtacttaatgagtctggttttattcgtcctaaacatccaggacaagtgatgagtcgtttacgccgcttgtttacgcgcgcacgtccagaaacacaagagcttcatatcttacgtggtattttaacatccgttgaaaaatgggctaagaaataa

SEQ ID NO: 294489 - DNA, 495 bp, Proteus mirabilis
atgagactgacatcaaaagggcgttatgcagttactgctatgcttgatgttgcattgcattcgcagcaaggccctgtccccctcgctgatatttctgagcgtcaagggatttccctttcttaccttgagcagcttttttcacgtttacgtaaaaatgaattagtcgcaagtgtgcgtggcccgggtggtggttatttactcggtcgtgaagcggggcaaatttttgttgctcaagtcatttcagcagttgatgaatctgttgatgctacccgttgtcagggtaataaagaaggatgtcaaggtggcgatcgttgcctgactcatactttgtggcgtgatttaagtgatcgtattaccagtttccttagcagcattagccttgaagagttagttaataacgaagaggttatggatgtcgctgatcgtcaagacaatgaaaaacgtcatgctatcaatggtcgtttacaagaaaccattgttaatatgcgagtttaa

SEQ ID NO: 294490 - DNA, 1215 bp, Proteus mirabilis
atgaaattacccatttatctagattattcagcaaccacacccgttgatcctcgagttgctgaaaaaatgatgcaatgcctgactattgacggcatttttggtaacccagcctctcgttcgcaccgttttggatggcaagctgaagaagcgatcgatatcgctcgtaatcagattgctgatcttattggtgctgatcctcgtgaaattgttttcacctcaggggcaactgaagcagataacttggcactaaaaggtgttgcaaacttttatcagaaaaaaggtaagcacatcatcacatcaaaaactgagcataaagcgattttagatacttgtcgtcagcttgagcgtgaaggttttgaagtgacctacttagcaccaaaaagcgatggcttaattgatttgaaagaactcgaagccgctatgcgtgatgacactattttagtttctatcatgcacgtgaataatgaaattggtgtggtgcaagatattgctgctattggtgagttatgccgtagcaaaggcattatttaccacgttgacgcaacgcaaagcgttggtaaattaccaatcgatctctccaaattaaaagtcgatttactttctctttctgcacataaagtttacggacctatgggtattggtgcgctttatgttcgccgtaaaccacgcattcgcttagaagcacaaatgcatggtggtgggcatgagcgtggtatgcgttcaggtacattagccgttcaccaaatcgtgggtatgggtgaagcttaccgtatattgaaagaagaaatggctgatgaaactaaacgtttaaatgaattacgtttacgtttatggaatggcatcaaagatattgaagaagtgtatatcaatggttctttagaacatacagcgccaaatattcttaatgtcagcttcaactatgttgaaggtgaatcattaatgatggcactgaaagatcttgctgtatcttcaggttcagcctgtacatcagcaagtttagagccttcttatgtactacgtgctttaggattaactgatgaattagcacatagttctattcgtttctctttaggtcgtttcaccactgaagaagaaatcgattatgcaattgaacaaattcacagtgcaattggtcgcttacgtgatctttctccactttgggaaatgcataaacaaggcgttgatatcaacagtatcgaatggtctcaccattaa

SEQ ID NO: 294491 - DNA, 387 bp, Proteus mirabilis
atggcttatagcgataaagtaattgatcattatgaaaatcctcgtaatgtgggttcatttgataacaacgaccctacagtggggagcggtatggtaggcgcaccagcttgtggtgacgtcatgaagctacaaatcaaagttgatgataacggtgtaattgaagatgcacgttttaaaacttatggttgtggctcagcgattgcatcaagctctttggttaccgaatggatgaaaggtaaaaccttagatgaagcagaagcgattaaaaataccgcaattgctgaagagttagaattaccaccagtgaaaattcactgttcaattctggctgaagatgcaataaaagccgcgattgcagactataaaagcaaacgccaaggcaaataa

SEQ ID NO: 294492 - DNA, 324 bp, Proteus mirabilis
atgtcaatttcccttacagaagccgctgctaaccgtgttcgctcttttcttgctaatcgtggcaaaggcgaaggtttgcgtttaggcgtaagaacatcaggctgttctgggatggcttatgttcttgagtttgctgatgtcatcaatgacgaagataccgtttttgaagataaaggtgtgaaagttattattgacggtaaaagcatggtctatttagatggaacagagcttgatttcgttaaagaaggattaaacgagggctttaagtttaacaacccaaacgtggctaacgaatgtggttgtggagaaagctttaccgtgtaa

SEQ ID NO: 294493 - DNA, 522 bp, Proteus mirabilis
atggactatttcaccctattaggcatgcctaatcgttttgatattgataaacaacagcttgcttctcgttatcaagagatgcaacgtcaatatcaccccgatcgttttgcgggtaaatctgacaaagagcaagtacaagcaatttcgtttgcttcgactatcaatcaggcttatcaaaccttaaaaaatccactttcaagagctgaatatatgctctctttacagggcatcgatattgctaatgagcaacaaacgatgcacgatacggcttttcttatggagcagcttacgcttcgtgaagagctggatgatatagagcatagtactgatgctgaaaatttactggctgatttttctgcgcgcttagagaaaatgtacactgtacgctatgatgaaatggtgaaaacactggacagtcagacttgggacattgccgcagacaatgtgagaaaattacgttttctcgcgaaattaaaagagcaagtcgagcatcttgaagaacgcttgtttgatggtttttaa

SEQ ID NO: 294494 - DNA, 1851 bp, Proteus mirabilis
atgtcattattacaaattagcgagccaggacaaacacctgcgccacatcagcgtcgattagctgcgggtattgacttaggaacaacacactcacttgttgccactgtacgtagtgggcaagccgaagcgctttcagatagtgaaggtcgctatttattgccatctgttgtgcagtatcaagttgataatattaatgttggctggcaggcgaaacaagaagccgaaaaagatcccgccaatactatcagctcaataaaacgaatgctggggcgctcgctaaatgatataaccagtcgttatcctaacctcccttaccattttcatgacaatgatagtggactgccattaattaaaacacctgctggcattgtcgatcctattcaagtttctgcggatattttaaaagccttagcagagcgtgcaatacaatcattaggtggtgaacttgatggtgtggttgtcactgtacctgcttattttgatgatgcacagcgtcaaggcactaaagaagcagcacgtcgtgcaggtttacatgtattacgtttattaaatgaacctactgctgccgcgattgcttatggattagattccggaaaagaaggcactattgtcgtttacgacttaggaggcggaacttttgatatctctgtcttacgtttaactaaaggggtgtttgaagtcttagcaacaggtggtgatactgcgttaggcggtgatgactttgatatgatgttagccgactggatcagagagcgtgcgggatttggttatcaaaatgatgttattttacaacgtcaattacttgatattgcctcagaaactaaaatcgctttaagtgataatgatgtggctgatatcaatatcaatggttggaaaggggaaattacccgcgctgaatttgaatcattaattcaacctttagttaaacgtacgttgttatccgttcgtcgagcattaaaagatgctgatgttgacgtggatgaagtgctcgaagtggttatggtgggcggatcaactcgcgtgccactggtgcgccaaatggtaggcgattattttaaacgtgaaccattaacttcgattgaccctgataaagttgttgctattggtgcctctattcaagcagatattctggtgggtaataaacctgatagcgaaatgctcttgttggatgttattccgctttcattaggtttagaaaccatgggcgggctggttgaaaaagtgatcccacgaaataccactatccctgttgcgagagcacaagaatttaccacttttaaagatggtcaaactgccatgagtgttcatgtggtacagggtgaacgtgaaatggtgagtgattgtcgctcattagcccgttttactttgcggggtattccaccaatggcggcggggggagcacatatacgtgttaccttccaagtggatgctgatggtttattaagcgttagtgcgatggaaaaatccactggtgttgaagcctcagtacaggtaaaaccttcttatggtcttagtgatacagaaatcgctaatatgatccaatcttcaatggaaaatgccaaagaagatttacaagctcgtcgtcttgccgagcaaaaagtcgaagccgctcgcgtgttagaaagtttaaccgcagcattacaagaagatgctcatctcttaactgaagatgagaaaacggctatcgataatgttgtagatactttaatagaaagcgttgagggaacagatcctgttgccattgaaaacgccattaaacaactggataagcaaactcaggaatttgctgcgcgtcgtatggatacttccattcgtcaagcgttggcaggtcattctgtggatgagatataa

SEQ ID NO: 294495 - DNA, 336 bp, Proteus mirabilis
atgcctaaaattgtatttttaccccatagcacactttgcccggaaggtgctgttgttgatgccactgaaggtgagtctattcttgatgttgcattacgtaatggcattgagattgaacatgcgtgtgaaatgtcgtgtgcgtgtaccacttgtcactgtatcgttcgtgaaggttttgactctcttgatgaaagtacagagctggaagacgatatgttagataaagcgtggggattagagccagaaagtcgtttaagttgccaagcgaaggtaactgatgaagatttagtcgttgaaatacctaaatattctatcaaccatgcgagagaacactga

SEQ ID NO: 294496 - DNA, 195 bp, Proteus mirabilis
atgaaatggagtgatacacgtgaaataggggaagcgctttatgatctctaccccgatacagatccaaaaaccgttcgttttaccgatatgcatcagtggatttgccaattagacgattttgatgatgatccacaaaaatcgaatgaaaaaattcttgaagcaattttattagtttggcttgatgaatttgaataa

SEQ ID NO: 294497 - DNA, 1296 bp, Proteus mirabilis
atgaataaacaaattatgcctatcatgctgtctaatgaacctgcagcagcatgttggggagaaaaagcactaattagcactaacgaaactggcatgaccgttcacttaacggaagaaaaccgcttaggggccattcagcgtggtggacgcaaaattgatggtcaaggtattcgtaatgttgctctagttggtgacggctgggatttagaacgtagttgggcgttttggttaggttttagagcacctaaaggcgcacgttcaatcgaatggccacaattaagtgaagcggacaaaaaagaattagagtcgcgtatccgtattgttgattgggtgcgtgacacaataaataccccagcagaagagttagggcctgaacaactggctcagcgtactgttgatctgttctgtggtttagataaagaagatatcagctataaaatcaccaaaggggctgatctccgagatcagaactatgcgggaatttatactgtaggtcgaggctcttcacgtgatcccgtctatttagcattagattttaatccaactaaagatgccgaagcccctatctttgcctgccttgttggtaaagggatcacctttgattcaggcggatatagcatcaaaccttcttcttccatgaattctatgaaagcggatatgggcggtgctgcaaccttagctggtgctttggctttagctattacacgaggtttaaataaacgcgtaaaactattgctatgtattgctgataatatggttagcggtaatgcctttaagttaggagacattatccgttatcgtaatggtaaatccgttgaaatcatgaatacggatgcagaaggtcgtttagttttagcagatggtttaattgatgctagcaactttgcccctgaattgattatcgatgcggcaacattgacaggtgcagctaaagtggccgtaggtaatgattatcactctgtattaagttttgatgataaattagcgaatgaattattagcaagtgcagatcaagaaaatgaactgttctggcgcttaccattagctgatttccatcgtagccagttaccatcaagttttgctgatctcaataatattgccgcaccttcacataccgcaggcgcaagtacagcagccgctttcctttctcactttgtgaaagattataaaaaaggctgggtacatatcgactgttcagcaacttacagaaaatcatctgtagagcaatgggctgctggggcaacaggatatggtgttcgttctatcgctaatttattattaacaaaagcaaaataa

SEQ ID NO: 294498 - DNA, 426 bp, Proteus mirabilis
atggatgtatctgaacaatttgaagtacaagaaattgttgctgttgaaggttcttctctacaactgagtgtgcttgagccacagcctgaaaaattaacacaagcattgagcgaattttttggtcaacataagcctattcgtcgtgcatttattgttaatgctttggagcaaggtgatgatgagtcattttatttgattgggctagaaatcactggagaagaaaatattattgctcagatactcccacaagctgctgaagccgcttttgagcacctagaagaaggacaatctctggatttctgttttgtgaataaagatgagcaaggtgtaagtcattttatgactcaccatgtaacccctttttatcaacgcaaattagggggctttcttcgtaagggtattccaatcgttaatttgaatacctaa

SEQ ID NO: 294499 - DNA, 5085 bp, Proteus mirabilis
atgaatcgagatcaatttagacagtacacggaaaaaagagggtaccgttggtgtacacttgcagtggtactggcttcagcattagctttaacaggctgtgatgataacaaaacagaagatgagcaatcttcgacgagtgataactcacaaccaacacaagttgcggaacaaaaaagcacatcgcaacaaacgacaacacaacttggtgataaaaccgcagttacaaccaaaacgaataatcaaactgcattaactagccaagaagtgcgcaatgaacttgctcgtcgttatgcaggtaaagaggtgactgtattagatgcctctgaattacaacgcgatggcgcaagtacgatggtagtgactttttcagtaccactcgatcctgaccagaaatttgatgatgttatccgtcttgttgatactaaaaaaggtaaattagaaggggcttgggagctatctgataatctgatggagttacgattccgccatttgccaccttcaacagagttaaacctgactattgatgctcaaattaaaggaattaacgaacgtaaattagtagagccatttagccaaaaatttactacagaagagatttttccatcggtcggctttaccagtaaaggctcattattaccgttagaagcaacggaaggtttgccaattagcgcattaaatgtcgaacaagtcgatgttaactttttccgcgttaaagatgatcggttaacacaatttttaactcaatgggaaagccgctctaatattaactattgggaatcagacgattttctgtcacaagcggatttggtgtatagcgggcgctttgaacttgatacagaaaaaaacacccgtgaaaatgtcttattaccactcaaatctattgaagccctgaaaaaagagggtgtctatatcgccgtaatgcagcaggcaggtaaatactcctataccatgccggcaacggtatttacttttagtgatatcggtttatcagtacatagctaccttaatacgctagatatttttactcaatccctgaaaaatggcgcagcattagacaatattgaaattcgtcttttggatgaaaaaggtaatttaatatctaaaacaaaaactgataatcaagggcatgccacattagaaaagagtgataaagcacgtttattactcgctattcgtaatgggcaaaccagtatgattgatttgcgtaaaccagcccttgatttatccgaatttgatatcggcgggccacaaggttatagcaaacaattttttgtttttggtccacgcgatctgtaccgccccggcgaaaccttaatcgttaatggtttattgcgagatggtgatggaaacccgattaaagagcaacctgttaaagttgacttattaaaaacggatggtcaggtttcccgtagttttgtttggcaacctgaaaatggtttttatcagttgaaactgatgatccctgaaaatgagagtacaggtattcggaaattacgttttgatttaggcgatggcactccacgcttctaccaattccaagttgaagattttatgcctgagcgtatggcattagagatcaccggtaaaaaaggcattttactcagtggtaataatgcttattttgatattaaaggtcgttatctttatggtgcaccggcagcagataatcgcttgcaagggcaggttttcttaaaagcttcgcgagaagcagtcagtcaactgccgggttatgaatttggtgccgtaaaagatgaaaatttaagtcgtttattagatgaatttgaacttactcttgatacggatggtgaaggggcattaacggttgataaagatcgttatgctgaagtgaaatcaccgattaatattatcttacaagcaagcttacttgaagccggagggcgtcctgttactcgccgttatcaacaagcggtatggccagcgacacatcttgcgggaattcgccctgtttttgctaaaaaagaggtgtatgactaccgtaatgataaatataaatcaggctatagtgttgatgaaaactcaatggcggagtttgaaatcgtttataccgatcaagagggtaaaaaattacctgctgatgacctaaaagtaagatttatttacgaacgttatgattattattggcgttggtctaattcaaatggttgggagtctggctacaatcaaaaagatctgcaaatggatgagcagactatcaaaatagctaaagatggtaccgcaaaagtggctttccctgttgaatggggctcttatcgtatagaagtggtcgatcctaaaacagaacttgtcagtagcttacgtttttgggcgggctattcttggatggataatacaggcggaaccggggcagtaagacctgatcaagttaaattaaaattagataaagagagttacttaccgggtgaaaaagtcaaactcaatattgcagcccctcatcctggcaaaggttatgtgttattagaatcgagtgatgggccactatggtggcaagagattgatgtacctgaaaaaggacttgatgttgaagtacctattaataaagagtgggcaagacacgatttatatttgacttcggtggtggtaagaccgggggatacatccaaacaagcgacggtaaaacgtgcagtaggtattttgcatttaccactacaagataacaatcgccgtatagatattgcactggatgcacctgaaaaaattcgtccaaatcaagatctaaaaattcggattaaagctaagcccgtagcaggccagccattgccggaaaacatcaatgtattagtgtctgcagttgatacaggtgtcttaaatattaccgactataaaacgcctgatccgtacgaagctttctttggtcgtaagcgttatagcgttgatcaatacgatgtttatggtcagttaattgaaggagaagggcgtttagccaacctacgttttggtggtgatggaagcgaagaaagcgcattatctcgtggtggtaaaaaaccattaacagatgtgcaaatcattgctcaacaagcaacacctgtaaaattaaatgcacaaggtgaaggtgaggtttctttacctatacctgagtttaatggtgaagtccgccttatggctcaagcatggactgccgataaatttggtagccaagaaggtaaagttgttgttgccgcgccattagttactcaactctcattaccacgctttatggctgggggagatgatgcgttactgtcattagatttaactaacttaacggatgcaccacaatctattacgttaaattatacggcatcaggattagttgatttagcgggtgtcgatagtaaaaccgtttcattatcgaaaggtgaacgaactcaagttcaaatccctattacggcaaaacatggatttggtcaaggagaattttccctgtctatttatggtattaaagtacctaatgaagagataaaaccttatcaaaatacttggaaaataggtgtacgccctgcgtatcctgctgagacaatacattacgccaatacattagcagatggtgagtcttggcgcctaccaaacgaagcattaaatcaatttaatcgctcaacgcttgagggggaattattacttaccagtcgccctccgttacaggtagcgcgttatgttagagagttatttgcatatccttatggatgtcttgagcaaactgttagtggattatatccatccttgtattcaacagagaaagagttgaagcaattggggatcaaaacacaaacagatatgcaaagaaaagaagccatagaaaaagggattgctcatatcttaacaatgcaaaaatccgaaggaggatttgccttgtgggctcaaggtgggcgtgaagagttttggttaacggcgtatgcaacagatttcttatttagagcgtctcaacaaggttatgaagttcctactgaggcattaaaacgggcaaatgatcgtctactacgttatttacaagataaaaacattgttaatgaagagtatgtggttaaccaagatgcggctcgattctcagcaagagcatatgcagctttagttctggctaatcagcaaaaagcccctttgggagaattgcgccgtttatatctagaacgtaatcaagcgggtagtggtttagcgcttgtgcagttaggtgttgctttgaaattgatgggagataactctcgcgctgaaagcctaattgctgaaggggtcaccatgccacgtaaatataattacggtttaggtgattacggcagtactattcgtgaccaagcgttgattattgcgctactcagtgaaaacaatttggaaactcaaactcgtgatgccagtgttattacattatctgataacttaacagggcgtgaatggttctctacacaagagagtaactcactataccttgctgggcgtttctttattgatatggcagagaagccttgggaagtaaccattaatcgtcaagtgccagcaatgagtagtgatcgcgcagttaatgaagcattgacagcaacacaattgcaagaaggtttagaactaaacaaccaaggtggtacaaccatttactctcgaatgaatgttgtcggatatccaaaagttgccccagcgccttatagcaatgtattgaagatcaatcgtagttattacgatctaaaaggcaatcgagtcgatcctaatcgcttacaaagtggtgaaatgctggtggtaaaattagaggtttcagctaatagagatgtacctgatgccttagtggttgatctattacctgcggggcttgaaattgaaaatcaaaacttagcatcaagtagcgcaagcttaagcgatagcgctgctgatttgcaggagtttattgatgatatgggacaagccaatataaaacatcttgaatatcgtgatgatcgttttgttgctgcaatagcggttgataaatatcgtcctacgacattactttacttagcaagagcggtaactccggggagttatcaagtaccgccaccgcaagttgagtcaatgtatgtgccttattggcgtgccgtaggggcaacaaaaaataaaattgatgttgtgccttaa

SEQ ID NO: 294500 - DNA, 2322 bp, Proteus mirabilis
atgaaactaggatataagcggttaatcgccgcgagcgttatttttctattagtaacaccattattgctatggatagcagataagatctggccactgccagatcccgagcctcaaatcgccaccatagtaacggctgaagatggaacaccactttggcgttttgctgataaagaaggaatatggcgttatcacgttaccctttctgatgtttcccctgaatatttgcaggccttgatagcttatgaagatcgctggttttatcagcaccccggtgttaaccctatagctattttacgtgccgcatggcaagacttaagctcgggaaaaattgtttctggaggcagtacgctttcaatgcaagttgcacgtttgattgacccccactcacggactttagggggaaaattaaaacaattatggcggacattacagctcgaatggtattactcaaaagatgagattttagaaatttatcttaaccgtgcaccttttggtggcactttagaagggattggcgctgcaagttgggcctatttaggtaaatctcccgctgatttatcagcaggtgaagcaacattaatggcggtattacctcaagcccccagtcgtttaaggccagaccggtatccagagcgtgctcaagctgcacgggataaagtattagatagattagcggaatatcaaatttggcctaaagagaaagtggctgaaataaagcaagagcaagtgctacttgcaccaagacaaacgccacaactcgcgccattattggctcggcgtatgtataacgagcaaaaagcgccggtgatcacaaccacgattgatattaatcttcaacgacaactagaagagctagccaaacagtggaaatatcagctagccgataaaacttctctggcaatacttgtggtcgatcacacggatatgagtgttaaaggctatgttggatcggcagactttaatgataatcaacgctttgggcatgttgatatgataagtgcatggcgttcgccgggatcaactttaaagccttttatttatggtcttgctttggatgaaggattgatccatgcagaatcactattacaagatgttccgcgccgttttgaagattaccgtcctggtaattttgatactggatttaacggtgccgtgagtgccagtgaagcccttagtcgttcattaaatttaccagccgttcaattaatagaagcttatggcgcaaaaaaatttgcagctaagttgcgacataatcaccttgaaatgcgttttccttatggctctgaacctaatttagcgcttattttaggaggaacagcaacacgaatggatcaattagtggcgacttttagtgcgtttgcaaggcatggaaagaccgcgccgttacgttttacgccagagcaaaccatcaatgaacgtatgttaatgtcacccggtgctgcgtggatcattcggcgaattttagcgggagaggcacggcctcgtcctgatagtgctatttcagcggttgttcccttggcttggaaaacaggaacaagttatggttatcgtgatgcatggtcgataggcgttaatgcgcgttataccattggtgtttgggtggggagacctgatggcacacctgttgcggggcagtttggatttgcaaccgctgtaccgataatgaatcaagttaataatttattgacgagttatttttatcaaaataaacagcggcctcctgttgatcctaggccaaatagtgtctcagccgcagctatttgttggccaacgggaaaagctttgcctaaagaagatagtaactgccgagttagtcgacgaagctggatccttgataatactattcccccaacactattgaatgaaagccaagagggcattttaggcatcaatgaaaaagtatggatagataaagaaggaaaacgtacagggcctaattgtcctggtgctcaattaaaggatattgctttatggccgatagcattagatgcttggttgcctgaaaaagagcgtagagcaaaacgattaccaccaatttcattaacatgtccaccgattaaagaagatatgatcccattgtatatctctgggataagaaaaggggatttattgcgtccattgcctggtgaaactcagcttgaaataacggtttctacacaagggggaagtggtatgcagtggtggtttttaaatggtgaacaaatcggtaaaactgaaaatggggcaacgttctcttatttattagaaaaacgtggcaaataccaactttcggtgcttgatcttagcgggcaaacggatatggtgaatttcagttttcgttaa

SEQ ID NO: 294501 - DNA, 426 bp, Proteus mirabilis
atggctattcagcgcactttttctattatcaaaccaaacgcagtgaaaaaaaatgttattggtgcaatctataaccgctttgaaagtgcgggtttcagcatcgtagcagcaaaaatgttgcatttaactcgtgaacaagcagaaggtttttatgaagagcataaaggccgtcctttctttgatggtttagttgagtttatgacttctggccctatcatggtacaagtattagaaggcgaaaatgctatccaacgtcatcgtgacttaatgggtgcaactaatcctgataacgctttagcgggtactttacgtgctgattacgcggatagctttacagaaaatgcagtgcatggttcagattcagaagcttcagctgcgcgtgaaattgcttatttctttactgaaaacgaaatttgcccacgctaa

SEQ ID NO: 294502 - DNA, 1182 bp, Proteus mirabilis
atgacccaatctaccactccagcgccaagcgcttctgtcgctgtttctaaagaaaatactgtgaatcaaaaaacaaaaatcaatctgttagatttaaatcgtaaacagatgcgtgagctttttgtctctatgggcgaaaagcctttccgcgctgatcaaatcatgaaatggatataccattattgctatgatgattttgatcagatgacagatatcaacaaagtgctgcgtgcgaagttaaaagagattgccgaaatcaaggcacctgaagtgtctgaagaacaacgctctgcggatggcactattaagtgggcgattaaagtaggctctcaacaagttgaaacagtctatattcctgaagatgatcgtgcgacgttatgtgtttcatcacaagtgggttgcgcgttagagtgtaaattctgttcaacagcacaacaaggttttaaccgtaaccttaaagtttctgaaattatcggccaagtgtggcgtgctgctaaaattattggtgctttaaaagagactggacgtcgtccaatcactaatgttgttatgatgggaatgggtgaaccattacttaaccttaacaatgttattcctgctcttgaaattatgatggatgactttggctttggtttatctaaacgtcgagtcaccgtgtctacatccggtgtcgtacctgcattagataaattagctgatgcggttgatgttgctttagcgatttcattacatgcaccaacagatgatattcgtgatgaaattgttcctattaacaagaaatataatattgaaatgtttcttgatggcgtgcgtcgttatattgctaaatctaatgcaaaccaaggtcgagttactgttgagtatgtcatgcttgatcatattaatgacagcactgaacaagcacatcaattagcagagtgcttaaaagatacaccttgtaaaatcaacttaattccatggaacccgttcccaggcgcaccttatggacgtagttctaatagtcgcattgatcgtttctctaaagtgttaatggaatatggtttcaccactattgtacgtaaaactcgtggtgatgatattgacgctgcctgtggtcaacttgctggtgatgtgattgaccgaactaagcgtactctgaaaaaacgtctgcaaggtgaaccaatttcagtaaaagcagtctga

SEQ ID NO: 294503 - DNA, 435 bp, Proteus mirabilis
atgataaggatgtcatcaaaggttgttgctatctgcttggtgttattgacaataggctgccaatcaacagcaaataaaaaacatgttgcagtgcctcttcgtcttcaattaggggaagcttatctggctgagcaacaatatcagatagcccaatatcattttcaaaaagtgctgtcagtgatgcctgagcatcctgaagcaaatttaggaatggcattaacatcccagttattgggaaatcctattcaggcgctagattattacaaattagcgatgaagtcgaagccagtaaatgttaatgtattaaggttttatggtaatttcctttgtgaacaaaatttattaaacaacaataatgtgttaattgaggatataccgtcagattatttggtttgtcagcatgctgaataccaaaaatcaccaaattcgcgatga

SEQ ID NO: 294504 - DNA, 963 bp, Proteus mirabilis
atgaatactgaaaacaaaaccgaagaagtgaaattaacagcgggtcaacttttacgtcaggcacgtgaaaaagcggggctaactcagcagactgttgctgatcgactttgtttgaagttaacaacagtatgtgaaattgaagctgatactatctcttctggtattgcaccgacatttttacgtggttatatgcgctcttatgcaaaacttgtcggtgttcctgaaagcgcaattctaggtctaattgatcaacaagccccaataaaacaagtcaaagtaacaacaacacaaaattactcattgggtaagcgccataaaaagcgtgaaggctggttgatgaaattgacttgggttattgtaatagcaatgatagctttagtcggtttatggtggtggcagggtcatcaagccgatcaacaagaattagtctctatggcttcgcaagacataggacaaaatagtccgcaagaaaacaccaatacgatagaatctcctttatcaaccttagataataatagcccatcatctgagggtgaaaatgtacaagtgcctgcttctccattagtagataatcaggctaataaggttgccgagccatcagtaacagatgccacacctgaggcagaagttaaaacagttccattaccggtgtcaccattaaccacatcaacgacttctcgtgctgattctgctgaaggcaattcaacacccgcaccaattgtggaaaatcaactggtcttgatgtttgatggtgaatgctggttagaaattcgtaatgctcaaaataaagttttatttaatggtattaagaaagccggtgaccgtttggaatttaatggtgagcaaccttataaactaaaaataggcgcaccttctgttactcgtttacagtttaatggtgaagctgttgacttaagccgttttactggaaaaatagcaaaaataacagtaccgagcgcttaa

SEQ ID NO: 294505 - DNA, 1122 bp, Proteus mirabilis
atgcataaagaatcacctattattcgtcgtaaatcgacgcgaatttatgttggtaatgtacctattggcgatggggctcctatcgcggtacagtcgatgacgaacacacgaacaacagacgttgaagcgactgtaaaccagattaagtctctggaacgtgttggggtggatattgtacgtgtttctgtaccaactatggatgcggctgaagcattcaaactaattaagcaacaagtgaaagtacctttggtcgctgatattcattttgattatcgtattgcacttaaagttgctgaatatggtgtcgattgtttacgtattaatcctggtaatattggtaatgaagagcgtattcgtcaagttgtcgattgtgcccgggatcgcaatattcccattcgtattggtgtgaatggggggtcactagagaaagatattcaagaaaagtatggtgagccaacccctgaagcgctagttgaatcggctatgcgccacgttgatatcttagataaattgaactttgatcagtttaaagtcagtgtaaaagcttctgacgttttccttgctgttgattcttatcgtttattagcgaaaaaaattgatcagcctttacatttagggatcaccgaagctggtggtgcaagagccggatcagtgaaatcagctataggccttgggatccttctatcagaaggtatcggtgatactttacgtatctctttagccgcagatccggttgaagaagtaaaagttggctttgatatcttaaaatcattacgtattcgctctcgtggtatcaattttattgcttgcccaacatgctctcgtcaagagtttgatgttattggtacagttaatgaattagaacaacgtcttgaagatatcattacaccaatggatgtttctattattggctgtgtggttaatggtcctggtgaagccgaagtttctacactaggtgtaaccggagctaaaacgcgcagtggtttttatgaagacggtgtaagacaaaaagagcgtcttgataatagtaatatgattgatttattagaggcgaaaatccgtacaaaagcggcaatgcttgacggcaacctccgaattaatataaatcaattggataaataa

SEQ ID NO: 294506 - DNA, 1284 bp, Proteus mirabilis
gtggcacaaaaaatccaagccattcgtggtatgaatgactacctacctgctgatacgcgggtatggcagaaaatcgaaaatacgctaaaacaaattttagccggttatggttttagtgaaattagaacacctatcgtagagcatacccctctatttcagcgagcaattggtgaagtgaccgatgttgttgaaaaagaaatgtatacttttaccgatcgaggtgaagacgcacaaagcttaaccttacgtcctgaaaataccgcaggttgtgtccgcgcaggaattgaacatggtttactttataaccaagagcaacgcttatggtatttagggccaatgttccgttatgaacgccctcaaaaaggtcgttatcgccaatttcaccaattaggtgcagaagtatttggcctacaagggcctgatattgatgctgaactgattatgttaacggcacgctggtggaaggctttaggtattgcagagcacgtgactttagaactgaactctattggttcactcgaagcgcgggcaaaataccgtgaagcattagtcgcatttttagagcaacacgttgatcaattagatgaagattgcaaacgtcgtatgtattctaacccattacgtgttttagactctaaaaatcctgaaattcagactttattgaatgatgcgcctgaacttttcgattatcttgatgacgaatcaagagaacactttgatggtttatgtgcattacttgatgctgtaggtattacttatcgtgttaatcagcgtttagtccgaggcttagattattataaccgtactgtttttgaatgggtaaccagtgcattaggttcacaaggaacggtatgtgcgggtggtcgctatgatggattagtgaaacaattaggtggacacccaacgcctgcggtcggttttgccatggggatggagcgcatgatcttattagttcaagcggttaatcctgagtttgttgctgatactcatgtcgctgatgtttaccttgcgtcttttggtgataatagccaaagtgcagcattaatgctggcagaagaaatccgtgatcaattacctacattgcgcttaatgaccaatcacggtaaaggcaattttaaaaagcaattaggacgtgctgataaacatggtgctaaaatcgcgttaattttaggtgaagatgaaattaacgctggcacagtagccgtgaaagatttacgttcaggtgaacagaccattgtatcgcgtagcgaactggcccaacaattgacgctgttattaggttaa

SEQ ID NO: 294507 - DNA, 621 bp, Proteus mirabilis
gtggaagtttatagcaccgaaaacgaacaagttgatgcaattaaacagtttttaaaaaattatggtttaacgatcattctcgctattgtcattggcgtgggtggaatttggggttggaaatattggcaatcacatcaagccaaccgtctacaagaaagtgcgggtgaatttgcaacaataaatgaagcattaacgaaaccaacgcctgaaaatatcgcattagccgaaaaatttgtttctgaaactaacgatatttatggtgctttagcctctttagagttagctcaattagcaattgatgccaacgatttagccaaaggtgaaactcacctgactaaagcaatatctatggtaaagaatgaagcatttgcagatatgcttaaccttcgcttagctcgtgtgcaactggcattagataaaactgatgctgcgttaatttcattagagcaagtgaaaagtaaagcatgggatggaatgaaaaattatatccgtggtgatgtattagcgaaaaaaggcgataacgcaggtgcagccgccgcttatcgtaatgcattgaatgataaaaatgcaggcgctattcgctcattggttgaacttaaactcaataatttatccaattaa

SEQ ID NO: 294508 - DNA, 1173 bp, Proteus mirabilis
atgcaactgcgtaaaactctcctgatcggtctactagcatcagcattattagctgggtgttctagtgagcaggataatgtgacaatgtctccattgcctgaggtgcagagccaatttaccccttatgtggtgtgggacaaatcggttggcaatggtattggaaaatactattcccacttgtcaccagcatgggatggttcagttgtgtatgtcgctgatcgccatggggtagttaaagcattagaattagaaacgggtaaagagatttggtctcaagatctctcaactaaaaaaggtttcttctcctctaatgaatcagcattactttccggtggtttaaccgtctctggtactcgtgtttttgtcggcacagaaaaagcaaaagtgtatgctttaaatacagatgatggctctattgattgggaaacagatgttgccggagaagcgatttccaaacctgttgttagtgatggtttagtgcttattcataccagtaacggtatgttgcaagggcttgatttgctgacaggtgaagtatcatggactgtcaacttagatacaccatcattatccgtacgtggtgaatcagcacctgctgttgcttatggtgcagcgattgtgggcgctgataatggccgtgttagtgcggtggtgttatctcaagggcaattagtttggcagcaaaatatttcacaagtgaaaggctctactgagatcagccgcttaaatgatgtcgatattacgccaattattgatgaaaatactgtttatgccatggcttacaacggtaatttagtcagtctagatatgcgttcaggacagatcatctggaaacgtgatttaggttcagttaatgacatggtacttttgggtgacaatctataccttgttgaccaaaatgaccgagttttagctgtgcgcaaatctgatggtgtgacattatggacacaagaagatctactgcaccgtaatttaaccgccccggctatcgttgatggttatttagtggtgggagatgcagaaggctatctccattggattgataccagtacaggcaaatttattgctcaaaataaagtaaatagctcaggtttattaagccgtccacaggctgttcaagataaactgatgatccaagcacgtgacggtaaactttatctatatcgtcggtaa

SEQ ID NO: 294509 - DNA, 1491 bp, Proteus mirabilis
atgatacccgttattgccttagtagggcgccctaatgtgggaaaatccacattatttaaccgactaacacgcacaagagacgcattagttgcggattttcctggacttacccgtgaccgtaaatatggtcgtgcagaattagacggtgaagaatttattatcattgatactggaggtattgatggtgcagaagagggtgtagaaacccatatggcatcacaatcactgcaagccattcaagaagccgatattgtgctatttttagtcgatgcgcgagcaggattaatgccagccgaccaaggtattgctaaacacttgcgtggtgttgagaaaaaaacctatttagtggcgaataaaacagatggtatcgatattgataccgccttggctgatttctactctttaggattaggggaaatattccctattgctgcttcacatggtcgtggtgttgctcaactgattgagcaagcgttgttacctattgtgggtaaagtcgtcgaagaagagaaagaattaacagaagaagaagagaatgccgcttattgggctgctttagaagcagagcagaaagagcaagaagaagaggaagaagaggatgatttcgatccgacaacacttcctgttaaattagctattgtaggccgccctaatgtaggtaaatcaactctgactaaccgtatgttaggtgaagagcgtgttgtagtttacgatatgccaggcactacccgtgatagtatttacataccgatggagcgtgatgataaggagtatatccttattgataccgctggcgttcgtaaacgcggaaaagtaaaagaaacggtagaaaaattctcagtgatcaaaacattacaagcgattgaagattgtaatgttgcactacttgttattgatgctcgtgaggggatttcagatcaagatctctctttattaggttatattcttaattctggacgctctttagttattgctgtcaataaatgggatggtatgacccaagaagatcgcgaacaagttaaagatatgcttgatctcaaattaggttttgttgattttgcccgcgttcattttatctcggcattacatggtagtggtgttggtaatctgtttgagtcgattcaagaagcctatacttgcgcgacacgtcgtgttggtacatcaatgttgacgcgcataatgaagatggcagaggatgatcaccaaccccctcttattcgtggacgccgtgtaaaaatgaaatatgcccatgctgggggatataatccacctgtcgtggttattcatggtaaccaagtgtctgatttacctgatagctataaacgctatttaatgaattatttccgtcgcacactacaagtgatgggaactcctatccgtattcaatttaaagaaggggaaaacccttatgcggataagaaaaataaattaacagcttcgcaaatacgtaaacgtaagcgtttaatggctcatttaaagaaatcaaaataa

SEQ ID NO: 294510 - DNA, 360 bp, Proteus mirabilis
atgactatgggttttgctatttttttactttctggctgtgccaccccagaaaaatggcaagtaaatatgaaaaaccccacacctttagatatcgctaaaaatctatgcatgcaagaagcaaaacaacgctaccctgagcattatttgagttcaacgccaaattatagctatccttcttcttcaacgataacaatagatggtaaagaagttactattcctaattcaaattatcattcctattctcgttatgatgccaatgaatcagagcgtaaacagtattttgatatttgtatgagaggagaggggtgggaaaataaaaataaagtgactggattactcgcctttttatttaatgactaa

SEQ ID NO: 294511 - DNA, 909 bp, Proteus mirabilis
atgagtttacctgatattcatcgtgtgcaatcattttttttgtcgttgcaagatagtatttgccatgctattgaaaatatagaccaaaaagcaacctttcagcaagataattggcaaagagaagctggcggtggtggtcgtactcgagtgctcacccaaggtgctatttttgaacaagcgggtgttaatttttcccatgtttatggagatgccttgcctgcatcagccacggctcatcgccctgaattaagcggtcgtcgttttcaagcaatgggcgtttcattagttattcaccctcttaatccctatattcctacttcacatgcaaatgttcgtttttttattgctgaaaaagagggagaagctcctgtatggtggtttggtggaggctttgacttaacgccttattatggatttgaagaagatgttatccattggcataaagtggctaaatctgtgtgtgatccctttagccaagattattatgctcgatataaaaaatggtgtgatgactatttttatttaaaacatcgtaacgaaccgcgtggtgttggtggtctattttttgatgacttaaatacacctgatttcgatcactgttttgaatttgtacaacgtgtcgggcagggttatctggatgcctacttgccgattgtcgaaaaacgcaaatctataccctggggagagcgtgaacgccaattccaactttatcgccgtggccgttatgtcgagtttaatttggtttgggatagaggcacgctatttggtttacaaagtggcggacgtactgaatccattttaatgtcaatgccaccattagttcgctttgcatatgattatcgccctgaacctaatactcccgaagctaagctgtatactgattttttaattcacaaagagtgggtatag

SEQ ID NO: 294512 - DNA, 372 bp, Proteus mirabilis
ttgatctcaccagaaaatgatcctgaaattgatattgaacgaaagattaaccactcccccgatctctttttaatcgcagaggttgctggcgaaatagtcggtagtgtaatgggtggctatgatggtcatcgtggctcgctttactatttgggcgttcatcctgagtttcgcggtagaggaattgccaatgcactaatctctcggctagagaaaaaactaattgcaaaagggtgtccacaaattactttaatgatccccgaagagaacgatgccactatttgtatgtttgaaaagcttctctatgaagatcaaaatcaagagaatacggcttacactaaacgcctaattatcgatcaggacttcgatctttaa

SEQ ID NO: 294513 - DNA, 441 bp, Proteus mirabilis
atgaatataggcatttttgttggtactgtttatggcaatgcattggcggttgctgaagaagcgcagcgcattttgcttgagcataaacatcaagctaatatctatgaagaaggtacacttgccgattggcaaaaatattcaacagtactggtgataagctctacaaccggccaaggcgatttacccgatacaatagcacctttattttatgagctacgagataatgttggttatcaacctaatttacattatggcctaattgcgttaggtgatagcagttacgataatttttgtggtgcaggtatgcaatttgaagcgttattacaagagcatcaagcaaagcgtattggtgaaatattaaaaatagacagtatggatattgccgagccagaagtatttgctataaattggctggaaaactgggctacattattgaattaa

SEQ ID NO: 294514 - DNA, 387 bp, Proteus mirabilis
atgtacgataatttaaaaaatttagggatccaacatcctgaagatattgatcgctataccctacgtcaagaagctaacaacgatattttaaaaatttattttcgcaaagataaaggtgaattctttgcaaaaagtgtaaaatttaaatatccacgccaacgtaaaacaatttctgatactcaatcaggacaaggttttaaagaagtcaatgaaatcaacactaacttacgttatgtgattgaagaattagatcaaatttgccagcaagatcaagtggaagtggatttgaaacataaaatcctcgatgatttacgtcaccttgagcacgttgttgccaataaaattgctgaaattgaagccgatttagaaaaattgactcgtcgttaa

SEQ ID NO: 294515 - DNA, 825 bp, Proteus mirabilis
atgcaagcattacaatctattattgataacgcctttgaacaacgcgctgaaatcacaccagataatgttgaaccacaggtacgcgatgcaattaataacgttatcgctcaactagacagtggaaaattgcgagttgctgaaaaaattaatggtcagtgggttactcatcaatggctaaaaaaagcggttctactctcttttcgtatcagtcacaatcaagtgatcgacggtagcgaaagccgttattttgataaagtgccaatgaaatttgcaaattacgatcaagctcgttttgaaaaagagggatttcgtgttgtgccacctgctgccgtcagacaaggggcctatattgctcgtaatacagttctaatgccttcttatgtcaatattggtgcttatgtggatgaaggaagtatggtggatacatgggcaaccgttggttcatgtgcgcaaattggtaaaaatgtccatttatccggtggcgttgggatcggtggcgtattagaacctttacaagctaacccaaccattattgaagataactgctttattggagcacgttctgaaattgttgaaggtgtgattgttgaagaaggctctgtcatttcaatgggtgtttatattggacaaagtaccaaaatttatgacagagaaactggcgaaatccattacggtcgtgttcctgctggttcagtggtggtttctggtaatctaccttcaaaagatggtcgttacagtttgtactgtgctgtgattgtaaaaaaagtcgatgctaaaacacgtggaaaagtgggtattaatgaattgttaagaactatcgactaa

SEQ ID NO: 294516 - DNA, 2646 bp, Proteus mirabilis
atgataacctctaatacctttcaaacagcaccaccgtccccttcgttgctgactgaaaatacgctagatagtactttactaaaacactctattgaacaatttcagtcatggttagcagatgcttttcatcatgatgctgatgttgctttgttactacaagctcgtagtcactttatcgaccaactactcacacaattatggcgttatactgaattagcggatcaccctgatctctgtatcattgccgtgggggggtatggtcgccaagaattacaccctctttctgacattgacttgctatttttaagtcaacagcctcttcctccccaaattgccgaaaaagtcagtcaattaattaccttgctttgggatatccgtttagagataggtgtcagtgtgagaacgatggaagagtgccttttagaaggactgtctgatttaactattgccaccaatttactagaagcgcgtcttgtttgtggtaataacgcactctatcaacaattaattaaacacatttttagccaaggcttttggccatcgcctgatttctttgcagctaaaattgatgagcaagaacaacgtcaccaacgctttcatagcaccagttataatctagagcctgatattaaaagtagtcctgggggacttcgtgatattcacacccttatatgggtcgctcaccgtcattttggcgcaacatcaatatctgaaatggtcaactttggctttttaacccctgccgaaggacaagaattactcgagtgccaatataccttatggaagatccgttttgcgctacatttagtcctcaatcgttatgacaataggttactgtttgatcgccaattaagcgttgcccaacttttaaattatcaaggtgaaggcaaccaacctgtcgaaaaaatgatgaaggattactatcgcgttactcgccgtgtgagtgagctaaacgatatgctactgcaactctttgatgaagcaatcctcgcattacaacccaatgttaaacctcgccctcttgacaaagaatttcaattaagaggtacattaattgatgttatagacgatgaatgttttcttaatgatcctattgccattatgcggttatttttacgtatggctgagcatgcagagataaccggaatttattcgaccacactacgccatttgcgttatgcccgtcgtcatttagtacaacctttatgtgagtacccactagctagacaagtatttatgcaaatcttacgtcatcctagggcggtttcgggggcatttgtcccaatgcataaacatagtgtattaagtgcttatttcccacaatggaacaatattgtcggtcaaatgcagtttgatctattccatgcttatacagttgatgagcatactatccgtgtcttacaaaaacttgaaagtttcgctgatgatgcaaatcgaaaccgacatcctctttgtgtcgatatctacccgaaactacctcaaattgagttattaagacttgctgctctatttcacgatattgctaaagggcgacatggtgatcactctttattaggtgcacaggatgttattagctttgctcaacaacatggactaaatcaacgagaaatcgctttagttgaatggcttgtaagtcatcacttacttatgtcagtaacggcacaaagacgtgatattcaagatcccgatgttatcttccaatttgcctctgaagtcaaaaatgagagccgtttacgctatttactctgtctcactgttgctgatatttgtgcaacaaacagtagcttatggaatagttggaaacaaagcttactgcgtgaactatttctcgctacggccaatcaattacgccaagggatgcactctattccagatttacgggaacgtatccgcgatcaccgtcagcaagcactaactattttacaacagcaacaggtcgatgaagaaaaactgcaagcgatttgggctcgttgtcatgcggactattttttacgtcatactccagagcaaattgcttggcatgctcaggcacttattgagcacaatagtgctgagcctatggtattgattagccaacaaaccgagcatggtggtacagaggtttttatttggtgtgctgaccgaccttctctatttgcttctgttgcaggtgagctagatagacgtaatttaaatattcacaacgcacaaatttttactaatcgcgacaatatggcaatggatacctttatcgttttagagcctaatggtaaaccactggcgattgatcgctatcatgctatacgccaagcgcttattcgcgttgtatcagccccttataacgccaatgccaaaacccgtgctttaccggctaaattacgccattttgaggtacccactaaaattaactttatcgcctctaaccataataaacgtacttatatggagttatttgcacgtgatcgcccaggcttattagctattataggtaaggtttttgccgatctttctctttcgttacatggcgcaaggatcaccactattggcgagcgtgttgaggatttttttgtattaacagataacgaaaataatgcgttaaaccaaaaaatgaaggatgaagtcgtagaaaggttgacaaaagccctcgtttcaaaggataaaatatag

SEQ ID NO: 294517 - DNA, 798 bp, Proteus mirabilis
atggctattgtaatcaagactgaagaagatattcaaaaaatgcgcgtcgcgggtcgtcttgcggctgaagtccttgaagttgtcgcaccctatgtaaaacccggcgtaagtacagcggaattagatcgtatttgtcatcaacatattgttgatgttcagcaagctatccctgcttgcttaaactatcatggcttccctaaatcagtgtgtatttctgttaatgatgttatttgccatggtattcctagtgaagacaaaatcttaaaagacggcgatattgttaatattgatgtcactgtcattaaagagggttttcatggcgatacgtcaaaaatgtttatcgtcggtaaaccgactattcaaggtgagcgtctatgtcggatcacccaagaaagtctctaccttgcaataaaaatggtaaaaccaggtattcgcttacgtgaattaggtaaagccattcaaaaattcgttgaagggcatgatttttctgtggtacgcgaatattgtggacatggtattggcgaaggtttccacgaagagcctcaagtattacactatgatgctgatgacggtggtgttgtgttacaaaaaggcatggcatttactatcgagccgatggtcaatactggagattaccgtattcgtaccatgaaagacggttggacagtaaaaaccaaagatcgcggttggtctgctcaatatgagcatactttagtggttaccgacaatggttgtgaaatcatgacactgcgtaaagaagaagagccatttatttctgccgtattagttaacgaataa

SEQ ID NO: 294518 - DNA, 726 bp, Proteus mirabilis
atggcaactgtttcaatgcgcgatatgctgcaagccggtgttcacttcggtcaccaaactcgttactggaatccaaaaatgaaaccattcatctttggtgcgcgtaacaaagttcatatcattaacttggaaaaaactgttccaatgttcaatgaagctctggttgaactgaacaaaattgcttctcgtaaaggcaaaatcctgtttgttggtactaagcgctctgccgttgaagctgttaaagaagcagcagaaagctgtgaccagttttatgtaaaccaccgctggttaggcggtatgctgactaactggaaaactgttcgtcagtcaatcaaacgtctgaaagatttagaatctcaatctcaggacggtacttttgacaaactgaccaagaaagaagcgttaatgcgttctcgtgaacttggtaagttagaaaacagcctgggtggtatcaaagacatgggcggtttacctgacgctctgtttgttatcgatgctgagcacgaacacattgctatcaaagaagcaaacaacctgggtatcccagtatttgctatcgttgatactaactctgatccagatggtatcgactacattatccctggtaatgatgatgcaatccgtgcggttaaattatatctgaccgctgcagcaacagctgttcgtgaaggtcgttctcaagatctggctgttcaggctgaagaaggcttagtcgaagctgaataa

SEQ ID NO: 294519 - DNA, 852 bp, Proteus mirabilis
atgtctggaattaccgctgcattggtaaaagaactgcgtgaacgtactggcgcaggcatgatggaatgtaaaaaagcgctggttgaagctaacggtgatatcgaattagctatcgacaacatgcgtaaatcaggtcaagcaaaagcggctaaaaaagcaggtcgcgttgctgctgaaggtatcatccttgcagaagttgctgctgatggtaaattcggtgcgctggttgaactgaactgtgaaacagacttcgttgctaaagatgctggcttcatcgcattcggtaaagatgttatggctgcagtattagcagacaaaactgacgatatcgaagcactgaaagcgaaattcgaagacgctcgtactgcattagttgcaaaaattggtgaaaacatcaacattcgccgcgttgctattttagaaggcgaagagttaggtacttacctgcacggtgctcgcatcggtgttttagttgcagctaaaggcgctaacgaagaactgatcaaacacattgctatgcacgttgctgcaagcaaaccagaatatgttcgccctgaagatgtgcctgctgatgttgttgagcatgagcaccaaatccagatggacatcgcaatgcaatcaggtaaaccacgcgaaatcgcagaaaaaatggttactggtcgtatgaacaaattcaccggtgagatctctctgactggtcagcatttcgttatggatccaagcaaaactgttggcgatctgctgaaagaaaacaatgctgaaatcattaacttcgttcgtttcgaagttggtgaaggtattgagaaagttgaagctgatttcgcagcagaagttgcggcaatgagcaaataa

SEQ ID NO: 294520 - DNA, 729 bp, Proteus mirabilis
atggcaaccaatgcaaaacccgtatatcagcgaatcttattaaagctgagtggcgaagccctgcaaggcgcagaaggttttggtatcgatgcgagcgtacttgatcgcatggctcaggaaattaaagaactcgttgaattgggcatacaagtcggtgtcgtaattggcggtggtaacttgttccgtggcgctggtctagcagctgcaggtatgaaccgtgttgtgggtgaccacatgggaatgctcgccacagtgatgaatggcttagcaatgcgtgatgcattgcatcgtgcttatgtcaatgcacgattaatgtcagcatttccacttaatggtgtttgtgataactacagttgggctgaggctattagcttattacgccatggccgagttgttatcttctcggcaggtacaggcaacccattctttacgactgactcagctgcgtgtttacgtggtattgaaattgaagctgacgttgtattgaaagcgacaaaagttgacggtgtattttcagccgatccaaccaaagatcctgatgcggtattatatgaaaagctgacttatcaggatgtattagaacgtgaattgaaagtcatggatcttgctgcattcacattagcccgagatcataatttacctatccgcgtattcaatatgaataaaccgggtgcattacgtcgggttgtaatgggtgaaagtgaaggaactttgatttctcacgcttaa

SEQ ID NO: 294521 - DNA, 558 bp, Proteus mirabilis
gtgattaatgaaatcaaaaaagatgctcaagaacgcatggacaaaagcgttgaagcactaaaaagccaaattaataaagttcgtactggccgtgcgtctccaaacctattagatggtattgttgtagaatactacggcgcaccaactccattaaatcaagttgctaacgttgtggcagaagatggccgcacattggcaattacagtgttcgatcgtactttagcacctgctgttgaaaaagcgattatggcatcagatttaggcttaaatccttcatctgcaggcgcgatcatccgtgttccactgcctccgttaactgaagaacgtcgtaaagacttaatcaaagttgtgcgtggagatgcagaacaaggtcgtgtctctattcgtaatatccgtcgtgatgctaatgataaaatcaaagcattactgaaagataaagaaattagtgaagatgatgaacgccgttcacaagatgaaattcagaaattaactgatatgttcattaaaaaaattgatgaagcattaacgctgaaagaagctgagttaatggaattctaa

SEQ ID NO: 294522 - DNA, 1194 bp, Proteus mirabilis
atgaaacaaataactatattaggctcaacagggtctatcggaacaagtacgttatccgtcattgaaaataaccctgatgagtttcaggtgcttgctttagtggctggaaaaaatgcaactaaaatggcgcagcaatgtcgcgcttttcagcctaaatatgcggtgatgtcagatgaaaaaagtgccggtgagctgaaacaattattagccaatacatcgtgtaaaacggaaatattatcaggctctaatgctgttaatgaaattgctgcattggatgaagccgatcaagtgatgtctgctattacaggggtggcggggcttaagcctacactggctgcgatagaaaaagggaaaagaattttattagccaataaagaatctctgatcacgagtggtcgtttattctttgatgcggtggctaaatatggtgcgaaggttttacctattgatagtgaacataatgctatctaccaaagtttacctacaggtattcaagacaatttaggccatgcatctttagaagcccatggcatcaccagtattttactcacaggctccggtggaccgtttcgctatacgcctttagatgagctagatgcaatgactccagaccaagcttgcgcacatccaaactggtcaatggggcgtaaaatttcggttgattcagccactatgatgaataaaggcttggaatatatcgaagctcgttatttctttaatgcctcggaagcagagatggaagtcattattcatccccaatcggtgatccattcaatggttcgctatcgtgatggtagcattatcgcacaaattggtgaaccagatatgagaacgcccatcgcttattccatggcatatcctcatcgcaccgaatcgggcgcgaaagcattagatttttttgagatacaagccctagaatttatccgtccagactatcagcgctatccttgtttagcacttgccatcgaagcctcgcaacggggacaagcttcaacaacggtattaaatgccgctaatgaggttgttgttgatgcttttttaaacgaaaaagtaaaattcactgatattgctaaaattaatcgcaaagtggttgaacattttgacctctcagagcctcaaagtatcgacgatgttttagaaattgataaattagcaaggttacaaacacagcagattatcgcacaaattgtataa

SEQ ID NO: 294523 - DNA, 759 bp, Proteus mirabilis
gtgaacttatccagtgacgattcatccgcatcaaaaccaaagcatgttgccatcattatggatggcaacggacgttgggcaaaaaaacaagggaaactccgagttacgggccatcgcgcgggaattaaagcagttcgagatgcggttagcttttccgtcaaacataaaattgaatcactaacgttatatgcatttagcagcgaaaactggaatcgccctgaacaagaggtgagttctttgatggagttgtttgtttttgcattagataatgaagtgaaaagcctacacaaacacaatgtcagattaacaattatcggtgatatcagccgctttagtcgtcgtttacaagatagaataaaaaactctgttgcactgactgcaaataataccggactcaatttaaatattgctgccaattacggtggacgatgggatattacacaaagtgtacaacaattagcgagttccctcgcaaaaggggagttagctatcgaagatattaatgaaaatgcgatatcctcacacttgtgtttacatgatcaatcgcctgtagatcttgtgatccgtacaggtggagaacatcgtataagtaatttccttatctggcaaattgcttatgctgagttatattttacacaggttttatggcctgattttgatgaacaagtttttcagaatgcacttgatgcttttgctaaacgggaaagacgtttcggtggtactacatcggaaacagatactgtaaatctgggaggataa

SEQ ID NO: 294524 - DNA, 864 bp, Proteus mirabilis
ttgcttaagtatcgtgtcattactgcattaatactaatccctattgttattgctgctttatttcttcttcctcccgcaggatttggattagttattattgccatttcaagcttagcgggttgggaatgggctcaatttatcggctggcattctcaaggcaaacgtattgctactggtgttggatttgctgcactcttagttcttatgcaagcctcgttaccggattttgatcatctgcttgatacagcaatgattaagaatagcttatgggctgggctcttttggtgggtagcggcgattttattagttgtcagttatccgaattcagccaatatgtggaaaaattctgttcttcttaagttattgttcggtatattgacgattgttcctttttattgtggcatgatggcgctacgtatgttgggatatagcacaaactcatatacaggggcttggtggttactgtatgtcatgttattggtttgggctgcggactcaggggcttatgcatttggccgtttaatgggtaaacataaaatggcaccgaaagtatcaccgggtaaaaccttggaaggtctggtgggcgggttaatcactgcaggtgttgtttcatggctatttacgcgtttcgcaccaattactgaagtgcctaaccatctattactgatttcgggcatcgtggtgattgtttccgtattcggcgatctggctgagagtatgtttaaacgtgtttccggcataaaagacagtagtcagcttatccctgggcatggtggtgtgctagatcgtattgatagtttgaccgcggcgatccctgttttcgctggattggtgtttttagtttcttctggctttcaaatgtaa

SEQ ID NO: 294525 - DNA, 1353 bp, Proteus mirabilis
atgggtatcctgtggaatctagccgcgtttattatcgttttaggtattcttattacggtacatgaatttggacatttttgggtagcaagacgctgtggcgtttatgttgagcgtttttctattggttttggtaaagcgatttggcgtaaaacagataaacatggcaccgaatttgtcgttgcatggatacctttaggtggctatgtaaaaatgttggatgagcgtgtcgccgaagttgcaccagagcgtcgtcatctcgcttttaacaataaaaccgtcgggcaaagagccgctattgttgccgccggaccgattgcaaatttcttattagccattgtggcttattggcttgtttttatgataggggtgccggcattaaagccaataattgcagatattcgccctgactctatcgcagaacaagcaaaattaacgccgggaatggaactaaaatccgttgcaggtatcgaaacgcctgatcagaatgctgttcgtttagcattagtgagtaaaattggtgcaaaagaggtgactttcgttgtaactcagcctaactctctttctgagagtgagaatatactgaatttgcaacagtggaattttgatcctgaaagacaagatcctatcgtatccctaggcatcatgcctgttggcgcacggttggactctaaagttgtagaagtaacaccagactctgcggctgaaaaagcaggtttacaagcaggggatcggatcgttaaagtcgatggtcagccaattgatacttggcacccatttacttattttgttcgacaaagccccaacaaaacgttggaactgttagttgaacgtaacggtgcttctttggtgttaaatattactcctacagcaatagcgctgaaagatggtagcgaagttggacaagtgggtgcgaagctacaagtattaccgccagatgagcaatacttgataatgcaacaatacaacccattttcagcgttatatgaagcatctgataaaacatggcagttaatgggtttgactgtcaaaatgattggcaagttagtggttggtgatgtcaagttaacaaatcttagtggaccggtttctatcgctaaaggcgctggaatgtctgcggattcaggttttgtttactatttgatgtttatcgcacttatcagtgtcaatctggggatcattaatttgtttcccctgcctgtcttagatggtgggcacctgcttttcctggttatcgagaagataaagggagggccggtatctgagcgtgtacaagatgtctgttatcgtttcggtgttatggcactgatgctgttaatgggacttgcacttttcaatgatttctctcgcttataa

SEQ ID NO: 294526 - DNA, 2394 bp, Proteus mirabilis
atggcgatgaaaaagttgcttatagcgtcgctgctgctgggcagcgccactgcatacggttcagacggattcgtagttcaggacattcaatttgaaggtcttcaacgcgtcgccgttggtgcagcattactgaacatgcctgtccgagttggagattcggtcagcgatgatgatattagtcgaactatccgttcattatttgcgacaggaaacttcgatgatgttcgggttctgcgtgacggaaatgtacttattgttcaagttaaagagcgtccaacaattgcgagtattactttctcaggtaacaaagcaattaaagaagatatgcttaagcaaaatcttgatgcttccaatatccgtattggtgaaacacttgaccgaacaatgttggctaatattgagaaaggtcttgaagatttctactatagtgttggtaaatataacgccacagtaaaagttgttgtgactcctcttcctcgtaaccgtgttgatttaaaactggtatttgccgaaggtgtttcagctactattcaacaaatcaatattgttggtaataaagcatttagtactgctgaattagttaaccgcttccaactacgtgatgatgtgccttggtggaacttagcggctgatgaaaaatatcagaaacaaaaactcgctggtgacttagagacattaagaagtttttatctagatcgtggttatgcacgttttgatattgaatccacaaacgttagcttaacgcctgataaaaaaggtatttatattactattaacctgaaagaaggtgataaatacacggttgaaagtaccgaaatcaatggtaataccgcaggctataccaaagagattgaagatctgatccaaatcgcaccaggctcactgtataacggtgctcaagtgaccaaaacagaaaatgaaattaaaaatctattaggtcgctatggatacgcctatccacgggtgatgacaaatcctgaaatcaatgatgaaaataaaacggtaaaactgcatgttaacgttgatgcagggaatcgtttctatgtgcgtcaaatccgttttgcgggtaatgatataaccaaggactctgttttacgtcgtgaaatgcgtcaaatggaaggggcttggttaggtagcgatttagttgaacaaggtaaagagcgtttaaaccgtttaggttattttgaaacagtcgaaacggaaacacagcgtattccgggatcacctgatcaagttgatatcgtttatcgtgtcaaagagcgtaatacggggtcacttaactttggtgtcggtttcggtacagaaagtggtgttagcttccaagttggggtaacacaggataactggttaggaacggggaatgctgttgcgattaatgccagtaaaaatgattactcaacgtatgctgaattgtcagtcactgatccttactttactgtaaatggtgtcagcttaggaggtcgtattttctataacgatttccgagctaatgatgcagatttatccggctataccaataaatcttatgggttagacggcactttaggtttccctatcaatgaatataactcggctcgtcttggcttaggctatacgcataacggcttgtcacggatggaacctcaagtggcgatgtggcgttatcttgaaagtatgggggaaaacccaggctttgataaacgcgaatcctttaatgcggatgactatactgtcagcatgggatggacatttaataacttaaaccgtggtttcttcccaacctctggggcaagaagtaatttaagtgggcgtattaccataccgggctctgataacaagtactataaagtaacttgggacggtatggcttattaccctctaaatgaaaaagagtcttgggtcaccttgttcaaaggtcgtttaggttatggtgacggtttagggggtaaagaattacccttctatgaaaacttctatgccggtggttctggtacagtgcgtggtttccgttccaataatatcggtcctaaagcaatttatttagataaagatggtaagccaaaaccaggtgagccatctagcgatgctatcggtggtaatgctatggcagtcgccagctttgaactgatcacaccaacgccatttattgatgataaatactcttcatcagtcagaacctctgtattcgttgatgcgggtacggtatgggatactaaatggagtagcactaactctaattggactgctggtatgccagattatagtcgtgctggcgatgtgcgtgtttcaaccggtgtggctttacagtggttatcacctttaggtccgttagtcttctcttatgcgaagccaattaaagattacgaaggcgataaatctgagcaattccagtttaatattggtagaacgtggtag

SEQ ID NO: 294527 - DNA, 498 bp, Proteus mirabilis
gtgaaaaaattgttatgtgccgctgccctaggaatggcattgacgatgtcagcaggcgctcaagctgcagataaagtaggtgttgtgaacatcggtcaagttctccaaaaagtgcctaaccgtgatgcggtagagaaacaattggaaaatgaatttaaatcacgtgataccgaattgcaaaatttaggtaaagcattacaaactgcggttgagaaataccaaaaagatgcaccaaccatgaatgcgacacaacgtgctaatacagaaaaagatctggttgctaaacgtgaagcttatgcacaaaaagcacaagcttttgagcaagactttagccgtcgtcaagcagaagagcgtaataaaatcatgaaacgtgtattagacgctgttgatgctgtagcgaaaaaagaaggttatgatgtgattttagatgcaaacactgttccttatttcgcagacggtaaagatattactgctcaggttcaaaaacaggttaaataa

SEQ ID NO: 294528 - DNA, 1029 bp, Proteus mirabilis
atgttttcaattcgattagctgatcttgctcagcaattgaatgcacagttacacggcgatggtgatatcactatcgccggtcttgcttcaatgggcttagcaaatggtgaacaaattacctttctttccgatagtcgctatcgtgaaaaactaagtgaatgtcaggccgctgcggtggtattaacagaggctgatcttcctttttgtcctgttgctgcactggtggtgaaaaatccttatctggcttatgcacaaatggctcagattatggatactacgcccgcgccagcacaagatatacatccttctgctgttattgccgctgatgctaaattagggaataacgtctcaattggtgcaaatgcggtcattgagtcaggtgttgagttaggtaataacgtagttattggtgcaggatgctttattggtaaaaaagcacatatcggcgataatagccgtttgtgggcaaatgtctctgtttatcatgaagttatcattggtaaagattgtttagtacaatctggtactgtcattggttctgatggttttggttatgccaatgagcgtggcaattggattaaaattcctcagttaggctcagtgatcattggtgaccgtgtcgaaattggtgcatgtactaccatcgatagaggcgcattagataacacagttatcggtaatggtgttatcattgataaccagtgccaaatcgcacataacgtcattattggtgacaatactgctgtggcaggtggtgtcatcatggcggggagcctgaaaattgggcgttactgtatgattggtggagcaagtgttatcaatggtcacatggaaatttgtgataaagttacggtaacaggaatggggatggttatgcgtcctatcactgaacctggggtttattcttctggcattccgttacaaccgaataaagcatggcgtaaaaccgcagcactggtgctgcgaattgatgaaatgcaaaaaaggctaaagtcgctagaacgtcaagtagaaaatagcgacaagtaa

SEQ ID NO: 294529 - DNA, 453 bp, Proteus mirabilis
atgagtgataatcatactctgcaaatcgaagaaattttagatttacttccacaccgttacccatttttattggttgaccgtgtccttgattttgaagaagggaaatttctaagagcagtaaaaaatgtatcttttaatgagcctttctttcaaggtcacttcccaggcaaacctattttccctggtgtactgatcctcgaagcaatggcgcaggcaacaggtattttagcattcaaaagcgtaggaaaactggaacccggtgaactttactattttgctgctattgacggtgctcgctttaaacgtcctgtcttacctggagaccaaatggttcttgaggttgaattcattaaagaacgccgtggcgttgcacgctttaaaggcgtcgctaaagttgatggagaaattgcctgcgaagctgagatgatgtgtgctcgccgccgtgaggtctag

SEQ ID NO: 294530 - DNA, 804 bp, Proteus mirabilis
atgattgataaatccgcagtaattcacccttcttcaattattgaagagggtgcggtaattggtgctaatgttcgcattggccctttttgcgttattggtagccatgttgagataggtgaaggtacagatatcaaatctcatgtggttattaatggccatacacgcattggccgtgataatcagatttaccaatttgcctctatcggtgaagtaaaccaagatctgaaatatcgtggtgagccgacccaagtcattattggtgatcgcaatcttatccgcgaaagtgtcactattcatcgtggtacgacacaaggcggtaatattactaaaattggcaatgataacttattgatgatcaacacccatgttgctcatgattgtatcattggcgatcgctgtattattgcaaataacggtactttaggtggacatgtcactttaggtgattatgtgataatcggtggtatgagtgcggttcaccaattttgtcagattggttcacatgtcatggtgggcggctgttccggtgtagcacaagatgttcctccttttgtgattgcacaaggaaaccatgccaccccttatggtttgaatattgaaggattaaaacgtcgcggttttgcaaaagaagatctgcatgccattcgtaacgcttacaagatactttatcgtaatggtaaaacgcttgaagaagcgcgagaagagattgctcaattagccgcagacaataataatcagtatgtaaaaatattcagtgattttctggaaaattcagcaaaatcaaaccgcggtattattcgctaa

SEQ ID NO: 294531 - DNA, 1167 bp, Proteus mirabilis
ttgtcaggccaatcatctataaaacagcgtccgttagttatcggccttgtggctggtgaaacgtccggtgatatcttgggcgcgggattaatccgcgctcttaaacaaatgcatcccaatattcgttttgttggtgtcgcaggtcctttgatgcaagcagaaggttgtgaagcttggtatgaaatggaagagcttgcggtgatggggatcgtggaagtacttgaacgtttgccacgattattgaagatcagaaaagatctcactcaacgctttacacaacttaagccagatgtttttgttggtattgatgctcctgattttaatatcacccttgaaggtcgcttaaaacaaaaagggttgaaaactatccattatgtcagtccatcagtatgggcttggcgtcaaaaacgggtttttaaaattggtaaagcaacggatttggttttagctttccttccttttgaaaaagcgttttacgataaatatcaggttccttgtcgctttatcggtcatacaatggctgatgcaattgcgttacaccctgataaaaaagcggctcgtgaacacctaggtattgatcaagaggcaatctgtttagctctgctaccaggaagtcggcattctgaagtggaaatgctcagtgcggactttataaaaacagcgcagcgattaaagcaacagatccccgcattacatattgttgtccctttggtaaatgcgaagcgacgggcacaatttgaacaaatacatcaaagtgttgccccaaaacttgaaatccaactcttagatggacaagcaagagaggcgatgaccgccagtgatgcgactttattagcatctggtacagccgccttagaatgcatgttaacgaaatgcccgatggtagtgggttatcgtatgaaaccatttaccttttggttagcaaaaaaattagttaaaacgccctatgtctctttacccaatttattagcaggacgggaaataattaaagagttgctgcaagaagagtgcacaccagaagcactggcagaacaattactccccctattaacggatgcggaaaaagcacaacacttaaaagagatatttttacaattacactcagctatccgttgtcgtgctgatgagcaagcagcgaatgcagttttagaattagcaggtcaataa

SEQ ID NO: 294532 - DNA, 591 bp, Proteus mirabilis
atggaatttgtctatcctaaagcaaacctaattgctggcgtcgatgaagtcggtcgcggaccattggtgggggcggtagttactgctgcggtgatcctcgatccagctaatcctattcaaggattaatggactcgaaaaaattgaccgagaaaaaacgcaatgcgctttatgatgaaataaaagaaaaagcattatgttgggctattggacgtgctgagcctgaagagatagataaactgaatattctttgggcaacgatgaaagccatggagcgtgctgtcgcgggattatccataacgcctgatatggtcttagtcgacggaaaccgttgtcctaacttgccaatggcatctcaagcggtgattaaaggtgatagtttagttcaagaaattagcgcagcgtcaatactggctaaagttacccgtgatagggaaatggaacagctagataaactttatcctgattacggctttgccaaacataaaggctatccaacagccttccatatggaaaaactggcttcattaggggcaacgccttatcatcgtaaaagttttgcgcctgtaaaacgtgctttaaatttagtctaa

SEQ ID NO: 294533 - DNA, 3423 bp, Proteus mirabilis
  misc_feature (2661)..(2670): n is a, c, g, or t
atggcagatcctcgttttatccatctaagggtacacagcgattattcaatgatcgatggattggcaaaaacagggcctcttgtgaagaaagtggcttcgctgggtatgcctgcttttgcaattacagatttcactaacttatgtgggttagtgaaattttatggagcggctcatggtgccggtatcaaacctattgttggtgcagatgtctatctggaaacggaactattaggtgatgaatacgcgcatttaaccattctcgcccgtgataatgtgggatatcaaaacctaacactattgatttctgaagcttataaacatggttatggtgctgccggaccggttatcaaacaagagtggttaacaacatataaagaaggtctcttgttgctttctggcggtagaatgggagatgttggtaaattcctactacgcggtaatcgagctttagttgagcaatgtcttgaatattatcaaacgcactttcctgatagctattatttagagcttattcgtactgggcgtccggatgaagagagctacttacacgaagctgtagccttagcatcagaaaaagggcttcctgttgttgcgacaaatgatgtccgttttctggatagtgatgattttgatgctcatgaaattcgcgtggctattcatgatggtttcacattatccgatcctaaacgtcctaaacactacagtcctcagcaatatatgcgcacagaagaagagatgtgtgagctttttgctgatattcctgaagcattagaaaacagtgttgaaatagccaaacgctgtaatgtgaccattcgtttaggtgaatactttcttcctcaattcccgaccggggatatgagtacagaagatttcttaattaaaaagtccaaagagggcttagaagagcgccttgcctttttatttcctgatccgcaagagagagaaaagcgacgtcctgaatacgatgagcgccttgagattgaacttaaagttattaaccagatgggattccccggttactttttgatagtgatggaatttatccagtggtctaaagataacggtgttcctgtagggccaggacgtggttcaggtgctggctcactggtggcttattcgcttaagataacagatctcgatcctcttgagtttgatctactgtttgaacgttttcttaatccagaacgtgtatcaatgcctgactttgacgttgatttctgtatggagaagcgcgatagagttatcgatcacgttgcggatatgtatggtcgtgatgccgtatcgcaaatcattacctttggtactatggcggccaaagctgttattcgagatgttgggcgtgttttaggacacccttatggcttcgttgatagaatttccaagcttgttccccctgatccgggaatgacgttagaaaaagcctttgccgccgagcctcagttacctgaaatttacgaagctgatgaagaagtgaaatcgcttattgatatggcgcgtaaattagaaggggtaacccgtaatgcgggtaagcatgccggtggtgtcgttatttctccaaccaaaattaccgactttgcgccactttattgcgatccggaagggaataacccggttacacaatttgataagaatgatgttgaatatgccggtcttgttaaatttgacttcttagggttaagaacactgacgataatcaactgggcattagaaatgattaatgctcggcgggctaaaaaatcacttgagcctgttgatatatcagccatttcattaaccgatcagcgtagcttcgatatgttgcaacgctctgaaaccaccgcggtattccaattggaatcccgtggcatgaaagatctgataaagcgtctgcgaccagactgcttcgaagatatgattgcgttagttgcactgtttcgcccagggcctttacagtcggggatggtggataactttatcgaccgaaaacacggtgttgaagagatttcctaccctgatgttaaatggcaacatgagagcttacagcctgtattagagccaacttatggtgttatcttgtatcaagagcaagtgatgcagattgcacaggtacttgccggttataccttgggtggcgcggatatgttacgacgcgcgatgggtaagaaaaaacctgaggagatggcaaaacagcgctctgtgtttgaagcgggggcgattaaaaacggtgttgatggcgaattagccatgaaaatctttgacttggtagagaaatttgccggttatggatttaacaaatcgcactcagcggcttatgccttagtttcttatcaaacgctctggttaaaagctcactatcctgcggagtttatggcggcagtcatgactgcagatatggataataccgaaaaagtggtcggtctggtggatgaatgttggcgaatgggtttaaaagtccttcctccagatattaatagtgggctttatcatttccatgttaatgatgaaggcgaaatagtgtatggcataggggccatcaaaggggttggagaaggccctattgaggcaattgtcgaagcgcgtcaacaaggtggtcattttaaagatatttttgatctctgtgcgagaacagaaaccaaaaaattgaatcgccgagtgatggaaaaactgataatgtcaggcgcnnnnnnnnnncaacacgcaaaagcggaagccattgggcaatccgatatgtttggtgtattggcagaagccccagagcaagtggaacgttcttatgccaatgtacctaaatggccagatcaagttgttttagaaggtgagcgagaaaccctcggtttatatttaacgggacatcccatcacccgttatctaaaagaaattgaacgatatgcggcaggaacccgtctaaaagatttagtacctaccccccgaggtcagatggtaaaagtggcaggattagtccttgcttcgaaagtctttaccactaaacgagggaatagaattggtatatgtacgttagatgatcgttctggtcgtttggaaattatgttattttccgatgcattagataaataccaacatctattggaacaagatcggattttaattgctaccgggcaggtcagctttgatgatttcaacggtgggcttaaaatgacagtccgcgaattaatggatattaacgaagcgcgtgaaaaatatgctcgagggcttgctatctcgttatcagacaggcaaattaatgagcaattattaaatcgtcttcgcggcgttttagaacctcatcgttcaggcacgatcccggttcatctttattttcaaaagcatgatgcctgtgcacgtttgcgttttggtgcaacatggcgagtaacgccgactgatatgcttttgaccgatctgcgaactctgctgggtaatgagcaggtggaattagaatttgactag

SEQ ID NO: 294534 - DNA, 960 bp, Proteus mirabilis
atgagtcttaattttctggattttgaacagccaattgccgagttagaagcgaaaatcgattcgctaaccgcagttagccaacatgatgaaaaaattgatattaatattgatgaagaagttgcacgcttaagagaaaaaagtttagaacttactcgaaaaattttctctgatcttggtgcatggcaagtggcacaacttgctcgtcatccattaagaccttatacccttgattatattaatcgtgtttttactgattttcaggagttggcgggcgatcgcgcttatgctgatgataaagcgattgtcggtggtattgctcgtttagacggtcgtccggtgatgatcattggtcatcaaaaaggacgtgaaacgaaagaaaaaattcgtcgtaattttggtatgccagctcctgaaggttatcgcaaagcgctacgtttaatggaaatggcacaacgttttaaattacctattatcacttttattgatactccgggagcttacccgggggtgggcgctgaagagcgtggacaatcagaagcgattgctcgtaatttaagagaaatgtctcgctttggtgtgccaattatttgtaccgttattggcgaaggtggctctggtggtgctttggcgattggtgtgggtgataaagtgaatatgttgcagtacagcacctattccgttatttcgccagaaggttgtgcttctattctatggaagagtgctgataaagcaccattagctgctgaagctatggggatcacggcaaatcgtttaaaagaattaaaattgattgatacggtgatccctgaacctttaggtggtgctcatcgtcattatgatgaaatggcagcatcactaaaagcacagctaaaagctgatttagcgcagttagatgagtttgatacagaagaactcactaaccgccgttatcaacgcttaatggaatatggctattgctga

SEQ ID NO: 294535 - DNA, 744 bp, Proteus mirabilis
atgatttcatttagcaacaaagtaggcattatcaccggaggtaatagtggtatcggtttagctagcgctgagaaatttttatcactaggggcatcggttgttattactggaagtcattcaggtcgtggggaaaaagcacaaaactatttgcaagataaagggttttccgcagaatttgttcaaatggatgccgccaatgagcaagataatcaacaactggttaagcatgtagtaaaacattatggcaaagtggattttttatttgctaatgcgggtgttttaaccgataccgttgccgataaattacattacgatcaatggaaaaaagtgcttgatgttaatcttaatggactatttcttattaaccgcgcggttattcaacattggttagaaactaaaaccacaggcgctattgttaactgtagttcaatctgctcttttgtcggccagcatgcatttcctgcttattgctcctctaaagggggcattaaattactcacacaaacgttagcgcttgattatgccagtcaaggtattcgtgttaatgctgtttgtccaggctatattgatactcctttattagaggggcgtgaattagacaaacaaaaactcgtcgctttacaccctattggtcggttaggtacacctgaagaggtggctaatgttgttgcctttttagcaagtgatgccgcctcgtttgtcacaggggcttcttatctcgttgatggtggctttacggcataa

SEQ ID NO: 294536 - DNA, 1326 bp, Proteus mirabilis
atggaactgaaaaattgtcctcttattaacgaaattaaacgacaaattggctctcatactcatattttagtgggttttagtggtggagttgattcaaccgttttattgcatgggttggtttgcttacgtgataaatatcaacttcctttagaattaacggcaatttatgttcatcatggattgaattcaaaagccgatgattggctcacgcattgcgaacatttttgtcataactggcaggtcagttttatcagtgaaagagtacaagtcaatgggaaagaaggggggattgagcagggtgccagagaagcgcgctatcaagcttatcgccaatatttacagcctaatcaagttttagtgacggcacaacatcaagatgatcaagcggaaactttcctattagcgcttaaacgcggtagtggaccggcagggttgtcttcaatgcctgcaaaaatgccttttgaacaagggtatttattacgaccattacttaatattacacgtgaacaaatcgaagcttatgcacatgagcacggtttattatggattgaggatgatagtaatcaagatgatcgctatgatcgcaatttcttacgtttacatattatgcctctattgactcagcgctggccacatttttctcaagctgtcactcgtagtgccgcactgtgtggtgaacaagaagcgctcttagatgagttactcgatgtagaattgcagcaattgattgatgagcatcagagtttagatatcaatttattgtcccgctgtagcgaaataaaacgtaatgcattgttgcgtcgttggtttgctaaatgtaataaaagcatgccatcaagatctcaattgtcgcggctatggcaagaagttgctttagctaaagcagatgcagagccacggttacgttttttccaagatgaagttaggcgttatcaacaacgcctctatcttgtacctgttatggaagaactaacggatagggttatcgaatggtcattatcacaacctttaattttgcctaatcagttagggatattagcggtgagtcgtgatagcggtaaaacaatctgcagagcaccgttagcagatgaaaaagtgacggttcgttttggcttaacggcttcatctttacgtattgttgggcgaaatttggccagatcaagcaagaaaatttggcaagagcttaatattgccccatggcaaagaactcgtatcccattgatttattataacgatacattaattgcagcggttaatacttttgtgactttagagggaaatgcaacaacagaacaaagtataacaattgagtggcaagcgtcgtaa

SEQ ID NO: 294537 - DNA, 261 bp, Proteus mirabilis
atgtcaacaaatacagaatatcaaccaattaattgtgatgattatgaatatttggagttagcttgccaacgaggcttaacactccatattgaattacataatggtgagcaaattgatggtgtcgcagatgatctctttttaagtaaaaaagttgaatatctgaaagtaaaaacatctgagggtgcaaaagatttacgactggatattattgccagtttttctcatcccgaacttggcactatcataatcaaatctgaataa

SEQ ID NO: 294538 - DNA, 678 bp, Proteus mirabilis
atggggaaaaaacttttatttgcagccattgctgcagggttatttattatgtcaggctgccagaataatattggcctgtcactcgatggtaaaattgttgatcaaacatataacagtattctaccttgtgccgattgttctggtatcgacacgactattcttgtcaatcaagatggctcttatgtaatggagcaaagttaccaaggcacttctgatgacaatcgaagtttttttgagtcaggtacttggtcattaagtaaagataaactgaccttgactaatagttatggcgagaagagttactatttacctcgtgaagataaattagttatgttggatatcgatggtaatgtaattaattcgggtcttaattataccttagcaaaggttcaacctaagcagttagcgggggaatttacctattttgctgacgctggaacctttaaagattgccaatctggacgtgtctatgccgctgatggattagtattagaaaaaggctattttgctacaggcgttgatggcggaacacctgtctatctagaggtcagaggttactatagtattcgtccttcaatggaagatggacagtatgatcgtgcattagtggttaccgataataagccacgctttgatcgtcatggctcttgcaatagccgtcgtaatagcagaagttaa

SEQ ID NO: 294539 - DNA, 1716 bp, Proteus mirabilis
atgcgtactagccactatttgctctctactttgaaagagacgcctgctgatgccgaaattgtcagccatcaactcatgcttcgcgcaggtatgatccgtaaactcgcatctggtctttatgattggatgccgaccggtgttcgtgtcctgagaaaaattgagaaaattgttcgtgaagagatggacaacgcaggctcacttgaaatttcaatgccggttgttcagcctgctgatctatggcaagaaagtggccgttgggaacaatatggcccagaattgttgcgttttatagatcgcggtgagcgtccttttgttttaggtccaacccatgaagaagtggtgaccgatattgttcgtaatgaaatcacctcttacaaacaactaccactcaacctttaccaaattcaaactaaattccgtgatgaagtacgcccgcgctttggtgttatgcgttcacgtgagtttatcatgaaagatgcctattcattccatatctctcaagagtctctacaagagacttacgacagaatgtatcaagcctatagcaatatctttactcgtattggtttagacttccgtccagtattggctgatacaggctctattggtggtagtgcctctcatgaattccaagtattagcagatagcggagaagatgatatcgtattctcaacagcatctgactatgctgctaatattgaattagcagaagcggttatgccagcaacacctcgttcaccagcaacagaagagttacgtttagtagatacaccaaacgcaaaaactattgctgaattagttgaacaatttaatctgcctattgaaaaaacagttaaaacacttattgttcatgcaactgaagaaagtggtcataaattagtggctttattagtccgtggtgatcatgagctcaatgaaataaaagcagaaaaatgtagcattgtcgcttcacctttagttttcgcgactgaagaagagatccgccaagctgttaatgcaggtccaggctctcttggtccaattaacttgccattaccaatcattatcgatcgcgctgtatctgttatgagcgattttggtgctggtgcaaatattgatggtaaacactactttggtattaactgggagcgtgatttacctcttgctgaaatggcggatatccgtaatgttgtcgaaggtgatccaagcccagatggtaaaggtactttacttatcaaacgtggtattgaagtcggtcatatcttccaactaggtaagaaatattctgaagcattaaaagcgacggtacaaaacgaagaaggccataaccaagttgtgactatgggttgttatggtattggtattactcgtatcgttgcagcggcaatcgaacaaaaccatgatgcccgtggtattatctggcctgatgctatcgcacctttccaagttgccattttaccaatgaacatgcatcgttcttatcgtgtaaaagaagtagcagagaaactctatgctgacttacgtgcacagggtattgatgtattatttgatgatcgcaaagagcgcccaggtgtgatgtttgcagatatggaactgattggtgtaccacacaccatcgtgattggtgatcgtaatctggataacgaacaagttgagtataaagcacgccgtagtgatgataaatcgctggtcaatgtgaatgatgttgttgcctttattaaagagcaactggtttaa

SEQ ID NO: 294540 - DNA, 708 bp, Proteus mirabilis
atgaatagctaccaaataacatctatagggcatattatcagcccttataaagagaaatttgccgttcctcgccaacctggattagtccaggatggcgtaggccagctaatactacacacaccttataatcatcctgatgcagtaaggggcttagaacaatttagccatctttggttattatttatttttcatcaaacagcgcaacaaggctggcatccattagtgcgcccaccaagattaggggggaatagcaaactcggggttttcgccactcgctcaacttttcgccctaatgctatcggcatgtcattagtcgagctaaaagatatcattattgaaaagcaatcggtgatcttgcaactaggcagtctagatcttattgatggaacccccattattgatatcaagccgtaccttccctatgctgaatctattgctggtgcaacagcaggctttgcccaatatgctcctcatgaagagatggagattcttttttctgaagatgccacacagcagttacaatattactctcatcaatatcctcatcttatgcgatttatcactcaagtattgcaacaagatccgcgtcctgcttataaaaaaagcgaacaaagtgatagagtatatgccgtgcatttactggattttaatattcgttggcaagtcaatgggcagcaaacacttgttcttagtatagaaccgcgctaa

SEQ ID NO: 294541 - DNA, 411 bp, Proteus mirabilis
atgcacatgcgcttgctacttattggcattatagcgctgtttatgaccggctgttcaatgcagaaatcatctgatgttgatcagtctaagtttacggatatgcgtttaaataaacctggccaaccacaaaagcccaaacagcaaactttatctcctgttcgcattgttgaaaaaacagaagatcttttaggtgcgccttttaaagatttaggtgttgttgccggtgaatcttgccgacaaacactacaagatccacccgcaagcttacctgctgcgaaaaaaagaatggctatcaaagcggcttataaaaatgcgaatgcagttttattacatgaatgccaaatagtcacaggaatgggttgctatcaatcggcaatctgtgaaggttcagcactattaattactcaatga

SEQ ID NO: 294542 - DNA, 816 bp, Proteus mirabilis
atgtcattgaaatttaaatcacttgctgtagtcagtgcgttagtcggtgctttagctttagcaggttgtggcgaaaaagaaaaagatcccaatcatatccgtgtgggggttatttctggttctgaacaacaagttgctgaagttgctaaacaagtcgctaaagataaatatggacttaatgttgaactcgtcactttcaatgactttgtcatgccgaatgaatcattaagccgtggtgatattgatattaatgcctttcaacataagccttatttagatcaacaaatcaaagatcgtaattacaaaattacggctgtaggtaatacctttatttaccctattgctggttattctaaaaaaataacggatttagcagatttacccgatggtgcacaagtggctatccctaatgatccaaccaacttaggtcgttcactgctacttttagaaaaagtaggattagtgaaattaaaggaaggggttggtttattaccgactaaactggatatcattgaaaatccgaaaaacatacaattagttgagttagaagcaccacaattaccgcgctctttagatgatcaaaaaatctacttagcggttattaatacaacctatgcgagtcaagttaacttaactccagcaaaagatggtatttttgttgaagataaagattcaccttatgtcaatattattgttgcccgtgaggacaataaagatgatgaaaatgtgaagaaatttattcaatcttatcaaacagatgaagttgatagcgctgcgaataagatttttaacggtggtgcagtaaaaggttggtaa

SEQ ID NO: 294543 - DNA, 654 bp, Proteus mirabilis
atgtctgaaggaatgatttatttattaattagtgggatctgggaaaccttagtcatgacatttgtctcaggcttttttggttttgtcattggattaccattaggtgtcttactttatgtgactcgaccagagcaaattatggcgaactcacccgcttataaagtaatttctgctttagttaatatttttagggccatcccttttattatcttattagtttggatgatcccttttacacgtatggtagtaggaacatccattggtttacaggcggctatcgttccgttaactgtaggagctgcaccttttattgcacgtatggtagaaaataccttattagaaatacctcatggtttaattgaagcttctcgtgccatgggggcaacaccaatgcagataatcaagaaagttttattaccagaatctttaccaggtttaattaatgctgcgaccattacactcattacattagtcggttattccgcaatggggggcgctgtgggtgccggtggtttaggtcaaattggttatcagtatggttatgtgggctataatgccacagtaatgaataccgtcattgtactacttgttattcttgtttttatcattcagtttattggcgatcgtttagttaaactgacaacacataaataa

SEQ ID NO: 294544 - DNA, 1032 bp, Proteus mirabilis
atgattaaactgacgaatataaataaagtatttaagcagggagcgcgttcaatacaagcgctatcaaatattaacctgcatgtgccacaagggcagatttttggtgtgattgggtcgtcaggtgcaggtaaaagtactctcatacgctgtgtaaacatgttagaaaagccgacatcaggtgaagtttgggttgatggtcgtgatctaacaaaattatctgataaagaattaaccaaagcacgtcgtggcattggcatgattttccaacattttaatttactgtcctcaagaacggtatttgataatgttgccttacctctagaacttgataacacgccgcgtgcagatattaataaacgtgttaatgagttattagaattagtgggtttagcagataaaaaagagtattaccctgccaatttatcagggggacaaaagcagcgtgttgcgattgctcgagcattagctaattcaccaaacgttttattgtgtgatgaggcaactagtgctcttgatcctgcaacgacgcgttctattttagaactgttaaaagatattaatcgtcgtttaggattaactattttacttatcactcatgagatggatgttgtaaaacgtatttgtgaccaagttgccgtgatcagtggtggtcaattagttgaaagtgatgcggtaagtgaggttttctctcaccctaaaacacccgtttctcaagcatttattcaatcaacattacaattggatattcctgacgattataaagaacgtatgaagccagagtgggaagaaggcttattcccgctgttaaagcttgaatttaatgggttatctgttgatgcgccattaatgtctattgttgctcgtcgttttgatgctgatattaatattttaagttctcaaatggactatgccggtggagtaaagtttggcgtgatgctagcagaattacacggtaaaaatggtaacacagaaaagtctatcgcgtttttagaagagcatcatgtgaaagtagaggttctcggttatgtctga

SEQ ID NO: 294545 - DNA, 567 bp, Proteus mirabilis
gtgagcaaggggatttctgcgatttttttagatcgcgatggaacgattaatatcgatcatggttatgtatctgaaattgataactttgaatttatcgaaggtgtgattgaagcaatggctgaattaaaagccatgggatatgctttagtgctagtgactaatcagtcaggtattggtcgagggtattatagtgaagatcagtttttacatttaactgaatggatggattggtctttagctgatcgaggcgtcgatttagacggcatttattattgcccacatcatccagatgcaattatagaagaatacaaaaaagagtgtgactgtcgtaaacctgcaacaggtatgtttatggatgcgaaaacacaattaaacatcgatatggcatcttcttatatggtgggagataaaaaagaagatatgttggcagcaaaagcggctggcgttgggcataaaattctcgttcgcacaggaaaagcgattacagaagaggccgaaacttgtgcagattttgttctagatagcttatccgacttgccaaaatggcttaaaagccacaaaaaatag

SEQ ID NO: 294546 - DNA, 348 bp, Proteus mirabilis
atgaaaaaagagtggtatacggcaatggaattgacgggtataggtggattacctaaatcaccacaaggtgtaaatgcaaaagctaaacgtgaatcttggttaaaacaaaagagaactaataaacaaggaaatggtgttgaatatcattactcttgtttaccagaagaaactttaattgctctggagctttatgaaccattagcacattacaaactaaataaagaggagccactcgttatctgggtgaaagcattccaacaacttaatgatggtgaacaaaaaacagtaacagagctgatcttgcgggatggtattagaagttttttagaaaagatcgtcaaagattaa

SEQ ID NO: 294547 - DNA, 417 bp, Proteus mirabilis
atgaaaaaagaatggtatacagcaaaagaattagtagggcttgcagggttacctaattctccacaaggggtcaatttaatggcacgccgtgaaggatgggaaaatcgccgtaagcgtggagtacaaggtaaagccgttgagtactcggttaaaagcctccctgaagaggtggtgagtgtgttagcggcgcatgagcctcctgcagaatatttatctaagcgtcaggatgcctttcttatttgggtggaagcttattatcagctaacaaaatcagagcgtgaaaaaatcgtaaaatttgttttacgagaaggtctcgctaagttaattagctatattgatgctgacaatcaagaagagatcgaacgagaaaatgaagaagtggttcaaaaattaaaaagccccccagagtcgacatag

SEQ ID NO: 294548 - DNA, 972 bp, Proteus mirabilis
atgaatttagaatctattataaaactcacatccgctgatatggctgcggtaaatgacgcaattctttaccagcttaattcagatgtttctttgataaaccagcttggttactacatcattagcggtggtggtaaaaggatccgcccaatgatcgctgttctgaccggccgagctttggattatcaaggggacaaacatatctctgtcgccgctttaattgaatttattcataccgcaacattattgcacgacgatgttgttgatgaatccgatatgcgtagaggcaaacaaacagctaatgctgtgtttggtaatgctgcaagcgtgctggtaggtgactttatttatacacgatcttttcagatgatgacggatcttgattccatgcgcgtgctaaagctgatgtctagcgcaaccaatgtgatcgctgaaggtgaagtattacaattaatgaattgtaacgatcctgacattactgaagatgactatatgcaagttatctacagtaaaaccgcccgtttatttgaagctgcctctcatgcgtcagccatcctctgcggagccactccagagcaagagaaagctttccaagattatggtcgttatcttggtactgcattccagctgattgacgatttactggattatgatgcagataatacccaattaggtaaaaataccggtgacgatctggatgaaggtaaacctactttgcctttacttcatgccatgcaccatggtaacgaaacagaatcacaactcattcgtcaagccattgaaaaaggtaacggccgtcatttactcgacactgtgttaaaaacgatgaaacagtgtggctcactggaatatacccgccaaaaagcggaagaagaagccgataaagccattgaggcgttagcgattattcctgattcatcttacaaagatgcattaattggccttgcgcacgttgctgtgcaacgacaatcgtaa

SEQ ID NO: 294549 - DNA, 309 bp, Proteus mirabilis
atgtacgcggttttccaaagtggtggtaaacaacaccgagtcagcgaaggtcaaacaattcgcttagaaaagcttgaagtagcaactggcgaaactattgagtttgacaccgtcatgatggtcgctgatggcgacaacattcaaattggcgctccaatccttgagggcgttaaagttaaagcggaagtggttgctcacggtcgcggcgagaaagttaaaattgttaagttccgtcgtcgtaaacacagccgtaaacaacagggccaccgtcagtggtttactgatgttaaaatcactggtatcgcttaa

SEQ ID NO: 294550 - DNA, 258 bp, Proteus mirabilis
atggcacacaaaaaggctggcggctcgactcgtaacggtcgcgattccgaagcaaaacgtctaggtgtaaaacgtttcggtggtgaagctgtattagcaggtagcatcatcgttcgtcaacgtggtactaagttccatgcaggtactaacgttggttgtggtcgtgaccacaccctgtttgcgttagctgacggaaaagttaaattcgaagttaaaggtccaaacaatcgtaaatttatcagcatcgaagctgaataa

SEQ ID NO: 294551 - DNA, 1170 bp, Proteus mirabilis
atgaaatttgttgatgaggccaagatcctaatcgtcgctggcgacggtggtaacggctgtgtaagctttcgtcgagaaaaatatatcccgaaagggggaccagacggtggtgatggcggtgatggtggtgatgtctacatggttgcagacgaaaacctcaacacccttatcgattaccgttttactaaatcttaccgcgctgagcgtggtgaaaatggccaaagccgtgattgtacgggaaaacgtggtcaagatattactattaatgtccctgtggggacgcgtgcccgtgatcttgctacaggtgagatcattgctgacttaacggtacatggtcaaaaacaaatggtcgctaaaggtggcttccatggtttagggaatacgcgttttaaatcatcagtcaatcgtgcaccacgtcaacgcacaatgggtacaccaggtgaatcacgtgaagtactgttagagctgatgctacttgcggatgtaggtatgttaggtatgccgaatgccggtaaatctacctttattcgagccgtctcggcagccaaaccaaaagtggcagattatccatttactacactagtacctagcttaggtgttgtgcgtatggacagccatcaaagctttgtcgttgcggatataccggggctgatcgaaggggctgctgatggcgcgggtcttgggatccagttcctgaaacatttagaacgttgccgtgtattattgcatttgatcgacatcgatcctattgatggttctgatcccgttgaaaatgccaaaatcattatttctgaattagaaaaatacagcgataaactggcacaaaaaccacgttggttagttttcaataaagtggatctgcttgatgccgatgaagcaaaacagaaagcacaagcgatagttgaagcgttgggttgggaaggtgattattatatgattgctgctatcaaccaagaaggggtgaaaaaactttgttgggatattatggaattcctgaaagtgaccccacgtgagcaagatattgctaccgctttagccgctgaagaaaaagttgattttatgtgggatgactaccataaagaacaacttgaaaatcctgaccttgaagacgatgacgaagattgggatgaagaagatgatgatggtgtagagtttatctaccaacgctaa

SEQ ID NO: 294552 - DNA, 1443 bp, Proteus mirabilis
atgcgcttattacctatattccgcggaatattttataccttgagtctgttaagcttttcaaccctcgccattcctgttgaaaaatatatagaacttttgcctgatggcactcaagtcggtttaatcacccaaactgttggcgcatcctcccctaacctaacttataatgataatcaattatctttgccagccagcacacaaaaagtggtcacagctttagccgccctattgcaattagggggcgattatcaatttaccaccacaatggaaacggaaggtaagataaaaaacaatcaactagagggtgatttaattttccgttttagtggtgatcctacgctaactcgccagcaattacgagcaatggttgccgtattaaaacaatccggcgtcacaaaaataacgggaaatttattaattgatacctctgctttctccagccatgacaaagcgccgggatgggtttggaatgatatgacccaatgctttagtgccccaccaagtgccgctattgtagataaaaattgtttttccgtcttactgcaaagtggtcaaaaagaaggtgatatcgccaccatacgtaaagcgtctttttatcctgtcacggttttaagcgaagttgaaacctatgaaaaaggctcaacacgaacccgcttttgcgaattagacgtcacggtgagagatttaaatacttatgtgataacaggctgcattcctaaacgtgaagaagccatgccgctgatgttttccattcaagatggtgcgcactgggcaggtatattgctaaaagaagagttacaacgtgcagatattgagctggacggttatgtcaaacgccgctcccaacctaaagcccctgttactgttttagcacaaacacaatctaaaccgttacacactttattgacgacgatgttaaaagagtctgacaatatgattgcagatgccgtatttagaactattggtcgtgaatattatggtgttgctggcacttggcgttcaggggcggatgccactcgtgctattttaaaacaaaaagcgggcattgatttagctaatacaattatggtggatggatctgggctttcccgccataacctgatagcccccgcaaccatgatgcaagtattacaatatgtcggacaacatgatagtgaattaaattttatcagtatgcttcctcttgccggtcatgatggtacattgcaatatcgtggtggttttactgaagcgggcgtcaacggtaaagtttccgctaaaacaggttcactcaagggagtgtataatctagctggctttatgaccacagccaatggacagaaagtggcatttgtacaatttatttctgcctactctccccctacacaaaatcgcaatgctggacgcgcctatttggttcgttttgaaacgaatttatataaagatatctataacaataaatag

SEQ ID NO: 294553 - DNA, 477 bp, Proteus mirabilis
atgaatcagatccctatgacagttctcggagcagaaaaattacgcgaagaactggaatatctaaaaactgttcgtcgcccagaaattaccgcggccattgctgaggcacgggaacatggcgacttaaaagaaaacgcggaatatcacgcagctcgtgaacaacagggtttctgtgaaggccgcattcaagaaattgaagcaaaattatcaaatgcgcaagtcattgatatcactaaaatgacaaataatggacgtattatttttggtgccacggtgactttactcaatgtggatactgaagaagagcaaaaataccgcattgttggtgatgatgaagcaaacattaaagaaaacttaatttcagtcaactcaccgattgcccgtggattgattggtaaagagttagatgatgtggtggtcattaacaccccaggcggccaagtagagtatgaagttttaaacgtagaatatatttaa

SEQ ID NO: 294554 - DNA, 297 bp, Proteus mirabilis
atgatgactcttaacaaaaaacaaattcaacacctgaaagggctcgctcatcatctcaatcctgtcgttatgatcggtaacaacgggttgactgaaggcgttcttgcagaaattgaaatcgctctggcacatcatgagcttatcaaagtcaaaatcgcaggcgaagatcgagatgttaaaaacttgatcgtggcagcgattgtgcgtgaaagcggtgcacagaatgtacaagttatcggaaaaatggttgttctttatcgcccttctgaagcgcgtaaaattattttaccgaaataa

SEQ ID NO: 294555 - DNA, 630 bp, Proteus mirabilis
atggccaataaaaaacgttcggcaagctctagccgctggttacaagaacattttagtgataaatatgttcaacaagcaaagaaaaaagggtttcgctctcgagcttggtttaaattggaagaaattcagcaaagtgataacattttcaaaccaggtatgaccgttgtcgatttaggtgctgctccgggtgggtggtctcaatatgtcgtacagcagttaggaaataaaggtaggatcatcgcatgtgaccttttacctatggatcctatcgttggtgtcgatttccttcaaggcgattttcgtgatgaacttgtattgaaggcattgcttgatagagtaggtgataataaagtccaggttgtcatgtctgacatggctccaaacatgagcggaacacccgcggtcgatattcctcgatccatgtatttagtagagttagcgcttgatatgtgtcgtgatgtgctggctcccgggggaagttttattgtcaaagtgtttcagggagaaggctttgatgagtacctggggcaaatacgctccctgtttacgaaagtgaaagttcgtaaaccagacgcttcgcggtctcgttctcgtgaggtatatattgtagccacagggcgtaaactttag

SEQ ID NO: 294556 - DNA, 1950 bp, Proteus mirabilis
ttgagtgacatggcgaaaaacctgatcctctggttagtcattgcagtcgtattgatgtcattattccagagcttcggacccagcgattcgaatagtcgtaaggtggattactctacctttatcaatgagttaactaataaccagttacgcgaggtcagcataagtggttatgatattaatgtaactaaaacagataactcaaagtacagcacgtatatgcctatgcgtgatgataacctgctgaccactttaatgaaccgtaatgtaaaagtgaccggtgaacccattgaaggtcaaagccttctaacacaaatttttgtgtcttggttcccaatgcttttactgattggtctttggatcttctttatgcgccaaatgcaaggtggtggcggtaaaggtgcgatgtcttttggtaagagtaaggctcgcatgttgacagaagaccaaatcaaaacaacctttgctgatgttgcaggttgtgatgaggcaaaagaagaagtcagcgagctagttgagtatttacgtgatccgggtcgtttccagaaattaggtggtaaaattccgaaaggtatcctaatggttggtcctcctggtacgggtaaaacattattagcaaaagcgattgctggtgaagcaaaagtacctttctttactatttctggttctgacttcgttgaaatgtttgtcggggtcggtgcttctcgtgttcgtgatatgtttgaacaggctaaaaaagcagcaccttgtatcatctttatcgatgaaatcgatgcggttggtcgtcaacgtggtgccggtcttggcggtggtcatgatgaacgtgaacaaacgctgaaccagatgctggtcgaaatggatggttttgaaggcaacgaaggtatcatcgtgattgccgcaactaaccgccctgacgtattagaccctgcattattacgtccaggtcgttttgaccgtcaagtcgtcgtaggtttaccagatgttcgtggtcgtgagcaaattctgaaagtgcatatgcgccgagtgccattatcaccagacgttgatcctgcgatccttgctcgtggtactccgggtttctccggtgctgacttggcaaacttggttaatgaagctgcactatttgctgcacgcggtaacaaacgtgttgtttcaatggtcgagttcgaaaaagcaaaagataagatcatgatgggtgctgaacgccgttcaatggttatgaccgaagaacaaaaagcatcaacggcttatcatgaagcgggacacgctattattggtcgtttagtgcctgaacatgatccggtacataaagtgacgattatccctcgtggacgtgcattaggtgtgactttcttcttacctgaaggtgaccaaatcagtgccagccgtcaaaaactggaaagccaaatttcaacactttatggtggtcgtttagcggaagagatcatttatgggcctgaacatgtttcgacaggggcttctaatgatatcaaagtggcaaccaatattgcgcgtaacatggtgacacagtggggcttctctgaaaaattagggccattactgtatgctgatgaagacggtgaggtgttcttaggtcgttcagttgctaaagcgcaacatatgtcagatgaaacggcacgtactatcgacgaagaaattaaagctatcatcgatcgtaactatacccgtgctcgtcaaatcctgatggacaacctagatattctgcactcaatgaaagatgcattaatgacttatgaaaccattgatgcacctcaaattgatgacttaatgaatcgtcgtgaagttcgtccaccggcaggttgggaaggcaataatggcaatagtggtgcaaataccgctacagcacagccgacacaaacacatgtgacgaatgagccaaataataaatcaggatcagagagtgacacaccttctgataacaatactcattaa

SEQ ID NO: 294557 - DNA, 843 bp, Proteus mirabilis
atgaaattaattgccagaggaagagagcttaatttatcttcaccccaagtgatgggcattttaaatgtgacgccagattcattttctgatggcggaacgcataactctcttaatgatgctattaaccacgccgctaaacttattgctgaaggggcttctatcatcgatatcggtggtgaatcaacaaggccgggtgccagtgatgtttctgtcgatgaagagttacatcgtgttattcctgtggtcgaagctatccagcaacgttttgatgtgtggatttctgttgatacatccaaagcacaagtgatcacggagtccgctcaagcgggtgcctctattatcaatgatatacgttcacttaccgaacctggagcactgcaggcggctgcaaaaacggggttacctgtttgtattatgcatatgcaaggtttacctaaaacaatgcaacattcgccgcagtataagaatgtgatgatagaagttgatgcttttctggcagagaatattcaacgttgtattgatgctggtatcgagaaaaatcaaattattcttgatccaggcttcggctttggtaaaaatttagcgcataattatcaattattagcacatctaagtgattttcatcactttggtttaccgatactcgccggaatgtcacgtaaatcaatggtaggacagttactcaatgttccgccacaagagcgtgttgctggtagtgttgcttgcgcagttattgctgcaatgcaaggggcacaaattattcgtgtacacgatgttaaagagactgtagatgcgatgaaagtcgtgcaggcgactctttctgcaaaggaaaataatgaatga

SEQ ID NO: 294558 - DNA, 1338 bp, Proteus mirabilis
atgagcgaacgtaaatactttggaacagacggtatccgtggaaaagtaggtgacagccctattacacctgattttgtattaaagctaggctgggctgcaggtaaagtacttgcacgtcacggctcacgtaaaatcattatcggtaaagatactcgtatttctggttatatgttggaatcggctctagaagcaggccttgctgctgcgggattatccgcttcatttacaggcccgatgccaacccccgcggtcgcttatttaacccgtactttcagagcagaagctggcatagtgatttctgcttctcataatccctattatgataatggcatcaaattcttctccattgatggtacaaaactacctgatgaagtagaagaagccattgaagcggaaatggaaaaaccgatcacttgtgtagagtccgcagaattagggcgtgcgaatcgcattgttgatgccgcaggccgttatattgaattttgtaaaggtacgttccctaacgaaaataatttaaatgggttaaaagttgttgtggattgtgcccatggagcaacttaccatattgcgcctaatgtttttcgtgaactcggggctgaggttatcactattggttgtgagcctacgggcatcaatatcaatgacgaatgtggtgcaacagatgtacgtatgttgcaaaaacgcgtgttagaagagggtgccgacgttggtttagcctttgatggtgatggtgaccgtattattatggttgatcataaaggcctaaaagtagatggtgaccaaattctctatatcattgcgcgagaagcattgcgtcaaggtcaactacgtggtggtgccgtcggtacactaatgagtaatatggggttagagattgccttaaaacagcttggtattccttttgtgagagccaaagtgggtgaccgctatgtacttgagaaattgcaagaaaaaggctggcgtttaggggcggaaaattcgggtcatattattttacttgataagacaacaacgggtgatggtattgttgctggtctgcaagtattaagcgcaatggttcgtaaccatatgagcttgcatgatctatgcagtggcatgaaattattaccacaaattttggtgaatgttcgttttacgggaaatcacgatcctctacaatccacagaagttcagcaagtcgcaaaagaagttgaggcggagcttggcggtaagggacgcgttttattacgtaaatcaggaacagaaccattaattagagtgatggttgaaggcgaaaatgaagagcaagtcacagcgatggcgaatcgtattgctgatgcagtaaaacatgttggctaa

SEQ ID NO: 294559 - DNA, 345 bp, Proteus mirabilis
atgtatacagcactcattgttattcttatcattgcagcaacagggctggttggtctgatcctgttacagcagggtaaaggtgctgatatgggcgcttcttttggtgcaggtgcttccggtacagtatttggttcaagcggttcagcaaatttcatgacccgtatgaccgctgttttagcaacagtgtttattgtactttgccttattttaggtaatttaagtgccaataaaactgttcgtgaagacagtaagtggatgtctatcgagcagactgcagaagaagcgaaaaaagctgagcaattagcagcgcctgtagcaccagcaaacacagatattccgcagtaa

SEQ ID NO: 294560 - DNA, 423 bp, Proteus mirabilis
atggtttcagcaccagtagaagcattaggctttgaatttgttggtcttgagtttattcgtggtcgagtatcaacattgcgtatctatattgatagtgaagaaggtatcactgttgatgattgtgctgatgttagccaccaggtcagtgctgtgctggatgttgaagatccaattcaaacattttataaccttgagatctcatctcctggtttagaaagacctttattcactacaacgcattatgagcaatttatcggcgaagaagtcgccgttgtattacgaattgcgatgcaaaaccgccgtaaatggcagggcattattaagtctgtcgctggcgaaatgatcacggttactgtggatggtaaagacgaagtgttcgcactgagcaacatccagaaagctaacctggtaccccacttttaa

SEQ ID NO: 294561 - DNA, 1509 bp, Proteus mirabilis
atgaacaaagagattctggctgttgtggaagcggtctctaacgaaaaatctcttcctcgtgagaagattttcgaagcactggaaactgcattagcgacagcgactaagaaaaaatatgagcaagagattgatgtacgagtttgcattgatcgtaaaacgggggattttgatactttccgtcgttggcttgtggttgaagaagttactcagcctactcgtgaaatcacacttgaagcggctaaatacgaagagcctgaaattgaactaggcggcttcattgaagaccaaattgagtctgttactttcgaccgtattaccacccagaccgcaaaacaagtgatcgtacaaaaagtacgtgaagctgaaagagcgatggttgttgatcaattccgcgaacaattaggcgaaattatcacgggcgttgtgaaaaaagtaaaccgcgataacatcaccctagatttaggaaataacgcagaagccgttatcttacgtgaagatatgctaccgcgtgaaaatttccgcccaggtgaccgtgtacgtggtgtcttatacgatgttcgtacagaaactcgtggtgcacaacttttcgtaacacgttctcgtcctgaaatgctgatcgaattattccgcattgaagtacctgaaattggcgaagagatcattgagattaaagctgcagcacgtgatccaggttctcgtgccaaaatcgctgtaaaaaccaacgataaacgcatcgaccctgtgggtgcttgtgttggtatgcgtggtgcacgtgtacaagccgtttccagtgaactgggcggtgaacgaattgatattgttctgtgggatgataatcctgcacaattcgtgattaatgcaatggctccggcagatgttgcttctattgttgtcgatgaagacaaatgtacaatggacgtcgctgttgaaagcagtaatcttgcccaagcgattggccgtaatggtcaaaatgttcgcttagcagcacaattactgaaaaaacatcgtggtgatgacaaatgggaactgaatgtcatgactgcagatgaactgaatgctaagcatcaggcagaagcaaacgcagccattgaaatatttactaagcatctcgacattgatgaagacttcgcaactgttttagttgaagaaggtttctctacccttgaagagttagtttatgtgccgattgacgaactgttagctatcgacggtcttgatgaagaaacagttgaagcattacgtgaaagagcaaaagcggcattaacaacgattgaactagctcaaaaagaaagcctaggcgataaccagccagctgaggacttattagctctcgaaggcatggaacgttctttagcatttgatctagctgcccgtggtatctgcacactggaagatcttgccgaacagggtatcgacgacctaactgatattgacggtttaaatagtgagcgcgcaggcgaactcattatggctgctcgtaatatctgctggtttgggaatgatgcgtaa

SEQ ID NO: 294562 - DNA, 2751 bp, Proteus mirabilis
atgacagatgaaacagtaaaatcacttgcagaagagattcagacaccggttgaacgtttggtacagcagtttgctgatgccggtattaagaaaaccgtctctgattctgtctcccaaaaagagaaagaaaccttgctggcttggttgaaccgtgataaagagtcaaccagccaaccagaaaaattaacgttacagcgcaaagtgcgtagtacgttaagtgttcctggtacaggtggcaaaaataaatcagtagccatcgaagtccgcaaaaaacgcacttatgtgaaccgtgatgcagttgaaaaagcacaagcggcagagcaagctcagcgtgaagcggaagaaaaggcgcgtcgcgaagcagaagaaaaagcacagcgcgaagcacaagagaaagcacagcgcgaagctgaagaaaaagcaaaacgtgaagctgaagaagccaagaaaaaggctgaagaaaaggcaaaacgtgaagctgaagaagcaaaacgtgaagcagcggaattagctaagcgcgaagcagcggaaaaagacaaagtgaaacaaaacgagaaaccaaaagctgataaggctgatcaggaaaaagcacgtcgcatagccgaacaggctgaactgaaacgtaaaacagaagaagctcagcgtcgtaaagctgaagaagaagctcgcattgcagcagaaaaagcgcgtcgcttagcggaagaaaatgctgaaaaatggacttcagatacgtcatctgaaacagaaggtactgactatcatgtgacgacatctcgctatgcgcgtgatgcagaagatgaaagtgatgctgaggttgaaggtggccgtggccgtggtcgtgcagcaaaagcccctcgtccaaagaaaaataaccgtcactctgaaaaagcagatcgtgaagaagctcgcgctgctggccgttctaacaagaaaggcaaaggacgtaaaaacagcacattacagcaaggcttcaataagccagcagctgctgtaaaccgcgatgttgtcattggtgagactatttcagttgctgatttagcaaacaaaatggcagtgaaaggttctgaagtcattaaaacaatgatgaaaatgggtgcaatggcaaccatcaatcaagttttagaccaagaaacggcacaactggttgcggaagaaatgggtcacaaagttatcttacgtcgtgaaaacgagttagaagaacaagtgatgaacgaccgtgatactagcgatgaaatggctgtatctcgtgcgcctgtggtgactattatgggtcacgttgaccatggtaaaacctctttactcgactacattcgctcaacgaaagtggcttcaggtgaagcaggtggtattactcagcatatcggtgcttatcacgttaaaaccgacaaaggtgaaattaccttcctagatactcctggtcacgccgcatttacttcaatgcgtgcccgtggtgctcaggtaacggatatcgttgttctggttgttgctgctgatgatggtgtgatgccacaaactatcgaagctatccaacatgccaaagcagcaaatgtgcctgttgttgttgccgtgaacaaaattgataaaccagaagctgatcctgatcgtgttaaaactgagctgtctcaatatggcattctgccagaagattggggtggtgagactcagtttatccatgtgtcagcaaaacaaggcttaggtattgacgagttgctggatgctatcttattacaagcggaagttcttgaactgaaagcagtaaaagagggtatggcaagcggtgttgttatcgaatcttacctcgataaaggccgtggtcctgttgcgactatccttgttcgtgaaggtaccttgaataaaggtgatatcgttctgtgtggctttgaatacggtcgtattcgtgcaatgcgtaacgaattaggtaaagaagtacaatctgccggcccatcaatgcctgttgagattttaggtctgtctaatgtaccttctgcgggtgatgaagcaaccgttgttcgtgatgagaaaaaagcgcgtgaagttgccttatatcgtcaaggtaaattccgtgaagtgaaactggctcgtcaacagaaatctaaactggaaaacatgtttgctaacatggaagaaggtaaagtttctgaactgaacatcgtactgaaaacggatgttcaaggaacttgtgaagccatcactgatgcattagttaaactttctacagatgaagttaaactgaaaattatcggttctggcgtgggtggtatcactgaaacagatgcgactttagcggctgcttctgatgctatcattcttggtttcaacgttcgtgctgatgcttctgctcgtcgtattatcgaacaagaaagtgttgatttacgttactactccgttatctatagcttgattgatgaaattaaatcagcaatgagcggtatgttagagcctgaatacaaacaagaaatcatgggtcttgctgaggttcgtgatgtgtttaaatcacctaaattcggcgctatcgcgggttgtatggtggttgaaggtaatatcaaacgtaacaatcctattcgcgtattacgtgataacgtggttatttacgaaggtgagcttgaatcactgcgtcgctttaaagatgacgttaacgaagtccgtaatggtatggaatgtggtatcggtgtgaaaaactacaacgatgtccgtgttggcgatatgattgaagtgttccaagttatcgaaattaaacgttctatcgattaa

SEQ ID NO: 294563 - DNA, 402 bp, Proteus mirabilis
atggcaagagattttagccgtgctcagcgtgtttctcaggaaatgcaaaaagaaatcgccatcattttacagcgcgaagtaaaagatccacgtattggaatggccaccgtatccggtgttgaaatttcacgtgatctggcttacgccaaagtatttgtcacctttttaaacctatcagcaggtgaagaaagcgatgaagaaatggtagaaaatggcttaaaagcccttaatgaagcagcaggctttattcgctctttattaggtaaagcgatgcgcttacgtgttgttcctgagctaacatttgcttatgacaattcattagttgaaggtatgcgtatgtctaaccttgtgtcaaatgttgtcaaagatgatgaaaaacgccgtcataaagaggaagagtaa

SEQ ID NO: 294564 - DNA, 957 bp, Proteus mirabilis
atggggcgtcgtcgtaaagggcgtgagattaacggcgtattattgcttgataagcctcaagatatttcatcgaatgacgctttgcaaaaagtacgccgcatgtttaatgcaagcaaagcggggcataccggcgctttagatcctttagcgacaggtatgcttcctatctgtttaggtgaagcgacaaagttttcacagtttttattggattcagataaacgctatcgagtgattgccaaattaggtgaaagaacagatacctctgatgctcatggacaagtgatccagcaacgaccggtacagtttaaccagcaagcgctcgatgctgcgttagagagttttcgtggtgaaacattgcaaattccttcaatgtattcagcccttaagcatcaaggtaaaccactttatgaatatgcaagacaaggtattgaagttgagcgagaagcaagacccattaccgtgtatgaattgcaatttattcgctgggaagacgatgaattagaactagaaattcattgttctaaaggtacttatattcgcactatcattgatgatctgggtgagaaattaaactgtggtgcccatgtgattttcttacgtcgtttagaagtcgcagattatccgaaagagcgtatggtgacgcttgagcaattgcgtgcaatcattgatgatgctcagcaacaagatgagtcaccatttcctgcgttagatgccttattattgcctatggatactgcggttgcacatttctctgtggtgcatttaaccgccattatggcgggttacttaaaactggggcaaccggttcgggtaaatcacaccttggatgaaggggaatgggtcagagtcaccgaaggcgatgagaaaaaatttattggccttgcgatcatcaaagatggtctagttgcaccgaaaagattagtcgtggattatcacgcactcaataaccctgaatag

SEQ ID NO: 294565 - DNA, 270 bp, Proteus mirabilis
atgtctctaagtactgaagcgaaagcaaagatcgttgctgaattcggtcgtgatgctaacgatactggctcaagcgaagttcagatcgcactgctgactgcagaaatcaaccacctgcaaggtcacttttcagagcacaaaaaagatcaccacagccgtcgtggtctgctgcgtaaagtttccagccgtcgtaatctgctggactacctgaaacgtaaagatgtagctcgttatactgcactgattgaacgtttaggtctgcgtcgctaa

SEQ ID NO: 294566 - DNA, 2130 bp, Proteus mirabilis
ttgctgaatcctacagttcgtaaatttcaatacggtcaacataccgttacgttagaaacgggcatgatggctcgccaagcaacggctgctgtaatggttgacatggacggcactgctgtttttgttaccgttgttgctaagaaaaaagtgaaagaaggacaagacttcttcccactcaccgttaactatcaagagcgttcatacgcagctggccgtattccaggaagtttcttccgtcgtgaaggtcgtcctggcgaaggtgaaactttaatcgcgcgtcttattgaccgccctttacgcccactattcccagaagggttcttaaacgaaatccaagtagttgcgactgtggtttctgttaatccacaagttaacccagatatcgttgctatgattggtgcttctgcagcactgtcattatcaggtgtacctttcaatggtcctatcggtggtgctcgtgttggctttattgatggtcaatatgtgctgaacccaaccgttgatgaactgaaaattagtaaattagacttagtggttgcaggtactgcgggtgcggtactgatggttgaatcagaagctgatttattatcagaagaacaaatgttaggtgcagtggtatttggtcatgaacaacaacaagttgtgattgaaaatatcaatgcattagttgccgaagtcggtaaagaaaaatgggattgggcaccagagcctattaaccaatctttacatgatcgtattgctcaattagcacaaactcgtattggtgatgcgtatcgtattactgaaaaacaagagcgttatgagcaaatcgatgctattcgtgatgaagtgatcagcacattattagcagaagatgagtctttagacgaaggcgaaatcattgaaattttctctggtttagagaagaaaattgttcgtgctcgtgtattagcgggtgaacctcgtatcgatggtcgtgaaaaagacatggtacgtgctttagatattcgtacaggtttattaccacgtacacatggctctgcgctatttactcgtggcgaaacgcaagcattagtaacagctactttaggtactgcacgtgatgcacaaaccattgatgacatcatgggtgagcataccgataccttcttactgcactacaacttccctccatattctgtcggtgaaacaggtatgatgggttcgccaaaacgtcgtgagattggtcatggtcgtttagcaaaacgtggtgtattagccgttatgccaacgattgaagaattcccatacacagtacgtgtagtgtctgaaattacagaatccaatggttcatcttcaatggcatctgtttgtggtgcttctttagcactgatggatgcgggtgtaccaattaaagaatctgttgctggtattgcaatgggtctggtaaaagaaggtgaaaacttcgttgttctttctgatattttaggtgatgaagaccatttaggtgatatggactttaaagttgcgggtagccgtaacggagtcagtgcattacaaatggatatcaaaatcgaaggtatcactcgtgaaattatgcaagttgcgttaaatcaagcgaaaagcgcacgtctgcatattttaggggtaatggaaagtgcaattagccagcctcgtgcagaaatttctgagtttgcaccacgtattcacactatcaaaatcaatgctgataagatcaaagatgttatcggtaagggtggttcagttatccgtgcattaacggaagaaacgggtaccactatcgaaatcgaagatgatggtacagtgaaaattgcagctactagtggcgaacaagcaaaacaagctatcgctcgtatcgaagagatcacggcagaagtcgaagttggccgtatctataacggtaaagtaacacgtatcgttgatttcggtgcatttgttgctatcggtggtggtaaagaaggtctggtgcatatttctcaaatcgcagacaaacgcgttgagaaagtaagtgattacctgactatgggtcaagaagttccagtgaaagtgctggaaattgaccgccaaggccgtatccgcttaagcatgaaagaggctcaagcaacccagcaggaagcagctgaaacttcttctgaagatcctgcaaattaa

SEQ ID NO: 294567 - DNA, 888 bp, Proteus mirabilis
atgaaaacatttctgcgcggttgttctattgctgttttcatctttatttccgggtgcagcactagtccagaatggcgtaagaatgctatttttgctactccactacagccttctttacaacaagaagtgatattggctcgtatagaacaaattctggcgagccgttcattaaccgaagatgaatatgcacagcttttatatgagcgtggtgtgctgtatgatagtctcggtttaagagcattggcgcgcaatgatttttcaatggcgttgtcaatgagaccagatatgctagaaatttttaattttctaggtatctattttacgcaagcagcgaattatgatgctgcttatgaagcgtttgattctgttttagagcttgatccaacttacaataatgcgcgttttaatcgtggtatcgctttatactatggtggccgattgaaattggcgcaggatgatctgcaggcgttttatcaggtcgatccaaatgatcccattcgttcgctttggttatatcttgttgaaaaagagatagactctgattctgctaaaaaacagctgaaacagcgatacctacaggcgaataaaacgggacaatggggatggaatatagttgagttttatttaggtgacattagtgaaaaaacattaatggaaaggctaaatgaaacgtcaaccgataacacttcgctcgctgagcatcttagtgaaactaacttctatttaggtaaatattacctaagtctgggggacatggatagcgctgaagcgttattcaagctgacggttgccaacaacgcacataactttgttgagcaccgctacgcattgttggaattagcactgttaggccaacaagaagacctagcggaatcggaccagcaatag

SEQ ID NO: 294568 - DNA, 1836 bp, Proteus mirabilis
atgactactgaaaccgatatgacttttgctgatctaggtttatcagcacctattttgactgcactgaatgatttaggctacgagaagccttctccaattcagcaacaatgtattcctttccttttagatggcaatgatgttctaggtatggcacaaaccggtagtggtaaaaccgctgcgtttagcttaccgttattacacaatctagatgaatcattaaaagcaccacaaattttagtgttagcaccaacccgtgaacttgcggttcaggttgccgaagccattgaagatttttctaaacatttaccaaaagtgaatgtcgttgctctgtatggcggtcaacgctatgacgttcaactacgtgcattacgccaagggccacaagttgttgtgggtacaccgggtcgtttattagatcacttaaaccgtggcaccttagatttatctaaactaaaaggtttagtattagatgaagctgatgaaatgttacgtatgggctttattgaagatgttgagaatatcttaagtaagatcccagcagagcaccagaccgcattattctctgcgacgatgccagaagctatccgtcgtattacacgtcgctttatgaatgatccaaaagaagtacgtattcaaagcagtgtaactacacgcccagatattagccaaagctattggatgacttatggtgcacgtaaaaatgaagcattaatccgtttcttagaagcagaagatttcgatgcagctattattttcgttcgtacaaaaaatgcgaccttagaagtagcagaaaccttagagcgtaatggctataacagtgcggcattgaatggtgacatgaatcagtctctgcgtgagcaaacattagagcgtctgaaaaacggccgtttagatatccttatcgcaacggatgttgctgcgcgtggtctggatgttgaccgtatcagcttggttgtcaactatgatatccctatggattcagagtcttatgtacaccgtattggccgtactggccgtgcaggtcgtgcgggtcgtgcaattctatttgttgataatcgtgagcgccgtttactgcgcaatatcgagcgcacgatgaagatgtctattcctgaagttgagttaccaaacgcagagctgattagtcagcgtcgtcaggaaaaatttgctcagcaaatcgctcaacagttagaaacaagtaaccttgaccaatatcgtgcattgttaccaaaattagcgccacaaggtgaagaagcgttagatatggaaacattggcggcggtattactgaaaatggctcaaggtgagcgtgcacttattctgccacctgatccagtacgtcgtcctcgtcgtgaatttaacgatcgtgacgatcgccgtaacgatcgcgaacgttctccacgtcgtgagcgccgtgatgcgggtgaaatggatctttatcgtattgaagtgggtcgtgatgatggggttgaagttcgtcatattgttggtgctattgccaacgaaggcgatatcagtagccgttatattggtaatatcaaattatatggctctcactcaaccattgagttaccaaaagggatgccaggcgatttattaagccacttcactcgtactcgtattatgaataaaccattgaatatgcagttagtgggtgatgcacaaccttaccgtgagcgccgtaatagcagccgtcgtgatggtcagccacaaggtggtcgtcgctttagtaaaggcgatcaaccaccacgccgtggtaatggcgagcgtggtaacttccgtggtcgcggtaataacgaaaacgcaccacgtcgccgtagtagctctcataatcaataa

SEQ ID NO: 294569 - DNA, 651 bp, Proteus mirabilis
atggaccttcctacaaaccaaaagattactgaagaagatcggcatctactccgctcttatattccttttctcgataatttggggcaatttctcggtgattattgtgaaatagtgctacatagttttgaggatttacgccattccgttatccacatagttaatggacatgttactggtcgtggattaggtgcccccgtaacaaatattgctttagaaaaactctcaaaatttaatcgaacagatcaaatgtgggaggtttatttcaatacaaaaagtgttcggccatttaaatcatcatctactttaattgtaaataatgcaggtacacctattggtatgatttgtatgaactttgctctcgatatgccattaaatgcattaatagatagttttactgatacaaataatttaaaacatgaaaatttttcacaagatgtgaataatcttgtacagaatcatctagaaccaattaaaaagagagtttatggaaataaaaatattccaagtaaatacaagaatttagagataattaaagaattaaatgaaagtggactttttgaattttcagcaacacataaaatagtatccgccgaattaggcataagctcagcaacaatttataagcatttaagaaatttaagtaagaaataa

SEQ ID NO: 294570 - DNA, 963 bp, Proteus mirabilis
atgaaactaggtattgaaacagagtcctatcacctattttttcagcagggtgtaatggatgtttttgattttataaataaagcaactgaattagggctggatggggtcgaattaaatatcattcctgatgaaggattacacccagaatttggtgtgttaacaagtgatagccctgaatatttagcaaaagtacgtcaggcaattgaagataaaaatctttattgtgaattagatacacgttttacaacaccaaaggcattaacaaaagcaattgatatcgctcgaggaattggtgctgatgtgatacgtacttatatgtttcgtcgaggacaatacaatccgaaacaataccctaaaattattcaagatattaagtctattgttccattattaaaaaaatatcgtatacgtcttgcaatagaaaatcatgaagatgaaacggctgatgaaatcttaaatattgtaaaaaatgttgattctatttgggttggtgcacattgtgatattggtaatggcatgatggcgtgggaagatcctatagtaacagtgagcaaattagcaccttatacatatagcactcattttaaagatcatattgttacacatgatgatgaaacactggtaattacaggaatgcctcttggtgaagggagtattgatatcgatgaatgttttcgtttattagttgaacattcacctgtaacacgtattaacttagaaaactgttttccctatacatctcattttgctagagataaaggaacggggggagtatttgaattaagtggaagctttgaagttaaatcaccaccttttgatacgcaattaattaaccccttggaatattattatccagctaaaatttctcctgttgcattaaaaacattaatggacgcacaagagcgttgtgtacaagtttctgttaataaattaaaagaactaagaaaaaaatattgttattaa

SEQ ID NO: 294571 - DNA, 378 bp, Proteus mirabilis
atgattattaatactacatcagcaccagaagctattggtccttattcacaagcaattaaagttgaaaatcatatttatatttcaggttgttgcccattcaatactcatgatggttctgttatgggaaatgatattgaaacacaaacattaaaagctatgaataatttaaaagctattatagaagctgccggtgcatcaatggatgatattgttaaaacgacttgttttattaaagatataaaagattttcctatttttaataatatttattcttctttttttacatcaggaaaatacccagctcgttcatgtgtggaagtttctcgtctacctaaagatgttttaattgaaatagaagctatcgcttataaaaaatag

SEQ ID NO: 294572 - DNA, 1248 bp, Proteus mirabilis
atgaataaatggggaaaattatgttttcttattttgggtggtgggactatattcaaactatccagcatgaaagatgtattttatgtgccaatgcaacaagattggggattatctaacacccaaattggttttggctttactatttatgccattattcaaacaatcggattattttcatcattgtatattgccgatcgcttctctaagaaaattttattaccagcgggcttaattggggtaggtttatgtggtgcttatttaagcacattgcctccttttacgggttatttaattgcatttggtgcaatggcatttttcggcgaggttgtttattggcctgttttactaaaatcggtacgtttattaggaaataaagaagaacaaggacgtatgtttggttttctagaagctgggcgaggggttgttgatgttctagtagcttcgggagctctttatatatttgttttatttggtgaaggtaaagcaggtatgcaagcaggattaatttattatacgcttgctacaataatagtaggtataattacatattttattgtggataatgacgataagaaggaaacctcctcagcaagtgaagctaatcgccaagttttggaagggattaaaaatgtcgtaaaatgtcctaacttatggttagcatcaatgagtatcttctttgtttattctgcttactgtgggttaacttattttattccttttttaaaagatatttacgcactaccaatagcccttatcggtgcctatggcattattaatcaatatgcactaaaaatgataggtggtccattaggcggatttttagctgacaaagttgcaaaatcgccaacaatatatctgaaatggacatttttattatctgcgattgcaatggctattttcattatgttgcctcatgactcaatgaatgtctatttaggtatgactgcaacattaggtttcggtgcaatcattttctcgcaaagagctattttctttgcaccaatggatgaaattggaacaccaagacaatatgcgggttcagcgatggcgtttggatgtattattggttatatgccttccatgtttgcttatgctctctatgggtcattattagataattttgagggcattcaaggatataactatgtatttagtattatggtcacttttagtttgcttggttttatttgtgcaaccatattagctaagcgtattaaaatgataaataacactttaaatatagcttaa

SEQ ID NO: 294573 - DNA, 246 bp, Proteus mirabilis
ttggggtttgatcggcaaacggattggcggtttttagattttgattttgatatttttattgttgataaagataactttcctaattacaatcgtaataaaataatttacagtaaagccgaacaatatttaggtattaaacctgtttatagtcaattagagaataatcgattagtgctttatcgttgccattgtggtagtgattattgttctgtgatttcttgtactttagatattacagaacattag

SEQ ID NO: 294574 - DNA, 375 bp, Proteus mirabilis
atggaacccatttatattaaagtttatattaatcgcatcgaagttcgtgatcttcacaccaaaaaagaattttctgtagaacgtcattttactcatagccgaatgttaattggtgatttttaccctgctattgaagcgatacgaacagcacttactcaaataggtattaacccattatcctttttttgtcgaaaaagaaatgtggtaattcatcctttagaacgtaccgaagatggattatcccaagtagaaattcgattattcaatgaagtcattgccggtggattgaataataaatacaaaaaaatcgttattagtgcaaaactcacaccacttatggatgcagaggtgattgaattaatcaataaatcataa

SEQ ID NO: 294575 - DNA, 717 bp, Proteus mirabilis
atgaatatattaatcgttgatgatgagccgcttgctcgtgaaaatttacgttgtttactcgaagaagaaaaagatattcatattattggtgaatgcagtaatgctattgaggcgataggagaaatacatcgtaaaaaacctgatgtggtttttcttgatattcaaatgccacgtattactggcttagaaatggtctcaatgcttgatcctgaacatcgcccttatattgtctttttaaccgcatttgaagaatatgctattcaagcattcgaagagcatgcttttgattatttgctcaaaccattagagcaagagcgtttagccaaaacattaagtcgtttacgccaaggcaataaacaaaatattgatttattatcaccacctgaagaacgcttaaagtgcattccttgtactgggcatagccgtatttggctaatgccaatcgatgaagccgtgtttgctacatcacgattaagcggtgtctatgtcaccaataatcaagggcaagaaggttttactgagcttacattacgtactttagaaacacgcaccccgctggtacgttgccatcgtcaatatttagtgaatatggattatgtcaatgaaattgtatttggtgataatggacaagcagaacttattttacataataataaacaaattccggtcagtcgacgttaccttaaacccttaaaagaggcgattggcttaatttaa

SEQ ID NO: 294576 - DNA, 1704 bp, Proteus mirabilis
atgtacgaatttgatttaattttgctgttattacagcaaatgtgcgtttatctcattattgcgtggtttctcagcaaaacgccgctatttacgcctcttttacaagtgactatcaaacttccacataaattaatgtgctatgtgattttctccattttctgcattatgggcacctattttggattgcatattaatgactctattgctaatacccgtgctattggctccgtattaggcggattattaggtggcccgtatgtaggctttctcgttggcttcacgggtggcttacaccgctattccctcggcggaatgacagcgttaagttgtatggtatccactatcgcagaaggattaattggtggattagttcatcgttattatgtaaaacatggacaaatgcaccgcatatttaatccttggactgcggctaccgtcaccttttttgccgaaataatacagatgagtattattttattactcgctcgtccttttgatgaagcactttctttagtaaaaaatattgccgctcctatgattgtagcaaatacaataggtgctgcgatgtttattaggatattacaagatagacgtgccatttttgaaaaatataccagtgctttctccgctcaagcattaaaaattgcggtttgcactgaaggtattttacgtaaaggctttaaccaagataatagtactcgtgttgcaaaagttatctaccaagaattaaaagtcagtgctgtcgccattacggatagagataaactactcgcttttattggtattggcgctgatcatcatttgccgggtacaccgatttcctcagaacaatctaaacaagccattaataataacgaagtcgtgtatgcggacggcaatgagacaccttatcgatgtaccctttctccacattgtaaattaggctcgacactggttattcctttacgaggagaaaataatcgcgttattggcaccataaagctctatgaagcaaagaatcgcttatttagctccattaatagaaccttaggagaagggatcgccagtctattatcagcacaaattcttgccgggcaatacgaaagaaataaacaatcactattagaatcagaaattaaattactacacgcacaagtcaatccccactttttatttaatgcattaaatacattacaagccgttattcgtcgtgatagtgatcaagcaaaacagttagtgcaatttctgtcagctttttttcgtaagaatttaaaaagacccgaagcgatagtgacactcagtgatgaaattgaacacgtcacggcttatttacaaattgaaaaagcgcgctttcaagaaagtttacagatagatattcagatacctgaacatttagccactgcgcgccttcctgcattttcgcttcagcctatggttgagaatgcaattaaacatggaacatcacagttattaggcatcggaaagattacaattagagcgcatcaagaagaccacttaatagtgatcgaaattagtgataatgcagggctttatcattcgcaaggcgcatcacatcagctcggtttaggaatgagacttgtcgataagcggattaaattacgctatggtgatctatatggtgtacttgtggagtgtcagcctgataactataccaaaataaaaatctgtttacccttagaaaaaaatatggataacgcagcataa

SEQ ID NO: 294577 - DNA, 972 bp, Proteus mirabilis
atgaaaaaaagagccatctatcttattttattaatgctaatacttattgcattagccgttcttttccgcgcgcataatcaatatttattactgcaaggtgaagtggatgcacctgaagttattgtggcctctaaagccaaaggacgtgttatagagcgtcatattgagcggggtgatgatgttaaagcggggcaattgatgatcaccttagatagccctgaactcaatgctcaagtggctgcactggaagcggcaaaagcccaagctcaagctcaattagatctctctattcacggtacaagagaagaaagcattcgcaatttacaagcgatcttatctcaggcgcaagcacaagccaccaatgcaacgaaagattaccaacgtcttagtgcggtcgccaataaaggttatgtctctgccaatgagcttgatagtgctcgtagtcgtcgagatgttgccgtgcagcaagccaaagccgctcaagctgaattagatgaagcgaaaaacggtgatcgtattgaattacgtgagaaataccgagccgcactacaacaagcagagcagcaattaattgagctgaaagttcagcaacaagatttacaggtaaaagctccggttgacggcgaagtggggcctattcctgcggaagtgggtgagctttttaatgccaatagcccattagctacgttaattcgtcttcctgaagcctattttgtatataacttgcgtgaagatattttagccgatatccgcaaaggcgatcgcatcaccatcactgttcctgcgttaggcaataaagaagtggaagcagaagttcgctatattgctcctatgggagattacgcaacgaaaagagcgacgcgtgcaacaggagatttcgacttaaaaacctttgaagttcgactgtatccaacggcacaaattgaaggactacgtcctggtatgagcgcattatggcgttgggataagtaa

SEQ ID NO: 294578 - DNA, 1146 bp, Proteus mirabilis
atgagagtaaaggcagcttggcgtggttttaatagcgcattctcacgagaaacccatatggcagtgcgaagtccagtgttccactggctaagctggctgtttccattaatgttattcacattaattagtgctaacttttcagaaggtactttgctgaacttgccagtttccgttatcaataatgataatagtccactatcaaaaacgttgatccgagatttaaatgcaggctctcatgcaaaattaagtgcgctagatacaaatccgcgaaccgccttagagcagttaggaagtgcaaaagattacgctattttaatgatcccccgccattttgaaaaagatgtattagcaggtaaacagccgacaacccgaatgtattacaatgggttgtattatgctgcgggtagctatgctatacaggattttagcgggttaattgccgagcttaatgctcaatatcgcactgttttagcgcaagagatgaataagccagtgccgcctttagccaaagtaacactctcttatgacagcctgtttaatgccagtggtagttatatctactatcaacaatttgctgcaaccattcatatgctgcaactctttgttgtcacctgcacgatttactccttatcacggggtaatatgctattaaacttaaaacctttcacttttgccctaataggtaaattagcaccttatacgctgtttttcttaacattattaatggttgaattagcggcgttggtgcatttttcaggggcaaaagtcaatggtaatccgctttatatgatattggtggggttcttttatatcatcgcggcacaaagtattgggttgctgttgtttacatttaccaatagtgcgataaccgcatacagtatgataggtatgctagtgagtatcgccttagctttttcagggatggcggtgcctgaactgtcgatgatattacctgctcgaatcatttctaatctagagccgttaacgcacgccttaaatgctatgtttgatatcttcttaagagaagtttcgttacaaggtattctttatgtgtgcacgcttttgttgatttatccttttgcgattgcgcttttagttcgcaaacgcatctttaaaagattggaattacaggtaggtgtcgtatga

SEQ ID NO: 294579 - DNA, 906 bp, Proteus mirabilis
atggaacaagataatagttcatcgcttacggagccagaagaggtgtttacgccagttcctctacaaagaggtgcttcaggggcaaccgagtggttaggtattggctgggatttagttaaagagcgcttttttatgtgggtaggcgctgtaattatttactttcttgttaacttaattatctcatctatccttggatttatcccacttattgggccgattatctccccgtttatttcagctgtattagttgccgggcttatgatgatagcccatcagcaatatgagactggtcagctaaatctggataatttattttctggtttccagaacaaacgctaccttagcatcatgggtgcttatggtattagtgtgcttattatcttagcaggctttattttagcactattaatcagtggttcattattgatggaagttgctcaagccgctcttaatgatgcaccaacctactatattcaaggcttattggctgataacctgacaccaattacgttttcttctatcattattatcatttttagcttaatcagtactgcctcttattggtttgcccctgccttaattttagtaaatgactataaagctatccctgccgttaaagccagttttatggcggttaaaaacaacttatttggtggctttctattctttgtgctgttaagcatcattattggcttgagtattatcccatttggattaggcttatttatcactattccactctcttttactgcaatgtatggatcatatcgccatattttctatcagaaaaatatgggtaatatgactaataaccatactgataacaatgacaataatggtgatggtgggaataaagtttctttaaataaaaccgcagaatcgaatatcggtaaattagtcagttaa

SEQ ID NO: 294580 - DNA, 1050 bp, Proteus mirabilis
atgataatttctaaacagcagttacaccaattaatcaaaaataagttacataatgcaggactgaatgaaaaccatgcagacattgttgccgatgtattagttcatgctgatgtgaaaggaattcattctcatggtgctgtacgtgtggaatattatgctgagcgcattagtaagggaggaacaaatacgcatcctaagtttacttatcaagagacaggaccttgtagtgcgatttttgatggtgataatggtgctggacatgttgctgctaagcaggccatggagcacgcgattaatatggcacaagagaaaggcattgctgttgttggggttagacgtattggtcatagtggggcgttatcctactttgtagaacaagcctctgcatctggaatgattggtatttcactttgccaatcggatcctatggtagtgccatttggtggctctgaagtttattatggcactaatcctatcgctttttcagccccgagtgcagatgataaacctattacctttgatatggcgacgacggtgcaggcatggggtaaaattctcgatgcgcgggctaaacatagtgacattcctgacacatgggcggtagatgaagcgggcaaaccaacctgtgatccctttgcagtaaaaggtttattacctattgcgggaccaaaagggtatggcttgatgatgatggttgatgtattgtctggcattttattaggattaccctttggtaaacatgttagctctatgtatcatgatttgacacaaggtcgtgaattaggccagctccacattgtgattaatcctgctttcttcactgatgctgatttatttaaaaaacacatttctcaagtaatggctgagctacatagtattaagcctgcaatcggttttgaacgggtattatatcctggggaaaatagtcagcttgcagcgcagcgaagcgaaaaagaggggatagaaatcgttgacgaaatttatcattacttaaattctgatgtattatttaatcaatcttatgataataaaaacccatttgccagctaa

SEQ ID NO: 294581 - DNA, 333 bp, Proteus mirabilis
atgataaataaagaaatattaaagaacctaaagtattttgaaaaaacaccattgattcatcatattaattattccctaactgaagatgctaaaaaaaatatactaaacggctggttacctgcatgtatggaagataaatggctttcatatagtatagaaaactgtgtctatgttcatcgcagttggagtggccatttaatgtataaattcactattgataataacaccattgattttatagaaattgcaatggacgattttgttgatatgacaaatgacagaaaaatagaagtattcttctctttgttgccttacttatctcaacctcattga

SEQ ID NO: 294582 - DNA, 1290 bp, Proteus mirabilis
atgctcgatccaaatctactgcgtaatgagctagacgcggtcgccgaaaaactggctcgcagggggtttaccctcgatgtggaaaaaattcgtcaacaagaagaacgccgtaaggtgttacaggttgaaacagaatccctgcaagcagaacgtaattcccgatcgaagtctattggtgctgctaaagcgcgtggtgaagatattgagccacttcgtcaggaagttaaccaattaggtgaaaaacttgaagcggcaaaagcggaattagataaactgcaagccgacattcgtgactatgcgttaactttaccgaatctgcctcatgactctgtgcctaatggtaaagatgacagcgagaacgttgaagtatttcgttggggtgaaccaaagacttatgactttgaattaaaagatcacgttactctaggtgaactcacagatggtttagatttcccatctgccgtgaaaatcaccggttcacgttttgttgtgatgaaaggtcaaattgcacgtttacatcgcgcgatcgcccagttcatgctgaacttgcatacagaacaacatggctatcaagaaatgtatgtgccttatttagttaaccatgccactttatatggcacaggacagttacctaaattcagtggtgatttattccataccaaaccacttgaagaagagtctgaaagccaatatgcgctgatcccaacagcagaagtacctgttaccaatatggttagagacgttattctcgaagaagacgaactaccattgcgaatgactgcacatacgccatgtttccgctcagaagcgggctcttatggccgtgatacacgtggtctgatccgtatgcaccaatttgataaagtagagttagtacaaattgtacatcctgaaaaatcaatggatgcattagaagagctaacgggtcatgcagagaaagtgttgcaattgctcaatctaccttaccgtaaagtggtactttgtacaggtgatatgggctttggtgcacgtaaaacctatgacttagaagtgtgggtaccggcacaaaatacctaccgtgaaatttcttcatgctctaactgctgggatttccaagcacgccgtatgcaagcacgtttccgtgctaaaggtgacaagaaaactcaacttgtgcacactttaaatggttcaggtttagctgtagggcgtactttagtcgccattatggaaaactatcaaactgctgatggtcgtattgaaattccagaagttttacgtccttatatgaatggccttgagtatattggttaa

SEQ ID NO: 294583 - DNA, 1374 bp, Proteus mirabilis
atgaccaacgctagtgaggctattttgagtaatttatcactcgacttttcacaaaatgaatttcaacctctggccgcgagaatgcggcctgaaacattagaacagtatattgggcagaagcatctactcgctgaaggtaaaccgctaccacgggcgataaaagcaggccaattgcattcaatgatcttatggggacctccgggtacaggaaaaaccacattagctgaaattatcgggcgctatgcccaagcggatatagaaagactttctgcggtgacgtcagggatcaaagagatcagggccgccattgacatagcgcaccaaaatagaaatgcggggcgtagaaccatcctatttgttgatgaagttcatcgttttaataaaagccaacaagacgcttttttgccacatattgaagatggcactatcacttttattggtgcaacaacggaaaacccttcttttgaattaaattcggcactgctatcacgtgcacgagtttacctgctacgctcattgacagaaacagacattgaacaggtattacagcaagcattagatgatactgaacgtggattaggtgggcgtaatattattttacctgataatacacgcaaaatgattgctgaattagtcaatggtgatgcgcgccgttcactcaaccttcttgaaatgatggctgatatggcagaagtcgatagccaaggcaaacgaacactaacagcggaattactaaaagaaattagtggtgaacgtagcgcccgttttgataataaaggtgatcgattttacgatcttatctctgctttgcataaatcagtacgtggctcggcacctgatgcagctctttattggtatgctcgtatcatcactgcggggggagatccactgtatgttgctcgtcgcttactggctattgcttcagaagatgttggtaatgcagatcctcgagctatgcaagttgccatcgctgcatgggattgctttacgcgggtaggccctgcagaaggtgaacgtgcgatagcacaagcgattgtttatcttgcttgtgcgccgaaaagtaatgccgtgtataccgcttataaagccgcactggcagatgcgaaaagtaaacctgattatgatgtacctgcacatttacgtaacgcgccaacgcaattaatgaaagagatgggcttaggtgcagagtatcgctatgctcatgatgaacctaatgcttatgcggcaggagaggtctattttcctgctgaaatggcacaaacgcgttattatcaccctgttaatcgagggttagagatcaagcttgctgagaaattagactggctttctcagcaagatcaaaatagtgtgataaaacgctatcgcaaattgtaa

SEQ ID NO: 294584 - DNA, 606 bp, Proteus mirabilis
atgaaaaaagtattactcacagtctgtgctatcgcgttgtttggtagccaagccgcttgggcggatgctcgtcaagacttacaacaacgtcttaataaagtgaatagctttcaggctaactttagtcaaacggtgaccagtaacgaaggtgcgttaattcaaaaaggggaaggacatttaaaagtacagcgtcctgatctgtttaattggcaaatgacggcaccggatgagagcacactaatttctgatggtaaaacattgtggttttataacccatttgtcgaacaagtgacggcaacttggttagagagtgccacaacgaataccccttttatgttgattgcgcgtaatgatagtaaagaatggcaaaattacgatgttaagcaaaatggtgatcgctttgaattaacccctaaaacagagaacaatttaaagcacttttctattaccgtttcacctaatggtcaaatccaacaatttgcggctacagagcaagatgggcaagtcagccaataccaattaacggcacaaaaggtcgcccccattgatgcatcagcgttccgctttacaccacccgcgggtgtgacggtggatgaccaacgctag

SEQ ID NO: 294585 - DNA, 3822 bp, Proteus mirabilis
ttgagccaggaatatacagaagataaaaatattcgttttactaagataagtaaccgccgtcgtatttgggaagcccttcttattttgataggcattggtgctatctttttaatgatttctttactgagcttccatccagccgatccgagttggtcacaaaccacgtggaatgaacctattcaaaacttaggtggcaatattggtgcatggcttgctgatatccttttttcagcatttggcttgctcgcttatgcaatccctattgtggtggtatttggttgctggaatgcattacgtcatcaaaaaaatcgtgaatacacagattttttctcccttgcattacgtacaattggtgccttggctctggttcttacatcttgtgcgttagctgatcttaattttgatgatatctacaattttagctctggtggggtgattggtagcttatttagcaaggcattgctaccttggtttaatatgctaggtgcaacactggcgctactatcagtatgggcgataggctttacgctatttactggctggtcatggctgacgattactgaaaagattggtgcggttatcttaggtgcggttgcttttattactaatcgtggtcaaaaagatattgattatgatgattatgaagaacccgccgatcctgctcaggcagatcctgaggcgttggtcgataacaacacccagccagaacatcaactttctgcgcaaatagagccagatagtgatgatattctcttttctgcaccttccgcccttgagttagcgcgtcagcaagaaatggcgatcacgccacaacatgatgatataactgaaacttcagaagttgctagcggatctgcaaccccaacgatttcagccacagagacagttatcgctgaggcgcacgagagcaaagagcgggcagagcatattgttgataatcaacaaccgacgcatgccacaacccatgatgcagaagtaacaccgccatccattatggctactcatgacgctagcccagtcactgagcctgaacctgaacactatcgctttgaaataccatcggcatttcttaagcaacaagcgcattcctctgattctatggcagacaatggtgtcgtgacagaagaagtaccgacaaccatgccattgacggaaaacaaacctattgagacaaacgaagcgccaattgtctcgcaaaaaacagcggcggataatagcgaccatagtgcatcattatttacgccatctgctacatcagctacatcaacagatagcaattcagcttcattaactcaaacagccgccggtgttgccagtgtggcaacagcagcaatagtcagtcacggtgcacaagttaaacaaggattagggcctgaattacctcgaccaaatcctgtacgattaccaacgcgtcgagagctttatggtattcgtatcccatcacaacgtgaggcggaattacgccgccgtgaagaagcgcttcaacaagatcatgaagacgatttagcggatatacaagagcaggctaatttcgaacaatcgttacgtcagcaatttcttgagcaacaacgtgagcgctatggtgaggatacatcagcaacacaaaatgttgagccaaccatcacgatgtcatcagcgacatctagctcgcagtcaacctatgacgagtctgataatcaacctttcattgatacccataccttttctgcgcaagaaacagaagaggagagtgatgagtatgaacaacacctcgctgagcagtttaagcaacaactgcaagaacgctacggtgaggatgttttacaggatgaagatgacgaggtattgccatcagtcacgactggagcatccgaaacgccagcctcggcacaagggtatcatccccatattcagcactcttttgcgtctcaatctacccctgttactcaacagactgataacagcactctttatcctaacagtgatgcattcttacaagtatcacctcgtgatgatgaagaagaggaatacacaccgactatcgagttacaagaaaatcttgatgcattaggctcgttatcaccggtggatgatttgttagatgaagagcctgcagagcctgtttttacgccgatggtaacccctgcagagccagtatcttctgtatcttctgtagggcaaacacctattgagcctcaagcacagatggctcaacattttgcacagcaacagcaacagcaacagcaacagcaacagcaacagcaacagcaacagcaacagcaacagcaacagcaacagcaacagtcattaattcatccgttattaatgcgcaatgataggccgttacaaaaaccaacaacaccaatgccatcacttgacttattaacctctcctcctatggatgatgaacctgtcgatatgtttgagcttgagcgtattggtaagttaattgaagcgcgtttaaatgactaccgtgttaaagcaaaagtggttggtatttcaccgggcccggtgatcacccgttttgagctagagctagcgcctggtgtaaaagctgcacgtatttcaaatctatcccgcgacttagcacgttcactttccacgacggcagtgcgtattgttgaagttataccgggcaaaccttatgttgggcttgagttaccaaacaaaaaacgccaaaccgtctatatgcgtgaactattagatagtgatgcattccgtgacagtcgttcaccattaactgtggtactagggaaagatatcggtgggcaacctgtggttgctaacttggctaaaatgcctcacttactggttgcaggtactacaggttcgggtaaatctgttggggtgaatgcgatgatcatcagcattctctataaagcgaagccagaagatgtacgctttattatgattgacccgaaaatgttggaattatcggtttatgaaggtattccgcatctgttaaccgaagtggtgacagatatgaaagatgctgcgagtgctttgcgctggagtgtcgcagaaatggaacgccgttataaattaatgtccgcattaggggtacgtaaccttgcgggctataacgaaaaaattaaagaagcggaagccatggggcgtccaattccagatccactatggaaaccttctgacagcatggcacctgagttgcctatgttagaaaaagagccttatattgtggtcatcgtcgatgagtttgctgatctaatgatgaccgcgggtaaaaaagtggaagaattaattgctcgcttagcacagaaagcacgtgcggcgggaattcacttagtattagccactcagcgcccttcagtggatattattacgggtttaattaaagcgaatattccaagtcgcatcgcatttaccgtatcgagtaaaatcgactcgcgcactattttagaccaaggtggtgccgaatccttattaggtatgggtgatatgctttatgcgcctaatggctatatgccagagcgtgtacatggtgcatttgtcagcgatgatgaagtacatgcggttgcaacagactggaaagcacgtggccgacctcaatatattgaagcgattaccaaatgtggtgaagaaggcgaaggtggcaatggtggtggttatgatgatggagaagagcttgatccgctatttgatcaggccgtagaatttgtggttgaaaaacagcgagtctccatttccggtgtacagcgtcaatttagaataggctataaccgtgcagccagaattgttgagcagatggagatgcagggtattgtcagtgcacctaatcacaataatacgcgtgatgtattatcaccaccgccagcagaaatgtaa

SEQ ID NO: 294586 - DNA, 495 bp, Proteus mirabilis
atgattgataataaaaaacgtccgggtaaagatcttgatagaatagaccggaatattctaaatgagcttcagaaagatggtcgtatctcaaacgttgagctgtctaaacgcgttggtttatcaccaaccccatgtttagagcgtgtacgccgattagaacgccaaggatttatttctggttatactgcgctattaaaccctcattacctagatgcatctctgttggtatttgtggaaatcacattaaaccgtggtgcaccagatgtctttgaacaatttaatatggctgttcaaaaacttgaagagatccaagaatgtcatttagtttctggtgactttgactatctgttgaaaactcgtgtacctgatatgtctgcttatcgtaaattattaggcgaaacgctattacgtcttcctggtgtaaacgacacccgcacttatgtggtgatggaagaagtaaaacaaagcaatcgcctagtgattaaaacacgctaa

SEQ ID NO: 294587 - DNA, 960 bp, Proteus mirabilis
atgagcaccatcaaacatagcaaacttattattttaggttcaggtcctgccggctatactgcagcagtttatgcagcacgagctaacctagaacccgtgctgattacgggtgttgaaaaaggaggacagctcactaccacaactgaagttgaaaactggcctggcgaccctgaaggattaactggtcctggtttaatggatcgcatgtttcagcacgctgaaaaatttaataccgagattatctctgaccatatcaacaaagtcgatctgaaaaaccgacctttccgcctatttggtgatgaacaagaatatacttgtgatgccttgatcattgcaacaggggcatcagcacgttatatcggtttaccttctgaagaagcatttaaaggccgtggtgtttctgcctgtgcaacctgtgatggctttttctatcgtaaccagaaagttgctgttgtcggtggcggtaatactgccgtagaagaagcactgtatttagcaaatatcgcctcagaagtgcacctaatccaccgccgcgattcattccgctctgaaaaaatcttaattgaccgtttaatggacaaagttaagaatggcaatatcattttgcataccgatcgtaccttagatgaagtgttaggtgatgatatgggtgtcactaaagtgcgcttaaaagatacgaaaagtgataaaaccgaagagctagaggtcatgggcgtctttattgctattggtcatagccctaacacggcaatttttgaagatcaattagccttagataacggttacattaaagttcaatccggtacgcaaggcaatgctacccaaacatctattgaaggtgtttttgccgcaggtgatgtaatggatcatatttatcgtcaagccattacctcagctggtacaggttgtatggctgctttagatgcagaacgttacttagacgcactaaaatctaactaa

SEQ ID NO: 294588 - DNA, 1770 bp, Proteus mirabilis
atggataaaactaaacaaaatgaattggttcgatggctgaaacagcaaagtgctccagcccgccgttggttacggctatcaatgattttaggggtagtcagtggtttattaattattgcgcaagcatggttattagccattctactacaagcgttcattatggatgggctaagtcgtgatacacatacgactactttccttatccttatcagcatctttattttacgcgctgtcgtgatggcgatacgcgaacgtgtaggctatcgctgtggtatggcggtcagacagcaaattcgcaaaatagtacttgatagacttgaagcgctaggccctgtatgggtcaaaggcaagcccgcaggaagttgggcaacgattattctagaacaaatagaagatatgcaagattactatgcgcgttatctgccgcaaatgtatctcgcctctattgtacctttgctgattcttattaccatttttcctattaattgggccgcaggattaattctttttgtcacagctcctcttattcctttatttatggcgttagttggcttaggcgccgcagatgctaaccggcgtaattttcttgccttaggtcgcttaagtggcaacttccttgatagattacgtggtttagatacattgcgcctattcaaccgtggtgatgcagaagtaaaacagataacggatgcaacggaagactttcgtaagcgaaccatggaagtgctacgtatggcatttctctcttctggcgtattagaattctttaccgccgtatccattgcggtcgtcgcggtctattttggtttttcctatcttggagaattgagctttggtgattatgggttaggcgtgacgttattttctggttttttagccctgatccttgcccctgagtttttccaaccattacgcgacttaggcacctattatcatgctaaagcacaggcggtaggtgcagctggctccttggttgagtttttagaagccgaaggtgaacagccccaacctacgggtaatcaaactattaataccgaccaaggtattgaaatagttgcccaacaattagaaattttgtcacatcaaggagccaaactggcaggccctcttaactttaccattcatcccaaacagcgtattgcactggtcgggcaaagtggcgcaggcaagagctcattacttaatgtattgttaggttttttaccttatcgtggctcattaaccgtcaatggtgttgagttaactcaactctctccacaggcatggcgccaatgtatcagctgggtgggacaaaaccctaacttaccagagcaaaccctgctggataatattcgtttaagtgatccgaacgccagtgaagcgaagataaatcaagctattgaaaaagcttatgtaagtgattttattaacgaattaccggatggtttaaacaccattattggtgataatgctgcccgtctttctgttggtcaagcccaacgtattgcggtagctcgcgcccttttatcaccttgtcactttttattattagatgagcctgcagcaagtttagactctcacagtgaacagcgcgttatgcaagcgcttaatgaagcttcattacatcaaacgacgctgttgattacccacttattagaagaaacgatggaatatgatcagatttgggtaatggaaaaagggcaaatcattgaaactgggacttatcagtcactcagtcaacaacatggtgcctttgctcgtcttcttgctcatcgtaaagaggaactttga

SEQ ID NO: 294589 - DNA, 1752 bp, Proteus mirabilis
atgagagtactgcttccttttctcgcgttataccgtcgtcactggtttatgctgttactgggtattttgttggcaattttaacattattagccagtatcggccttttaacactttctggctggttcttagcgggcacgtcattagcgggttttgcgggcatttatagttttaactatatgttacccgccgctggggtacgaggtgcggcaatatttcgtactgcggggcgttattttgagcgtcttgtcagtcatgatgccacctttcgtgtactctcacacttgcgtgttttcacttttaagaaaattttaccgctctctcctggggggatcgcccgttttcgtcaaggtgaattacttaaccgtttagtagctgatgttgaaaccttagatcacctttatatccgggtgatctcaccgataattgccgcctttgtggttatcatgaccattatgtttgggcttgggcttattgatgctcgcttagcaaatacgctaggtggtattatgctcaccctgctggtggtattaccttttgtattttattatgccggaaagcccattggtcgtgatctcacagacctaagagggcaatatcgcaccgtactcaccagtatgttacaagggcaagctgaattaacaatttttggcgcccttccccgctttagacaaaatttagcacaacttgaagcacgctggctgcgccgtcaagcacaacaagctaacttaactggtttatctcaatcgctaatgattttggcctcgggattaaccgccacactgattttatggttagctgccgatggtattgatgcccactttatgccagaagcactcatcgctctctttactttctgtgcattagcggcatttgaatcgctcggcccggtgactgtcgcatttcaacatttagggcaagtcatgacatcggctacgcgtattacgcatttaattgagcaacaacccgatgtctccttcccagcccaagggggagagataaaaccgagcgcctcattaacactacgggatgtctgctttacctatcctaatcaacccatgcctgtgatcaatcatgttgatctcaccattgaagcaggacaacatgtggcattactgggtaaaacgggttgtggtaaatcaacactcttacaattagtcaatcgcgcattcgatccctctcagggcgtgatcacattaaatcatttatctcttgctgattatgatgaagcgacattacgttcaatgatgtctgttgtacctcaacgtgtgcatgtttttagccatactttaagagagaacttaattatggcaaaagaagatgcgacagatgaagagcttactcatgttctacgccaagttggtcttgaacaactggtcgaaaatgatgaaggtttaaatgcatggatgggtgatggtggaagacagctttctggaggcgaacaacgacgtttagggctggcaagagccatactccataatgcaccacttatcttacttgatgagccaacagaaggtcttgatgcagatacagagcaacagatcctcgcactattacagcaacattgccaaggcaaagcggtattaatgatcacccaccggctttctgggttagataaaatggataaaatttgtgtgatggatggcggtcacattgtcgaaaccggcacgcatcgtcagttattacaacagcaaggtcagtatgctaaatttcatcaaagacaagcattgttaatgctacatgatgaggcgtaa

SEQ ID NO: 294590 - DNA, 693 bp, Proteus mirabilis
atgccgttgtttcaattagatgaacacgatgtgacttttcctgccccccatttggctttaaaagagccaagtgggttattggcaattggcggcgatatttcccctgctcgtttgaaagaggcttatcaaacggggattttcccttggtatacaccccatgaaacgccgttatggtggtcacccgatccccgagccgtcttacccgcaggaacattgcatattggtcgtacgttacgtaagtttttacgccaagcgccttataccatcaccttaaatcaggcattctctgatgtcattgaggcctgtagtgtacgtgatgagggaacttggataggccctgatataaaaaacggctatcgggcattgcaccaacaaggagaagcccattcggtagaagtttgggagtgcgacgaattggtcggtggtttatatggagttaacgttggtgccgttttctgcggtgaatcaatgtttagtcgtcgaaataatgcttctaaatgtgcctttgttgctttttataaccattttctgcgttatgggggtcaactatttgattgccaagtgttaaactctcatacggcagcattaggtgcgatagaaattgccagagatcgctatttagaggcgctatctcgttggaaaaaggtgattattgataaaaagtgttggtatcagcaatcgttggaattataa

SEQ ID NO: 294591 - DNA, 219 bp, Proteus mirabilis
atggccaaagaagacaacattgaaatgcaaggcactgtactggatactctgccaaacacgatgttccgtgtagaattagaaaacggacacgtcgttaccgctcatatttcaggaaaaatgcgtaaaaactatattcgtatcctgacaggcgacaaggttaccgttgagctgaccccatatgacctgagcaaaggccgtatcatcttccgtagccgttga

SEQ ID NO: 294592 - DNA, 2295 bp, Proteus mirabilis
atgcttaatcacgaattagagcttagtcttaacattgcattcgcgaaagcccgtgataacagacacgaatttatgactgtagagcacctgttgctggcgctattaagtaacaaatcggcgcgtgaagcattggaagcttgtaaagtcgatttagcagtcttacgcgaagagcttgaaatctttattcgtaaaacgacacctattttacccgagcatgtcgatagagaaacacagccaaccttgagtttccaacgtgtattacaacgtgctgtgttccatgtgcaatcttcaggtaaaaatgaagtttccggtgccaatgtgctagtggcgatttttagtgagcaagagtctcacgccgcttatctactacgtaaacatgatgttagccgtcttgatgtggttaattttatctctcatggcattttaaaagatgatcaacaaaacagtgatgatcagtctgatatgggcgatataaatgcacaatctcaacaagagatgccacaaggcgatgatcgcatggataattttaccactaacttaaaccagttggcgcgtcagggtaaaattgatccacttatcggccgtcaagcggaattagaaagaacgatacaagtcttatgtcgtcgacgtaaaaataacccattactggtcggtgaatcgggcgtcggtaaaacggcaattgcagaagggctagcatggcgtattgaacaaaatgatgtgcctgatgtgatgaaaggctgcacgctctattcccttgatattggatctttattagcaggaaccaaatatcgtggtgatttcgaaaaacgctttaaagcgttattgaaaacacttgaaaaagatgaaaaaagtatcttatttatcgatgaaattcataccatcattggtgctggtgccgcctctggtgggcaagttgatgccgctaacttaattaaaccactattatcaagtggtcgtattcgtgtgattggttcaaccacttatcaagaatttagtcagatctttgaaaaagatcgcgccttggctcgtcgtttccaaaaaattgatgtaattgagccttcggcagatgaaactgtattaattattaagggattgcgtcagaagtatgaagcacatcacgatgtgcgttataccaataaggcaattcaggcagctgttgatttatcggttaaatacattactgatagacaccttcctgataaagccattgatgttattgatgaagccggtgcgaaaacccgtttaattgcaccaagtaaacgtaaaaagacgattaatgtctctgatattgaatcggtagtagcaaaaattgcccgtattccagaaaaaacggtttctagcagtgataagtcaatgctaaaaaatctggataaccaattaaaaatgttggtgttcggtcaagatcaagctattcatgccttggctgaatctatcaaaatgagccgagcaggtttagggcaagagaataagccggttggctctttcttattcgccggacctactggggtgggtaaaacagaagtaacggtccagttggcgaaagcgcttaatattaagctactgcgctttgatatgtctgaatatatggaacgacatacggtaagtcgtttaattggggcacctcctggttatgttggttttgatcaaggtggattactcacagatgcggtgattaaaaacccttattctgtagtgttacttgatgagattgaaaaagcacatcccgatgtgtttaacattctgctacaagtgatggataacggaacacttactgataataatggccgtaaagctgattttcgtaatgtgattttggtgatgacaaccaatgcgggtgttcatgaaacgcaacgtaaatcgatagggtttactgaacaagatcatagcactgatgccatggttgaaatcaaaaaagcgttttccccagagtttcgtaaccgtttagatggcattatttggtttaatgcgctatcagccgatattattgctatggtggttgataaatttattgtcgagttacaagctcaattggatgataaaggggtatcgctagaggtaagtcaagaagctcgccaatggttaagtgataaaggttacgataaagcaatgggagcaagacctatggctcgcgtaattcaagaaaatctgaaaaaaccattagccaatgaaattctgtttggctcgttagttaatggcggctcggtttctgtgaccttaaatgaccaagaaaataaattacagtaccaatttactagccaagaaaaattggctaaaaaagaagataccgttatttaa

SEQ ID NO: 294593 - DNA, 315 bp, Proteus mirabilis
atgggtcagtttgattttttaacagaaaccacactaggggagaaggtctctcagttaaatgagccacctgcgatgtataaggtgatcttgaataatgatgattacacccccatggattttgttgtagaagtattaacaatgtatttttttcttaacgaagaaaaagccacacaaattatgttggacgttcatcataaagggaagggagtgtgtggtgtctatagtgcggatatcgctgaaactaaagttgcacaagtgaatcaatacgccagagaaaatggccatccacttttgtgtacactggaaaaagcgtag

SEQ ID NO: 294594 - DNA, 210 bp, Proteus mirabilis
atggagacaggtacagttaagtggtttaacaacgctaagggttttggtttcattacccctgccgcaggtggcgaagatatttttgcccattattcatcaataagaatggaaggctaccgcacactgaaagcgggtcagaaagttaattatagcacaataaaaggacctaaaggggatcatgctgatcttatcattcctattatcgaataa

SEQ ID NO: 294595 - DNA, 1944 bp, Proteus mirabilis
atgtctgcattactagagctcaacaacgtaagccgtttatataccaatggtgaagaagacacggtggtactagatcagatttcactgacgattaatgctggggaaatggtcgcgattattggtgcatcaggctctgggaaatcaacgctaatgaacatattaggttgcctagataagccaagcagcggtgaatataaagtggctgggcaatgtgtggcagatatggaaagtgaccaactggctgcgctacgtcgtgaacattttggctttatttttcaacgctaccatttgatggcgcatttaactgctgagcaaaatgtggagatccccgccatatatgcaggtaaaagtacagagcaaagaaaagagcgcgcccgtgcgctattaactcgccttggtttagcagagcgtattcactatcggccaagtcagctttccggaggtcaacagcaaagagtcagtattgcccgcgcattaatgaatggcggagaagtgatcctcgccgatgagccaacgggggcattagatagccaatcgggtaaagaggtaatggctatcttaaagcaattaaatcaacaagggcatacggtgattattgtcactcacgatccattaattgcccaacaagccgatcgtattattgaaattaaagatggtcaaattattagcgataataataatcaccattctgcaccagtgaaaaaggcaccacctgcgatccaaaccgcctcttattttcatcaagtcattggacgttttacgcaggcattaaacatggcttggcgagcaatggtggtgaataaaattcgtaccttgctgacaatgttggggatcattattggcattgcctctgttgtcaccattattgttattggtgatgctgccaaagatagggtcttagcagatataaaagcgattggcgccaataccattgatatctatccgggtaaggagcttggtagtgattcaccagaagataaacaatccttaaccattcaagatgttgatgcgttaaaacagcaatcttatatacaatcagtgacaccacagatttactttagctctcgattacgtcgtggtaatcaagatgcgccggcaacagtttctggtgttaacgaggattatttttcagtgtatgcgttgaaatttgcacaggggagcacttttacgcctgatatgatccatcgccaagcgcaagtagtcgttattgatgaaaatactcgtcatcgttttttcccgaataaacaagcggtgattggcgagcaaattattattcgtaatattccttctactatcataggtgtggttgcagagcaaaaatccacttttggtgataataagtcattacgtgtctgggtgccttacagtacgctaagtagtcgaatttataaccgtagttatttagataacatcacggtaaaagtaaaagagggctatgatgcgagtgttgctgagcaacaaattctccgcttattaacgatccgacatggtaaaaaagatatttttacttataacattgatagctttattaaagcggctgaaaaaaccacgcaaactatgcaactgtttttaactttggtggcggttatttcgctggtggtaggggggatcggcgtgatgaatatcatgttggtttctgttacagaaaggactcgggaaattggtattcgtatggcggtaggcgcacgagccagtgatgttatgcaacaatttttaattgagtcagtactggtgtgtttggtgggaggattattaggtattagcctctcatttgcgattgctatgtttgccagcatgatgctacccaattggcattttgtgttccagcccacggcactgataagtgcttttgcttgctctacagcaattggggttatttttggttttttaccagcgagaaatgcggccaaaatgaaccctattgatgccttagcgagagagtaa

SEQ ID NO: 294596 - DNA, 1110 bp, Proteus mirabilis
atggcttttttcctaactaaaaagcaagggaagattatagctgctattttgatttttattgccataggcttattttttttctggccgaaagagcatttacctagttatcaaacacaaaaaattactcgtggggagctttccaaagaagtcacagcaacgggcaaattagatgcggtacgtaaagtcgatgttggtgcgcaggtgagtggtcagctacaaactttatatgtaaaagaaggggatgtagtaaaaaaaggcgatctgctggcgattattgatccgaaaaaagcacaaaatgaggtcgcggaatctcaagaaactaataatgaactgatggctaatttacagcaaactaaagccgaattacgtttggcgcaattgacttatcaacgtcaattaaagctgattggcacacatgttatagcccaagaagagcttgatcgcactaaaacagacgttgaagtcaaaaaagcgcgagtggcgacttatgaagcacaaattagaaaaaatcaggcaacactggataccgcaagaactaatttgcaatatacccgtattactgcgccgatggatggtgtggtcacttttatcaaaacccttgaagggcagacagtcattgcagctcaagaagcaccaaccatattaacattagctgatttagataccatgttagtaaaagccgaagtttctgaggcagatgttatctatttaaaacctgatctcaaagcctcttttactgtattaggagcaccagataaagccttcaatggtaagttaaaagatattttacccacacctgaaaaaatcaatgatgcgattttttactatgcacgttttgaagtccccaatgaacaacatttgttgcgtttacaaatgacagcacaagttaaaattctccttgagcataaaaaagatattctcttagtgccattatcagcattaggggaggatgtgggcataaatgaatatcaagtagaggttctcgtcaatgggcagcctgaaaaacgcgtagttaaaatcggtattcgtacagatgtttatgcagaagtcattagtggattaaatgaaaatgatgacgtgatcctcggtgagattgcaggagagtcataa

SEQ ID NO: 294597 - DNA, 1674 bp, Proteus mirabilis
atgtatttagaaagagtggaaatagcaggatttcgggggcttaatcgcctttctctcccccttgatatgaatacggttttggttggcgaaaatgcatggggtaaaacttcattacttgatgcgttaaccttgagtttggggatcgaaacttatcaatatgcttttacagcagaagattttcatcgtttacctaatgagccagaaaacagtaaaaaaaacctacaaattattctgacttttaccgaatcacgtcctggtcgtcatcgctcgtatcgttttcgtaaattagcacccgtatggatagctaatggggacgctcgtaagcatatttattaccgtattagtgcagaattagatgagcagcaaaatgtcaaaacctttcgttattttctggataaagaaggtaaacagatccgtttagcgaatggacagaccaaagcgattattgctgaaattgtgcgcctttatccagtattgcgcttacaggatgcgcgttttatacctaatttaacaacagaagttattgactctcataatgagcctcatcgtgaagcatttaataataagatgagtgaattaacgaaagcattaattaataacccagacaatttatcagatgaagatttacgtgaagggttagatgcaatgcaacagttattaggacactattttgctgatcacggtgcgctactgtttaaatctcatttgaaacatcgcaaagtcagtgagccacatattcgaggatggcatgcactagaaaatattaataagattttagcgaaacctaatcagcgcaatattcgtttaattatcttaggtatgttctcttctattttacagtcacgaggcagtgtcgaacttgatccttacgcaagaccgatagtgattgtagaaaaccctgaaactcgcttacaccctattatgctttctgtggcatggggattattaaatctcttttctttgcaacgcattacgacaaccaattcaggggagttactctccttagcaccactacaaagtgtttgtcgattagtacgtgatacagataaagttgccgcttatcgacttggcgacaaacaacttcatgcagaagaagagcgtcgtatctcttttcatattcgttataaccgaccttctgcactctttgctcgttgttggttattggtcgaaggggaaacggaaatctggctaatgaacgaattagccagacaatgtaactacttctttgaatctgaagggatcaaagtcattgagtttgcgcagtgcggacttaagccactgttaaagtatgctacctatatgggtatagaatggcatacgttggttgatggcgatgaggcgggtaaaaaatacgccgccaccgttaaagaatttgccgcaaaaagaaatgatgcggagcgtgaccgattaacacggttgccagcattagatatggaacactatttatataaagaaggttttcgcaatgtctatcatgaggttgcgggtgttcctgataatgaaaaatggccagtaagacgtgtgatcataaaagcgatacaacgttcatcaaagcctgatcttgccttaacggttgctaataatgctgcacaacgaggtattgatgctattcctactttattaaaggtgatgttttctcgggtagcatggcttgcgagaggaaaagccaattaa

SEQ ID NO: 294598 - DNA, 903 bp, Proteus mirabilis
atgctatcagggttattgattatcctattgcccctgtttatagggtatttgattaagttaaacaatcgccctttgcttcaattggctaaccgtttacttagtgcaatggtctatgtgatcctctttttaatgggggttagcttagccatgttagataatattggtgaaaatttattttctatccttgcctatgccagtgtcttctttatctgtacttttggtgccaatctgctgtttttatggttgctggataaaaaagatccctggcatgtccctgcacataaacaagctaagcccccttcacgtatcaaaatggtactcgaatcactacaactttgtggtgtagtggtagtaggtttttttgtcggtttaaccggatggtcaatttttggttatgcatctcaagccagccaaggcgcacttatctttttattatggcttgttggtctacaattacgtaatagtggcatgagtccaaagcagatcttaattaatcgtcgcggtactaccattgcaatagtgatggcaataagtgcccttgcaggtggtgcattagcggcttatttactcggattacccacaaaaatgggattagcgatagcctctggttatggttggtattctttatcggggatcgtattaaccgatgcgtttggcccggtaattggtagtaccgctttctttaatgacttaatgcgtgaattagccgctatcatgctaatccccattattgttaatcgttatagaaatacggcattaggtatttgtggttcaacttctatggactttacgctacctgtattacaacgcagtggaggggttgccatagttcctgctgcaattgtgcatggtttcgtattaagtttggtcacaccaatcttaatggcgttctttacttcatag

SEQ ID NO: 294599 - DNA, 1464 bp, Proteus mirabilis
atgaatcaacagcgtgtattggtattaggtgccagtggacatattggacaaaatcttattcctgccttaatagcacaaggccatcaagtcaccgccggtgctcgtagagtcgattggatgatgtcgcaagggtggcaaaatacacgctgtgtatttgttgatttacacgatcccaaaacattacgagatgtcatccgtaatacggatattgtgtattaccttgtacacagtatgggagatgcccataaccttatcgaacaagagcgccaagcggcattgaacgtcgtcgatgctttagaagagagtgacgttaaacaaattatttttttaagtgcgctccaacataaagatcaaccctactctccccatcttgttgcccgcaagctcacgggagaagtacttagaaccagctctattcctgtgacggaaatccgcacctctatgattgtcggtcccggctcggccgcttttgagatcatgcgagatatggtatataacttaccgatattaaccccgccgcgttgggtgcgttcaaaatcatcccctattgcgttaaaaaatttaatttactatttaacagaaattattcatcacccaacccatcaacaccgcatttttgatgccggtggccctgaatatattagctatcaaacactttttgagcgctttattaacatctccggcaaaaaacgattactgatccctttgccgatccccgccagtattatttctgctgggtttattagcctaataacttcagtacccacttcaatcgccaaggagcttatccaagggcttaaatacgatcttcccgctaaagatgcctctttacgcaaactgatcccacaaaagttaatttcttttgatgacgcagtcagagaaacactcgcagatgaagaagcggctttagatgatcaagattggggttactctcctgaagtacgtaaccgttggaaacccggctatggctattatcccaaaaatgccggatgtacagtgtcaacaccagcgagtgcggcgacactttggcatgtcgttcagcaaattggtggtgaacaaggttatttttatggtaatgcattatggaaaacacgtgctttattagatgatcttgttggcaacaaagtcacttatgggcgccctcagcgtgaaacgctagcgctaggtgatatgattgatggttggcgggtaataaagttagagcctgaaaaacaactgactttactcttcggtatgaaagcccccggtttaggacgcctctcttttactattcacgatagtggtaacctacgctcattagatgtccgtgcttggtggcatcctgctggttttagtggtttactctattggtttgccatgatgccagcccatttatttatttttaaaggtatggctcaaaccatctcaacttgcgcctatagattggataaaaattcacctaaaaagcccgagcaatcgtcctaa

SEQ ID NO: 294600 - DNA, 750 bp, Proteus mirabilis
atgactattcaaaaaaaacgcatgagtattcaattaaaaaatataaattgtttctacggttcgcaccaagcactctatgatattaatctagaatgttctgctggtgaaacaatggttctgttaggaccaagtggtgcgggtaagagctctctaatgcgggttctaaacttattagaaatgcctcgttctggtgaattagacattgctggtctacattttgattttggccagcaaccgaatgcgaaagcgattcgtacattacgccaaaatgttggcatggtttttcagcaatataatttatggccacacttaacggttcttgataatttaattgaagcaccttgtcgtgtattaggtttggcaaaaccgcaagctaaagaaaaagcgatgaaattacttgagcgtttacgtttaagtgattatgcacaacgttttccactgcatttatccggtggacaacagcaacgtgttgccattgcaagagcattaatgatggagcctcaggtactgttatttgatgaaccaacggcagcacttgatccagaaattacggctcaagttgttgatatcataaaagagctttctgaaacagggatcacacaagttattgtgacccatgaagttgaaattgcgcgcaaagccgcaagcaaagttgtatatatggaaaacggccgtattatagagcaaggtgataatcatcatttcactgcccctcaaacggaagcttttgctaattacttgtcacactaa

SEQ ID NO: 294601 - DNA, 735 bp, Proteus mirabilis
atgaaaaaaatattatttgcagcacttctgaccagtattacactttctgcaacagcggctgataaagagactattcgttttgctactgaggcaacttatcctccatttgaaatgattgatgcaaacaatcaaatcgttggttttgatgtagatttagcaaatgccatgtgtgaaaaaattaatgctgaatgtacttttaccaatcaatcatttgatagcttaattcctagcttaaaattccgtcgttttgacgcattaatggcggggattgatattacgcctgagcgtcaaaaacaggtagattttactgattcttactatgacaactcagcggtctttatcaccgttacaggtaaaatttccgatgttgcaagcttaaaaggcaagcaaattggtgtccaaaatgggacaacccatcagaaattcatcaatgaacaacataaagagatgaaaacggtgccttatgacagttaccaaaatgccgtgttagacctaaaaaatggtcgtatcgaggctatctttggtgataccgctgtggttaatgaatggctgaaaaagaatcctgaattaggcattgtcggtgataaggtcactgatcctaactattttggtacaggccttgctattgcagtaagaaaaggtaatgctgatttacaagataaattaaacaaagcattatctgaagtaaaagccgatggcacctatgatgtcatttataaaaaatggtttgaataa

SEQ ID NO: 294602 - DNA, 705 bp, Proteus mirabilis
atgaatgaaataacaacgctagcaggtgcgaccgtgactacggtcacacttgctatttctgctcttattatcggattagttctagccatgctgtttactgcgtgggaatccgcaaagtggaaagcctttgcttttctaggaacttgctgggtaacactaattagaggactgccagaaatgctggtggttctttttgtctattatggcaccttacaaggtgtcatgatgctcatggatggtattgaattaggccctttcaccttacaatttgactttggtgatactgaatctttacctttctattgtggtgttatcgccctttcacttctgtatgcgtcttacgcttcacaaactttacgtggtgcattaaaagccgtgccaaccggacagtgggaagcaggacaggcattgggtatgggaaaaatcaccatttttttccgctttatcatgccccaaatgtggcgtcacgcgttacccggactcggtaatcagtggttagtgctcttaaaagataccgctttagtctcattaattagcgttaatgatttaatgctacaaacccagagtattgccaatcgtactcaagagccttttacttggtatagcattgtggcacttatctatttagccattacattagtcagccaatatattctgaaatggttagagatgagaacgacccgatttgaacggagtgcctcataa

SEQ ID NO: 294603 - DNA, 669 bp, Proteus mirabilis
atgtgggattatattgttgatattttaccaggcttaccgaccagtttatcactgacttttgttgcgctcttagtcgcctttacgttatcggtattaatgacttttattttggcattaaaagtccctgttatttcacctatcgtaaaagtctatattacattgtttactggcacacctttgttagtacaatttttcttaatctattatggacccggacaattcccctcattaaaagaatttcctctgttgtgggaattattatccacaccttggttttgcgccatggtgacattagcattaaatagtgcggcttattcaacactccttttccacggtgcagtcagggcgatacctgctggacaatggcaatcctgccaagctttaggtatgtcaccgctacaaacagcgaatgtcatcttaccttatgctttcaaacgcgccctttcttcttattccaatgaagtggtgctgattttcaagagtacttctcttgctagcactatcactttacttgagctaaccggctatagccgacaagtctttgggcaaaattatgatgtgatggtatttgttgctgcaggcattatttatttagctatcaatggaatactgacactgttaatgagattaattgagaagaaagccttagcttttgaacatcgtgattag

SEQ ID NO: 294604 - DNA, 1134 bp, Proteus mirabilis
atgcaatgcgcacgctccagtgcgggtgattgccactcttgtgagtggctttctcttgcttattccgaacaaattaatcaaaaacaacataatctattagacctattgcccaaaaactacgcgtttactcaattagcgccggtagaaagccaacaagttcaatttcgtaataaagcgaaaatggtggtaagtggtagtgtcgaaaaaccgattttagggttacgtaaaccagagggggaaggtgttgatttatgccaatgcccactctatcccgcttcctttgaaccggttttcccaatattaaaaacctttattgccaaagcaggattagtgccttataacgtggaacgtcgtcgaggcgagctaaagtttattttattaacagaaagtcgccacaatcacagcatgatgctacgttttgtgttgcgctcagaaaaaaaactggcgcaacttcgccaagcattaccatggttacaggctcaattaccccaattagccgttatttcggtgaatatccaacctgtccatatggcgatattggaaggtgagcaagaaattgtattaacagaaaaaaactttttagatgaatattttaatgagattccgttacatattcgcccgaaaggtttttttcaaaccaatcccgatgttgccgcgtcactgtatgcaacggcagggcattgggtcaaagagttgcagataaaccggttatgggatctcttttgtggctcaggggggtttggcttacattgcgcacaaaaaaacacggaattaataggcattgagattagccctgaagcgattgaatgtgcacgtttatccgccaatgaattagggttagagcatgtagagtttcaagcgctggactctactggttttgctttagcaaaagagtctgttcctgaattagtactggttaatccgccacgacgaggtattggcgaaacgttatgcgactatttaaatagtatgaagcctcgttttatcctctattccagttgtaatgctcaaacgatggcaaaagatatacaacaactttctcattatcgtatcgatagagtgcaactgtttgatatgttccctcatactgctcattatgaagtgttgacgctcttggttttacaacaaagttaa

SEQ ID NO: 294605 - DNA, 504 bp, Proteus mirabilis
atggacgctgttgttactatcgatctggatcagctgaaatcttggctggatgaattacagattgctttctatgaatgtgactcttgtcaggcgttacatttacctcatcttcaatatatcaatggtatttttgatgctaaaattgatgtgcttgatgatgtgcttgtttttaccgctattgctgaattaaaaccatcagcgatagtgcctgttatggcaaatcttagtcaaattaatgcaagttccctatttattaagacgttcctagaaattagcgatgaaaacttaccgaaattagttttgagccaatctttacctattgctgtgggactatcatttaatcagttcgatctgtttttacataaggctgaagagcagtcagcagaagtgatcagtgagatctttaataatgattttctgtatggcgaaagacaagaaaatgaagaagatgaagatctagacataacatcatcatcaacagactcttcatatactgtacattaa

SEQ ID NO: 294606 - DNA, 264 bp, Proteus mirabilis
atgtttgttgtaatttttggtcgtcctggttgcccatattgtgtccgagctaaacaacttgctgaaaccttgtctgaaaaacgtgatgactttgatttccgctatgtggatattcaagctgaaggtattaccaaagcagacttatcaaaaactgtcggtaaaccagttgaaactgtgccacaaatttttattgatgaaaaacacattggtggctgcacagattttgaagcttatgcgaaagagcatttaggcatctataactaa

SEQ ID NO: 294607 - DNA, 426 bp, Proteus mirabilis
atgtggtttcaaaaagagattttacttcaagcaaaaccgagaggatttcatttaatcacacaggcactgttgcaagaattacccgaactcagacaatacaaaataggtattgctcatttttttattcaacatacttctgcgtcattaaccattaatgaaaacgccgatccgactgtacgcagtgattttgaaagtttctttaatcgctgtgtgaaagagcatgaagcttattatcttcacacttatgaaggcagtgatgatatgccagcccatcttaaaagtagtttacttggtcagagtgtgtcggtgcctatttgccaaggggaattaaatttaggtacatggcaggggatttatttaggtgaacatagagatcacggtgggcgtcgacgtattgtggtgacattacaaggagagtgttactga

SEQ ID NO: 294608 - DNA, 612 bp, Proteus mirabilis
ttgctggaacaactcaatttagccgtattttcattgatgaatgcaaccccttcggcctcccctttagagattaatgtcgcgatctttattgctaaatacttggtttacttgttccctctgtctttagctttctattggctatggggaaatgaaaagcatattgatcagcaaaggactttagcttgtaaggctggggtcgctctgattattgccctctctatctcttggtttatcggtatgatagctccccatgatcgcccttttgcagccaatatcggttataacttccttgatcatgaggcaacgccttccttccctagtaatcatggtactttcgtgtttactatcgcactggcttatcttttttggcataacagtaaacgcattggcatgctgatgcttattttaggtcttgcgattgcttgggctcgtatctatcttggcgtccattggccaatagatatggttggtgcatttattgttgctctcctctcttgtgcattaagccaaatactttggtcacaaggcgggaaaaagttacaaaaagctatccaccagctttatcaactctgctttgcatatcctattcgcaaaggttggacaaaagcttaa

SEQ ID NO: 294609 - DNA, 267 bp, Proteus mirabilis
atggttaatacaatgaatgcccaatttgatgatgcgacaaaaacattagataccttaggactacgttgtcctgagcctgttatgttagtgcgtaaaaccataagaaatatggctcagggggaaacactgttggtgattgctgatgatccggctacagtgcgtgatattcccggtttttgtcgttttatggaacatgacctattacagcaagagacgcaagcaacaccttatcgttatttgatccgcaaaaaagagggtcagctgtaa

SEQ ID NO: 294610 - DNA, 675 bp, Proteus mirabilis
atgtataggtttacctcccgccaaaaagcggcggcgctattatggctttcgttatttcatatattgataattacttctagtaactatcttgttcaattgcctatttctatttttggcttccataccacatggggtgcatttacttttccatttattttcttagcgacagatttaactgttcgtatctatggagcccctctggcaagacgcattattactgccgttatgataccggcattagctatttcctacctaatatcaacactctttttccaaggaagttggcaaggttttgcctcactcaatgattttaatatcatggtggcaagaatagcgacagcaagctttatggcgtatgtgttagggcaaattatggatgtttctgtctttaatcgtttaagacagcaacaaaaatggtgggttgcaccaagtgcagcgatgttttttggtaatttcttagatactgttgccttcttttttattgccttttatcgcagtacagatgcgtttatggcggccaattgggtcgaaatagcgctcgtggattacacttttaaattgacgatttgtatgctgtttttcttaccggcctatggcgtattattgaactttattttgcgctatttttttgcacaagaaaatcaacaacaaagctatgctcaaatccgtccttag

SEQ ID NO: 294611 - DNA, 1104 bp, Proteus mirabilis
atgttaaaagttattcaatccccagcgaagtatatccaagggcctgatgcgttatatcatattgggaaatatacaaaacctttgggtgagagagcattgattatcgctgataagtttgtcatggatctggctggcagcatcgtcaaagacagcatgacacagtatgaagtcaatggacactttgaacagtttcacggtgaatgtacacataaagagattgaccgcttagttgagatagccaaacaacaagccgctcttgttatcattggtgttgggggaggaaaaacccttgataccgccaaagccgtcgcctataaatgccagttacctgtggtgatctctcctactatcgcatcaaccgatgcccctactagcgcactttctgttatttatacagaattaggcgcatttgatagctatcttttctacccgaaaaatcctgatatcgttgttatggataccaatgtgattgcttcagcaccaccacgtttattagtggcagggatgggagatgccttagcgacctattttgaagcaagagcctgtagtcgagcacaaaagcaaacaatggctggaggtaaaaccacccttgcagcactggcattagcagagctttgttatcacaccctacttgaagatggctataaagccaaactggccgtcagccgtagtgtgtgtactactgcggttgaaaatattatcgaagcaaatacctttttaagcggtattggttttgaaagtgccggattagccgccgcacatgcaatacataatggtttcactgcattagaagagtgccatgcaatgtatcacggtgaaaaagtcgcctttggtactttagttcaactagtgctagaaaatagcccgttagaagagatcgaagaagtactcgatttctgtgttcaagttggcttacctgttaccttagaagaattaggcgtacatgctacaggtgatgaattaaatgaaaaaatcatggctgtcgcggaattaagctgtgcagaaggtgaaacaatttacaatatgccatttgatgttgattccgataaagtgtttgcggcgattatggcagcagaccaattagggcgtgagtggttatattaa

SEQ ID NO: 294612 - DNA, 1194 bp, Proteus mirabilis
atgagtttacaagataccagttttgaaagttgcattaaatgtacagtttgtacaacctattgtcctgtggcaaaggtcaatccactctatcctgggcctaaacaagcaggccctgatggtgagcgtttacgcttaaaagatcccatgctttatgatgaagcactgaaatactgtactaactgtaaacgttgtgaagtggcatgtccttcagatgtaaaaataggggatatcatttcccgtgctaaacttaactacaatcctaaaacacctaaaattcgtgatgctattttaagtcatactgatttaatgggaacgctctctacgccaatggcgccgattgttaacactattaccggattaaaaccagtacgtaaaatcttggataaagcgcttaaaatcgaccatcgtcgtgaattacccaaatactcttttggtacatttagaacatggatgaaaaaacaggttgaagagcaagcacgctttaaagatcaggttgcgtttttccacggttgctatgctaactacaatcaccctcaattagggaaagatttagttaaagtattcaataaaatggatattggtgttcaactattaaaacgtgaaaaatgttgtggtgttgcattaattgccaacggctttgtgaaacaagcgaaaaaacaagccaccgtaaaccttgaatctctgacagaaaaaattgtggagaacaatattccggttgttgctacatcttctacttgtactttcactattcgtgatgaatatgaacatattctagatattgatacctcaaaagtacgggaaaatatagaattagcaacacgttatatttatcggttattggaagaagggcgcgaattaccattaaaacataccccattaaaagtggtttatcataccccttgccatatggaaaaaatggggtgggcggcttactccattgatttaatcaaacgtattcctggggtagaagtgattgtattagattcacaatgttgtggtattgccggtacttatggttttaaatcggaaaactacgatgttgcgcaaggcattggggcgggattattccgtcaaattgaagagagtggttgtgatttagtcattacagattgcgaaacctgtaaatggcaaatagaaatgtcaacaaccaaaaaatgtgaacacccaattagcttattagctcgggcattgtag

SEQ ID NO: 294613 - DNA, 1308 bp, Proteus mirabilis
atgaaatttgacgttatcattataggaagcggattagcgggattgactgcggggatccgccttgctgaagcgggcaaatcttgcgccattatcagtaatgggcaaagtgcgttacatttttcatctggatcactggatttattaacgcatcttcctgatggcacgccagtttctcatccgaaacaagcgttatcaacactggcacaacaagcaccagagcacccatatagtcgtattggtgaagcaaatgtcactcaattgatagagcaagcgcaaacgctgttatcaacaacgagaaatttagactataaaggtaacggtgatgaaaaccattaccgtattaccccggttggacgttctcgcatgagttggatgagcccacagcgcgtgccgacttatagcgttaatcaaccattcccatggaaaaaaatagcggtggtggggattgagggattcttggattttcaacctcagtttgcaagtagtactttaaatgaacaaggtattgaggccattccttatcacattcatttacctttattggatagactacgtgataatccaagtgaatttagagcaattaatattgcgcgctatttagataagcctgaaaacacgcaagcattagcagaagaattaattaaacacatagataatagtgttgaggcgattgtactacctgcatgtatcgggctagatgaagaagcgccagttaatttattacaagagtgtgtgggtaaaccaatttgtctattaccgacattaccgccttcattattaggtattcgcctacatcaggcactaaaactgcgttttcaacaagcaggtggtttgatcatgccgggtgatcgcgcagaagaagccgatttagttggtaataaggttgtcggtattcatacccgtaatcatactgatatccctatccgtagcgagcatgtcgtattagccacaggcagttttttcaataatggcttaattgcggaatttgatcgtatttacgagccattaatggaattagatttgttagaaagcttaccgcgtaatgagtggacacaagtcaatgtgtttgccaaacagccttatatgcgatttggtgttaatacagatagtcaattaagaccgttaaaatatggtgaagcgttagacaatgtctatgcggtgggggcgcttttaggtggttttgatcctctaaatgaaggctgtggtgcaggtgtctccatgataagtgcactctatgcagctcaacaaatattacagagtgataaatcgcagcacaccacatctgcggctgtggaggcaatactatga

SEQ ID NO: 294614 - DNA, 1659 bp, Proteus mirabilis
atgatgagcggttcaccagtgacagaaacagatgtcattattatcggcggtggagctacgggggcaggcatggcaagagactgtgctcgtcgtggattacgctgtatcctactggaaagacacgatatcgcaaccggtgcaaccggtcgaaaccatggtttattacatagtggcgcacgctatgcagtgaccgatccggaatcagcgcgtgagtgtatagaagaaaacatgatcttaaaacgggtcgctcgtcattgtgttgaaaaaacggatggcctttttattactctccctgaagattcgttagaattccaacaaacctttattcaatcttgccaagcggcaggtattgatgctcaagccatttcacctgaagaagctattcgcttagagccttcggtgaatcctaatcttattggtgcggttaaagtacctgatggtacggttgatcctttccgcttaacggcggccaatatgttagatgcacgtgaacatggcgcgcaagtactcacttatcatgaagtgatgggcttgatccgtgaaggcgaccgtgtgaaaggtgtacgtgtttatgatcatcaatctaaaaatatgtatgagatccgcgcacaaatagtggccaatgccggaggaatatggggacaaaaaattgcagaatatggtgatttaaaagtccgcatgttcccagcaaaaggggcattactgattttaggacaccgtattaataatatggtgatcaaccgctgtcgtaagcctgcggatgccgatattttagtgcctggcgataccatctcattaataggaaccacctcaactcgcgttccttatgatgaaatcgacaatatgtatgtcacccctgaagaggttgatatcctgatccgtgaaggttcaatgctggcacctaaactggctcaaactcgtattttacgtgcttatgctggtgtacgtcctttagtggctagcgacgatgatccttctggtcgtaatgtgagccgcggtattgtattacttgaccatgcacaacgggatggactcgagggctttatcaccataaccggtggtaaattaatgacttaccgattaatggctgaatgggccacaaacaagatctgtgagaaattaaatatttcagcaaaatgtaccacggctgaagagccactgcctggctctcgccaatcagcagagcaagcattgcgtagtgtggtgtcgttaccggcgccaattcgaggctcagcggtttatcgtcatggcgatttagccaataaactattgagtaatgagcgtattgataaaagcttagtgtgtgaatgtgaagcggtcacggccggtgaagttcgttatgcagtgaattctttaaccgtgaataatttgcttgatttacgccgtcgtactcgtgtgggaatgggaacttgccaaggtgagttatgtgcttgtcgcgcagcaggattattaaatcgtttacaagtcacaacgcctcatggctccgaacaacaacttgctcatttcctaaatgaacgttggaaaggtattcgtcctatcgcatggggtaatgcgttacgtgaaagtgagtttaccagttgggtgtaccaaggtttatgtggcttagatgccgatatgattgataaaacagcttcagtggaggccgatgatgaaatttga

SEQ ID NO: 294615 - DNA, 1353 bp, Proteus mirabilis
atgttaagtctgtttagacctgcgccgcataaagcgcgtctgccaaaggaacagatagatcctgtctatcgccgtttacgttggcaaatctttatggggattttctttggttacgctgcttattatttagtaaggaaaaacttcgctttagcaatgccttacctcgttgaagagggattctctaaaggggatctgggttttgctttatcagggatctcgattgcttacggtttctctaagtttatcatggggtcattctctgaccgtgctaacccgcgttacttcttacccgcaggtcttattcttgcatccattgtgatgttaattatgggctttgtgccatgggcaacttcgagcattatgatcatgttcgtgctgttgttcctgtgtggttggttccaaggtatgggttggcctccttgtggacgtaccatggttcactggtggtcacaaaaagagcgtggcggtatcgtctctatttggaactgtgctcataacgtcggtggtggtttaccgccattgctgttcctgttaggtatggcatggtttaacgactggaaagcagcattatatatgccagcattcgcggctattttagtcgcgatgattgcgtttgcattaatgcgcgatacaccacaatcttgtggtctacctcctatcgaagaatataaaaacgattatccacctgattataaagaaacagacgaacaagaactgacagcaaaagaaatctttatgaagtatgttttccctaacaaacttctgtggatgattgcaattgctaacgtatttgtttacttacttcgttacggcgtattggactggtctccaacttatcttcgcgaagtcaaagatttcgccatggataaatcctcatgggcatacttcttatatgaatacgcaggtattccgggcacactgctgtgtggttggatgtcagataaagtgttcaaaggtaaccgtggtgcaactggggtattctttatgaccttagtaaccattgccactatcgtattctggatgaacccagcaggtaacccgaacattgatatggcatgtatgttaatcattggtttcttaatctatggtcctgttatgctaattggtctgcacgcccttgaattagcgccgaaaaaagctgcgggtaccgctgcgggcttcaccggtctgttcggttacttagggggttctgttgcggcaagtgctatcgtaggttataccgttgactacttcggttgggacggtggctttatggtcatgatcggcggtagtgcattatctgttgtgttattacttatcgtgatgataagtgaaaccaaacacaaacgtgaaatgtcacagaagtatgaataa

SEQ ID NO: 294616 - DNA, 1080 bp, Proteus mirabilis
atgagtacacctttcaaactgaaaccgttagtggcgggcgttcttttaactctatctttaagtacaatcgcacaagcagcaagcgataaagtagtgattgcccatcgtggtgccagcggttatttacctgaacacaccttacctgccaaagcactcgcctatgcacaaggtgccgattatctagaacaagatctggtgatgacaaaagataaccaactggttgtcttgcatgatcactatctcgatcgtgtcaccgatgttgctgaacgctatccagacagagcaagaaaagatggccgttactatgctatcgattttactcttgatgagatcaaaggactaaaatttaccgaaggtttcgatattgttaacggtaaaaaagtccaaagttatccaaatcgtttcccaatgggaaaatccgattttcgaatccacactttccaagaagaaattgagtttatccaaggcttaaacaaatcaacaggacaagatattggtatttatcctgagatcaaagcaccttggtttcatgaacaagaagggaaagacattactaaaaaagttctcgaagtcttaaaacagtatggctatacccaaaagagcgataatgtttatctacaatcctttgatcctaacgatctaaaacgcattaaaacagaattgatgccacaaatggggatggatttaaaactggttcagttaatcgcttacaccgattggaatgagacatatgaaaaacaaccagatggcacatggacaaactacagttatgactggatgtttaaacctggcgccatgaaagaaattgcgacttatgctgatggcattggccctgattatcatatgttagtagaagaagactcgacaccagataaaatcaccttaaccggtatggccgccgatgctcatgccaacaagttaaccattcatccatttacggtacgagtggataaactacctaaatatgccaaagatggcgatcagctttatgacattatttataaccaagcgggtgccgaaggggtatttactgatttccctgatttaggggttaagttcttacaaaaacaagctaaataa

SEQ ID NO: 294617 - DNA, 978 bp, Proteus mirabilis
atgagtgaaatcgcggattggcagccaagcgcctcaatcgccaacttactgaaaaaggcgaaaattgtcagtaatattaggcgttttttcgctgatcgtggtgttttagaagttgaaacaccgatgatgagtcaggctaccgttaccgatattcatctatgcccatttgaaacccaatttgtggggcctggtgcttctcaagggctaaagttatatttaatgaccagtcctgaataccatatgaagcgtctattagcggcgaacagtgggccaatttatcaaatggggcgttgcttccgtaacgaggaagccggtagatatcataatccggaatttacgatgcttgaatggtatcgaccttgttttgatatgtaccggttgatgaatgaagtcgatgatttattacaagaagtgcttgattgtgaagcgtctgaatcgctctcatatcaacaagcctttttgcgctatctcgatatcgaccctttatctgcagataaagaaaagttacgtgaggttgcggcaaagcttgatttatcaaatattgctgacacagaagaaaatagagatacgctactgcaattactttttgtgtcaggtgtagagcctcatattggtcttgaaaaaccaacctttatctatcattttcctgcttcacaagcttcccttgctgaaattagctcagaagatcatcgtgttgcagagcgatttgaggtctattttaaaggtgttgagttagcaaatggttttcgtgaattaacggatgctaaagagcaacgtcttcgttttgaacgtgataatcgtcaacgtgttgccatgggattacctgaacaacctattgatgagcgttttttagctgcgcttgaagctggattacctgaatgttcaggggttgctttaggcgttgatcgcctgattatgctcgcactcggtgttgagcgcattagtgatgtgattgctttccctgtttatagagcataa

SEQ ID NO: 294618 - DNA, 1797 bp, Proteus mirabilis
gtgcaaacctttaatgccgatatagcgataatcggagccgggggcgcaggcttacgagcagcaattgctgcagcggaagcaaatcctcaactgaaaattgctctgatctcaaaagtttaccctatgcgtagccacactgtggcagcagaaggcggatcagcagcagtgactcaggctcacgactcctacgactttcacttcaatgataccgtttctggtggtgactggttgtgtgagcaggatgtcgttgattacttcgttgagcattgtccaacagagatgactcaactagaactctggggctgtccttggagccgtaaagaagacgggtcagtcaacgtccgacgttttggtgggatgaaaatcgaacggacttggttcgccgccgataaaaccggcttccacatgttacacaccctgttccaaacctctttaaaataccctcaaattcaacgtttcgatgaacatttcgttctcgatatccttgttgatgaaggccacgctcgtggtgttgttgctattaatatgatggaagggacgaaagttcaaattcgtgctaatgctgtcattatggcaacaggtggcgcaggtcgcgtttatcgctttaatactaatggcggtatcgttacaggtgatggtatggggatagccttacgtcatggcgtgccactgcgtgatatggaatttgtgcaatatcacccaactggtttaccgggctcaggtattctgatgaccgaaggttgccgtggtgaagggggtattctggtcaataaagatggttaccgttatctacaagattatggcctaggaccagaaacaccattaggtaaacccgaaaataaatatatggaattaggtcctcgcgataaagtttctcaagcattctggcatgagtggcgcgcgggtcgtaccattaaaactcaccgtggtgatgttgtgcatcttgatttacgtcatctgggtgcgaaaaaacttcatgaacgtttaccattcatttgtgaactggcaaaagcgtatgtgggtgttgatccagttaatgaacctattccagttcgtccaactgcacactacaccatgggtggtatcgagactaatcagcgcacagaaacacgtattaaaggtctgtttgcggtgggtgagtgttcatctgtcggcttacatggcgctaaccgtttaggttctaactcactggctgaacttgtagtatttggtcgtcttgctggggaagaagccgttcgtcgtgcccaagaagcaacccctgctaacgcatcagcattagatgcacaaactcgtgacatcgaagacaatttgaaaaaactgatgaaccaaaaaggttctgaaaattgggctcagatccgcgatgaaatgggtgaagccatggaagaaggttgcggtatctatcgtacacctgaattaatgcaaaaaaccattgataaactgactgaactaaaagaacgttttaaacacgtagaaattaaagataccagtagcgtctttaatactgatttactgtataaaattgagcttggctttggtttagatgtcgctgaatgtatggcgcattctgcattcaatcgtaaagagtctcgtggtgcacaccaacgtcttgacgaaggttgtactgagcgtgatgacgtgaacttccttaaacacactctggcattctataacccagaaggtgcaccgcgtttagaatatagcgatgtgaagatcaccaaatctgctcctgctaaacgtgtctatggtggtgaagcgactgcacaagacaagcagaataaggagaaagcgaatggctga

SEQ ID NO: 294619 - DNA, 738 bp, Proteus mirabilis
atggctgatgacatgaagcacgttaagatggaagtcatgcgctataaccccgaaacggatgatgcgcctcatttcgtcacttatgatgtgccttacgatgagcaaacctcattattggatgcattgggttatattaaagataacttagcgccagatctgtcttaccgttggtcttgccgtatggcgatttgtggctcttgcggcatgatggttaaccgagtcccaaaactggcttgtaaaacctttatgcgtgattacccaaatggggtgagaatcgaagcgttaggtaacttccctgtcgagcgcgaccttgtcgtcgatatgactcactttattgaaagcttagaagcgattaaaccttacattttaggaaatgatcgcaagccttcagaaggtccaaataaacagactcctgctcaaatggcgaaataccaccaattctctggttgtatcaactgtggtttatgctatgcagcatgtcctcagtttggtttaaatcctgagtttattggtcctgcagcgattacgttagcacaacgttacaataccgatagccgtgaccacggggctaaagagcgtatgcctcaattaaatggtgaaaatggcgtctggtcttgtactttcgtgggctactgctctgaagtctgtccaaaacatgtggatcctgctgcggctattcagcagggtaaagcagccagtgcgcaagactttgtcattgccatgctgaaaccacgttaa

SEQ ID NO: 294620 - DNA, 396 bp, Proteus mirabilis
atgacaacaaaacgtaagccttatgttcgtggtatgcagccaaactggtggacgaaactcggtttctatcgtttctacatcacccgtgaaggaacttgtctaccacaactttggttcagtctggttgtactgttcggtgtatttgcactgaaaaatggaccagaaagttgggcgggattcgttggattcctaagtaacccaatagtgatgctgattaatattgtgacccttatcgcaacggtattccatacggccacttggtttaagcttgcaccgaaagccgttaatatcgtcgttaaagatgaaaaattaccacaagagcctatcgttcgtggtttatggggtctaaccatcgtcgtgactgtcgttattctggcagtggcgctaattgtttaa

SEQ ID NO: 294621 - DNA, 360 bp, Proteus mirabilis
atgaatcagaatcaacttcctaagcgctctgatgaacctattttctggggattatttggtgcaggtggtatgtggagtgcgattgtctctccagcaattattatcctgctcggtattctaatcccgatgggtattgcgccagaagcatttacttacgatcgtatcatggcatttagccaaggttttattggtcgtattttcttactgctaatgattattctgccagtttggtgtgcattacaccgtattcaccatacgttgcacgattttaaagtgcatgtacctgctagtaattgggtattttatggtgctgcagcaattattagtgttatcgcaattattggtgtttttacactataa

SEQ ID NO: 294622 - DNA, 315 bp, Proteus mirabilis
atgtcttggataattctctttgtcgctggcctattagaaattgtgtgggcggttggtcttaaatacactcatggttttacccgtttaacaccaagtattattacgatcagtgcgatgatcgtgagtatggggatgttatcgtatgcgatgaaaggcttacctgcgggtacggcttacgccatttggaccggtattggtgccgttggtacggctatctttggtattatcgtttttggtgaatccgccaatatttatcgtttattgagtttagcgatgattgttttcggtattattggtttgaaattggcgagttaa

SEQ ID NO: 294623 - DNA, 291 bp, Proteus mirabilis
atgtgccttggtattccaggtcaagttgttgaagtgggaaaaaccatcactgaaaatgcattggtcgatgtttgtggtgttaagcgtgaagtgaatatcgcattagtttgtgaaggcgagcctgatacgatgattggcaagtgggtattagtgcatgtaggttttgccatgagtatcgttaacgaacaagaagcacaagaaacccttaacgcattgatggcgatgggggaagtcgaagacgatgtgagtgcttttctctatggtgaggaaagtacagctaaacgtgcttga

SEQ ID NO: 294624 - DNA, 342 bp, Proteus mirabilis
atgcatgaaatcacgctttgccagagcgcatttgagataattgactcacaagctaaattaaataatgcgcaaaaagtaaaaagcgtttggatggagatcagcgcactatcttgtgttgaagtctctgcacttgagttttgctttgatattgtttgtcgagatactatcgcacaaggttgccagctacatattgaggttatcccagctaaagcatggtgttgggattgccatcaagtggtgactgtttcgacttttaatgcaggttgtcctgcttgtggtagtcaaaatttgcgggttgagaatgacgatgcaatgcgcataaaacaaatagagatcgaatag

SEQ ID NO: 294625 - DNA, 558 bp, Proteus mirabilis
atgaaccgtttcatcattgcagaccctaaaaagtgtattggttgccatacctgtgaagtagcatgtgttgtttcacatcagcaagcttcccaagataatttagcaatcgaccaaattagtgagcaaaatttccaaccacgcattcatgtggtgaaaggcttttcaattagtaccgcagttgtctgccatcaatgtgaagatgctccttgtgccaatgtctgtcctaatggtgccattattcataataaagattattactatgtcgatcaggataaatgcattggttgtaaaacctgtgtcttggcttgtccttatggcactatggaagtggtttctcgtccagttatgcgtaaattaaccgctctcaatacgattgaagcatttaaagctgaagccaataaatgtgatttatgtcatcaccgtgctgaaggtcctgcttgtgttgaggtctgcccaacacaggcattagtctgtattgatagagatgcacttgaagatatggttaaagagcgtcgtcgtaaagcggcttttgaaacaggcgctgatttattgttctaa

SEQ ID NO: 294626 - DNA, 1614 bp, Proteus mirabilis
atgaaattaagcagtaacaatgctgaaactatggagagccttcgcagtgagcggaatcaatatcgtatacttgtcgatattacaaattctgtattagcgcatctagacatggatggcctcatttctgaagtatctaaagaaatacatcgttttttcggacttaatcatattagtctgatgttatgtcgtacttcatcacaaaatagtcatgaaggtattctttattctagtcgttatcagacaggaaaatctgtcattcgtcaacaacgtaagttcagtagcgccaataacaaagccgaagaaattattcatcaaaacaaacccgttttaatcgatatcaataaagaagatcaagacgatgttttgattaaacgtctcgtaaaacaaaatatgcagacggctttgttattgccactggcttttaaccgtaaaccgctaggtttattaatcctagcgcatgaaataagtagtgtttttactgaagaaacttgtcaattattgcaacaaattgccgcgcgcatcgggattgcaattgaaaatgccgccgcttatgaagagataactcaccttaaagatagccttaagaacgaaaatatttggcttaatgaacaaataaatagaaatggtagttttagcgagattatttatcaaagcgatgccatgcataatgtactagaacaaattgagttagtcgctcaaagtgacagtactgtacttatcttaggcgaaacaggtactggtaaagagttaattgcacgagcgatccatcgtttaagtcatcgtaaaaataagacgatgataaaaatgaattgtgcagcagtaccttccggtctgttagaaagtgatctttttggacatgataaaggcgcttttacgggtgcaacacatgcccatgtgggtcgatttgaaatggcagataaaagtacgctttttctcgatgaaattggcgatatgcccattgaattacagccaaaactattacgggttctccaagagcgtgaaattgaaagattaggtggtaataaagttattcctgtggatgtacgcttaattgcagcgaccaataaagatttatgtgaactgacggatgaaggggaatttcgagaagatctctattatcgtctgaatgtttttcctattattatcccgccattacgggagcgacctgaagatatccccttattggcaaaatattttacgcaaaaaattgcccgccgcatggatagaaaaatagactgtattccaacacatgctttggagcaattaacccattatccttggccgggaaatgtacgagagcttgaaaatattattgagcgcgcggttattttaactcgaggctctacgctaaatttgcaactaaaagagttaaatatcaataaaccatctcgtttaaaacaagtgctttcgcaaccatcagccatagaaaaaaagatgcaaactagcgcacctgaaagtgatgatgaagagcgtgagcggataatacaagcccttagagaaactaacggtgtagtggctggtgccagaggtgcggcattaaaattaggattaaaaagaaccaccttattatcacgtatgcaacgcttaggtatttccatccctgaaattctttag

SEQ ID NO: 294627 - DNA, 888 bp, Proteus mirabilis
atgaatgacctgcttacaaataaaattaataaaataaaagaagaatataaaaataataaatatgtttttattccacaaaaaatagttattgatttaataaaacaattaggtgcaacagagaaagatatagatacactcatagaatatggtgattatctcgcgcaagatcctacattgtcgtttcgtcactctcgcaccggacgctaccttttcgataatgaggctaaaaccatttcacgactagagtatcaaccttttgtcctcactgaagaagatggctttattcgtgaagatagcggtgcacaaagacactttcgagcaattgacgatcgctggcaaagcaataccgcttaccaagcattattaaaattgaaaatgctcctgattgaaggaaatcgatttacaccacgccgcttaaccgatcaacaatcccctaaatcaatttcaacggtatttcatttaagactcattgctgaacctaattcgttaagtgagctttctattgaaggggtgcataaagatggtgttgatcacaccatgattgtcatgatgaataaaaataatgtaaaaaataattccggcgcattacgtgttcattctcatcaagaagcaataggtacaccttggcaagatattaatcctaataatgttctctatgagcataataatgcccaatatctggatatattgttaattgcggataatgagttaaatcatagtggtacacctatttttacgcatgacaataaccactttgcttatcaggattttattgttttattatcccgttatccaaccgtagatactcatccatcacatcagtttgattcaacccaattacatcccgatttaccactaacgttacatttaaataagcaagtagcctaa

SEQ ID NO: 294628 - DNA, 1677 bp, Proteus mirabilis
atgagcaactcaatcgttgagattgaggataccaaatgtctatttgtcttcggttataatgccgcagactcgcatcctattgtcgctcgccgtattgtgaaggcgaaagaaaagggtgccaaaattattgtatgtgatccacgctatatcgaaacagctcgcttggctgatttacacttagcattgaaaaatggttctaatattgcactgctaaatgctattgccaatgtgatcatagaggaaaaattatacgataaatcctttattgaaaatcataccgagcaatttgatgagtattgccaattagtcgcaagttacacccctgagtcggtagaaaaaacaacggggttaagtgcacaaattatccgtgaagccgcgcgtatgtatgccaaagcggaaacggcgacaatcttgtggggaatgggggtaacacagttctatcaaggggttgaaaccgttcgttcactcactagcttagcattattaaccggtaatcttggtaagaaatatgttggggtaggtcctgttcgtggtcaaaataacgtacagggtgcttgcgatatgggagcactacctaatacgctaccaggctatcagtatgttactgatgcgaaagcgcgtgaaaaatttgccaaagcttggggcattgaatcgatgcctgaagaagtgggctatgcgcttagtgaagtacctcataatatcgaccatggtttaattaaagcacactatgtgatgggggaagatccactacaaactgagccagatttagccactattcgtagaacctttgaaaaactcgatttactgatagtacaagatatctttatgaccaaaacagcatcgattgctgatgttgttttccctgccacatcatggggtgaacatgaaggggtgtacacatcagcagaccgtggattccagcgtttctataaagcggtagagcctgttggtgatgttaaaacagactggcaaataatcagcttaatggcaacagcaatgggttatccaatgcattacaacaacaccaaagaaatttgggatgagttgcgtgagttatgcccgatttattatggtgcaacttacgaaaaaatggctgatttggcgtatattcaatggccttgcccaacagaagatagcccaggtacacaatatctttatgaaggcggtaagttcgatactcctaatggtaaaggtcaattctatacttgtgagtgggcgccacctattgatcaactctctgatgagttcccaatggtattggcaacggttcgtgaagttggacattactcttgtcgttcaatgacaggtaactgtaaagcattagctgcattggctgatgaacccggttatgttcaattaaacactgaagatgccaaacaattaggaattaaagatcaagagttggtttggatacgctctcgacaaggtaaggttattactcgtgctgcggtcagtgatagaccaaataaaggtgcggtatatatgacttaccaatggtggattggggcttgtaacgaactagttgcagaaaacttaagtccaataaccaaaacacctgagtataaatattgtgcggtttgtgttgagtcaattaaagatcaagctcaagctgagcactatgtaaaaacagaatataacaatattaaacgtcgtttaagagaagccgctgaaggctaa

SEQ ID NO: 294629 - DNA, 420 bp, Proteus mirabilis
atgaaaaaagtcatcacggtctgtccgtattgcgcctcaggatgcaaaatctacctgaaggtggaaaacggtaaaatcattggcgctgaaggagccaatggtttaacaaaccaaggtgagctgtgtctgaaagggtattatggatgggattttatccatgatactaagatactgactccacgccttaaaacacctatgatccgccgtgaaagaggtggaaaattagaagcggtttcttgggatgaagctattgagtttgcgagtagcaaactacttgctatcaaagagaaatatggcgctaaagctattatgacaaccggttcatcacgaggacctggtaatgaagctaacttcgttatgcagaaatttgctcgtgcggttatcggaaataataatatagactgctgtgctcgtgtctga

SEQ ID NO: 294630 - DNA, 1692 bp, Proteus mirabilis
atgcaaaaattaaagtttttacgattttcaaaagaaaaagtttctctttttttagctgtctatattggtttatttcttaatctttccgtttacattggccgttatggcacacagaattctcacaactccctcattgaaagtttatatatactgggtgaagttgcagtaaacattgcctttactttcttcttattacgacttatttctttttgtggcacactattttttaaaatagtcgcttcttttattctgctcattagtgtttgtgctagttactatatctctttctttgatgtagttattggctatggcattattatttctacgctcaccacagatatcgatttatcaaaagagctgattagccctaatgtgattatttggattatagggttatctattttacccctagcgctaacttggttatgtaagaaaccagaaaaaaatataactaaacagcaaaagaaaaaaatctggatcaaaaatacggtcaaaatgctcgtaattgctcttgcggtatttgcctatctaaaaaccttagattcgaaacaaaaagcctatgaaatcaagaataacttagatttgccaagctacagtggtggtttaagttacgcctatttaccgaccaactggattattcctttatttcaatatgcgataacacagtacgacgaccactttaatagccagaatatctttgatcccgcggataactttacctatataccgtcaaaagccaatgaagatgtctatgtggtctttattattggcgagacagcaaggtgggatcatatggggctattcggttatgaaagacaaaccaatcccttattaagccaagaaaaaaatctgattgctctgaaaggtatctcttgcgatacagcaacaaaactttcgctaaaatgtatgtttgtgcgtgaaaatggtacagaaaataacgatcagcgaacgttaaaagagaacaatattttctcagtattacatcagctaggaatgacatcagaactcttttcaatgcaaagtgagctttggttttacaataagcttgatttagataactatgccatgaaagagatgatgaccgccaaaaatagtaattttggcaaagaattagatgatacgttgcttattaacgaagtcgcagattccgttgctcactattctaaaggtaaccacttagtgattttacacactaaaggttcacactttatgtactcacaacgttacccgaacgcatttaaaaaataccaacctgaatgcttaaacgttgacgatgagtgcaccaaagagcagctaatcaatgcttatgataactctattctttatactgattactttattgatggtgtacttaataccctgcgtgataaaaaagccattgtgttttatacctcagatcacggcgagtcaatttcagaaaaaggtggcttacacggcacaccaaaagaaattgcaccaccagaacaatttaaagtgcctttcttagtgtggatgtcagatagctatttagctgagcctgaaaataaacagttatttgataatctcaaacgaaatcaagataataaccggactttctatcatcataatatttttgactcgatattaggctgtctaggttactcatcacctgatggggggattaataatcaaaataatctctgttttggtgacatagctagcgaagcacattaa

SEQ ID NO: 294631 - DNA, 1194 bp, Proteus mirabilis
atgaaacatacattgttaaaaacgactgcaattgctatggcattaagtgtgggagttgtgcaagcgactgaatataaagcgagtaccgcagaacatccaatcaaaatagttaatttagatgctcttgaaaatcaagtaaaagaaaatatggataaaggcgctttcggttatattcgtggtggtgctgaagacgaaaataacttgcgttctaatacaaatgcatttaataaaaaatatattatgcctcgtgcattacaagggattgaattttccgatctgaatttaaaaacagaatttttagggattaaattagatacgcctattattcaggcaccgatggcagcccaagggcttgctcatcaacaaggcgaagttgccacagcaaaaggtatggcgaaagcgggctctattttctcattaagtacttatggtaataaaaccattaaagaagtcgcgcaagcacaaccgggttatccgttcttttttcagctatatatgagtaaaaacgacgcgtttaatcagtatattttatcgcaagcaaaacagtatggcgcgaaaggtattattttaacggttgattctcctgtggggggatatcgtgaagatgatattaaaaatagttttcaattcccattaggttttgccaatttggaagcattcgccaaaatcagtgatgataaatcaaaaacaggtaaaggttcgggtattagtgagatctatgctcaagctaaacaagcatttactcctgcggatattcaatatgtgaaaaagatgtcaggtttaccagtcattgtgaaaggtattgaatcacctgaagatgccgatactgcaattaaagcgggtgctgatgcgatttgggtgtctaatcatggtggtcgtcagttagatagtgcacctgcaaccattgatgtattgccagccattgccaaagtcgtgaacaaacgtgttcctatcgttttcgatagtggtgttcgtcgtggctcacatgtctttaaagcgctagcgagtggtgcagatgttgttgctgtagggcgtccaattctttatggattaaatttaggcggtgctgaaggtgtaaattcagttatcgagcaattaaataaagagttaagaattaatatgatgttaggtggtgcaagaaacgtcaaagaaattcaagcaacacacctgtatacagatgctgactttaaataa

SEQ ID NO: 294632 - DNA, 678 bp, Proteus mirabilis
atgaattacgttaatatgttgttttttgatatctacccctatattgctggtgctgtttttcttatcggtagttggttacgttatgattatggtcaatatacatggcgtgcaggctccagtcagatgttagacaagaaaaacatgcgacttgcttcgaacttattccatattggtattatcggcatttttgcaggtcattttctggggatgttaacgccacactggatgtatcaatcttttctaccaattgaatataaacaaattatggcgatggttggtggtggtacttgtggtgtattaatgctgattggcggcattatgctgttaaaacgtcgtttgacgaatgcacgagtaagagcaacatcgtcatttggtgacatcatgatcttaaccttgctggttgtccaagttgcactcggcttattgactatcccattctctgcacagcatatggatggtagtgagatgatgaagctggtggcatgggcgcaagctattgtgacattccatggcggtgcttcggcaaatcttgaaggtgttgcacttatttttaaattgcacatattcctaggtatgacgatttttttattgttcccattctgccgtttagttcatatttggagcgtgccaattgagtatctaacgcgccgttaccaaattgttcgtaatcgacactaa

SEQ ID NO: 294633 - DNA, 729 bp, Proteus mirabilis
atgatgatctctttgaaagttatttctctgttattggattatcccagcgaagatctctgggaacatcgtaatgagatcattgatgcattgcaggaagctgacgagcttcctgtcacgcaagtcgcaaaattaatggcgtttattcgtgaactcacgcaacaagatctgctggatgcacaagcgaattacagtgagatttttgatcgaggtagagcgagatcgctattgttatttgaacatgtacatggtgaatcgcgtgatcgtggtcaggcaatggttgatctgcttaatcagtatcaacaagcagggatcaccttaagtagtcgtgaattgcctgattacttacctacttaccttgagtatttaacgctattgcctaccgatgaaagtattgaagggcttaataatattgcccctattttggcattgctgagtgagcgtttaaaacagcgaggcagtgattatcacgctctttttgatgtattgctttgtctctcacaaagtgagttagacgcttcacaactggcggctcaagtagaaaaagagcctgtagatgatacgccagctgcattagatgccgtatgggaagaagagcaagtgacgtttctaggtgaaagtgcgcaatgtggtagtaacaatattagccagcatcagcgacgttttgcgcaagaaacgcctgttcaatatctcaacgtcggtaattcgctggatatgggagcacaaaaatga

SEQ ID NO: 294634 - DNA, 1554 bp, Proteus mirabilis
atgaaaattcgttcacaagtcggtatggtactgaacctcgacaaatgtatcggttgccatacctgttcagtaacctgtaaaaatgtttggaccagtcgtgaaggtgtggaatacgcttggtttaataatgttgaaactaaaccgggtacagggtatccgcaaaattgggaagatcaagagaagtggaaaggcggctggatcaaaaatattaaaggtaagttagtaccaagaatgggtaaccgtgttgggctattatcaaagatttttgccaacccagatgtgccagcattagatgattattatgagccatttgattatgactatgagcatttaaaaaatgcaccagaaggctcattacccaccgcacgtcctcgttcgttgataacaggtcagcgtatgaccaagatcgaaaaaggcccaaactgggaagatgatttagggggcgaatttagcaaacgtgctgcggataaaaacttcgccaatatgcaaaaagagatgtatgggcagtttgaaaatacatttatgatgtatttacctcgtttatgtgaacactgcttaaatcctgcttgtgtcgcgacctgtccaagtggtgcgatttataaacgtgctgaggatggtattgtgcttatcgatcaagataagtgtcgtggttggcgcatgtgtttaacagggtgtccatacaaaaaaatctactttaactggaaaagcggtaagtcagaaaaatgtattttctgttatccgcgcatcgaatcaggtcaaccaaccctatgctcagaaacctgtgttggacgtattcgttatcttggtgtgatgctgtatgacgcagataaaatttcacaagccgccagtgctgataatgaaaaagacttataccaaagtcaattagatatctttttagatcccttcgatcctgaagttattaaagctgcagaagagcaaggtattccattaagtgtgattgatgcagcccaacgttcgccggtttataaaatggcggtggattggaagctggcattaccattacaccctgaatatcgtactttacctatggtgtggtatgtgccacctctgtcacctattcaatctgcggctgatgcaggagtgttgccacatacgggggtattaccggatgtagaaagtttacgtattcctgtccaatatttggctaacttgctgaccgcaggcgatacagcgccagtgttattagcattaaaaagaatgttggcaatgcgccattataaacgcgcagaaacggtagaaggtaaaaccgatttgacagcattagagcaagtgggattaaccgaagcacaggcacaagagatgtatcgctatttggcgattgccaattatgaagatcgctttgttattccttctagccatcgagagttagcaagagaagcttttcctgagcgtaacggctgtggttttagttttggtgatggttgtcatggcagcgagagtaaatttaatctgtttaatagccatcgtattgatgccatcgatatcacttccaaaacccctcaagatgagcgccgttctgaggagaaaatatga

SEQ ID NO: 294635 - DNA, 3762 bp, Proteus mirabilis
atgagtaaatttctcgatagattccgctattttaaacagcttggtgatacgttttcacaagatcacgggcaagagttaaatgttaatcgcgactgggaaaatagttatcgtagccgttggcagcatgacaaaatcgtgcgttctacacatggtgttaactgcaccggatcatgtagctggaaaatttatgttaaaaacggcttagtaacatgggaaacccagcaaacagactatccacgaactcgtcctgatctgcctgatcatgaaccccgtggttgtccgcgtggtgcgagctattcatggtatttatatagcgctaaccgcgttaaatacccaatggtgcgtaaacgtctgatcaaattatggcgtgaagccaaagcgcaacacgctgatccagttgatgcatgggcatcgattgttaatgctcccgaaaaaacgaaaagttataaacaagctcgtggtcgtggtggtttcgttcgctcttcatggtctgaagtgaatgaaattattgctgcttctaacgtctataccgctaaaacttttggcccagatcgtattattggtttctcacctattccggcaatgtcaatggtgtcttacgccgccggtgcccgctatttatctcttattggtggtgcttgcttaagtttttacgattggtattgtgatttaccacctgcctcaccaatgacttggggggagcaaacagatgtgccagagtcagctgactggtataactcttcttatctgattgcatggggttcaaacgtacctcaaacccgtacgccagatgctcacttttttaccgaagttcgttataaaggcaccaaaacggtagcagtaacacctgattatgctgaaattgctaaactgtgtgaccagtggttaaacccaaaacaaggtacagatagcgccatggcaatggcgatgggacacgttattcttaacgaattccacgttaaacgccaaactgaatactttagtaactatgtgcgcacttacactgacatgccaatgttagtgatgttagataagcatgattctggcaaattagttgcgggtcgcatgctacgtgccgctgatttagtgaacaatctcgatcaggagaaaaatccagaatggaaaaccattgctattgatgagaaaacacagcaattggtcgctcctcaaggttcaatgggttttcgttgggaaggcgctgccaaatggaatctagagcctaaagacggtaagagtggcgaagaagtcactttacaattgggtcttttagaaaaccatgatgatgtggttgacgttgcatttccttactttggtggcatcaagagtgaatactttgaaggtgttgcccttgatgatgttctcgttcatagactgccagcaaaacgcattactcttgccaatggcgaagaaaaatatgtcactaccgtttatgacttattactggctaactatggtgtcgatcgtggtttaaatgatgaaaactgtgcgacaaactatgatgagatcaaagcctattcacccgcatgggctgaacaagtaacaggggttagccgtcaagatattatccgcattgcacgtgaatttgctgataatgcagaaaaaacacatggtcgttcaatggtgattgtcggtgcgggcattaaccattggtatcacatggacatgacctaccgtggcattatcaatatgctgatcttctgtggttgtattggccaaagtggtggtggatgggctcactatgtgggacaagaaaaactgcgtccacaaacaggttggttgccattagcttttggtctggattggcagcgtccacctcgtcatatgaatagcacgtcatttttctataatcattcaagtcaatggcgctatgaaacggtatcaccgacagaattactatcacctttagcagataaatcacgctttagcggtagcttaattgatatgaatgtgcgttcggagcgtatggggtggttaccgtcagcaccgcaattaaacgttaacccattgtctattaccaagaaagctcaacaagctggcgtcagtgcaacggattataccattaatgctctgaaatcaggtgagatccgttttgcatcagagcaaccggataatccgcaaaacttccctcgtaacttatttatctggcgttctaatttattgggatctgcaggtaaagggcatgaatatttactgaaatatctattagggacggaaaatggattacaaggtaaagatttaggtgaacaaggccaagttaagccacaagaagtggaatggcaagataaaggcggtgagggtaaggtcgatttagtggtgactttagactttcgtatgtcaagtacctgtctgttctccgatatcgtgttaccaaccgccacatggtatgaaaaagatgatatgaatacctcggatatgcatccatttattcatccattaaccgccgcggtagatcccgcttgggagtctaaaaccgattgggaaatttataaaggtattgctaaaaccttctctaaattgtgtgtcggtcatttaggggttgaaaccgatttagtgacacagccaatacaacatgactccgcggctgaaatggcacaaccatttgatgtcaaagattggaaaaaaggtgaatgtgaccttatcccggggaaaactgcaccgcatcttattcctgtggagcgtgattatccaaatacctatgctcgttttacctcacttgggccgttaatggataaattaggtaatggcggtaaagggatcggttggaatacacagacagaagttgatttcctgaaaaaacttaatcgcgttcgtcatgacggtgtggcaaaagggcgcccggcgattgaaaccgcaattgatgcagccgaagttatcctctctttagcacctgaaacgaatggtcaagtggcggtaaaagcgtgggatgcactaagtaaagtaacaggacgcgatcacactcatttagctaaagtaaaagaagatgagaaaattcgtttccgcgatatcgttgctcaacctcgtaaaatcatttcaagtcctacatggtctggtctggaagatgagcatgtctcttataacgcttgttataccaatgttcacgagatgatcccttggcgtactttaagtggccgtcagcagttatatcaagatcatgagtggatgcgtgcttatggcgaaagtttagtggtttatcgtccacctattgatactaaggcaatcgaagccgtgaaaggtaaaaaaccgaacggcttcccagaaaaagcgctgaacttcctgacgcctcaccaaaaatggggtattcactcaacgtatagcgataacttactgatgttaaccctcggtcgtggtggccctgtggtttggctgagtgaagatgatgctaaagagatgggtattagtgataacgattgggttgaagcatacaacagtaatggtgcgttaaccgcaagagcgattgtgagccaacgtattcctgatggcatgatttatatgtatcacgcacaagagcgccaaataaacctaccaggctctgaaataactggaatgcgtggcggtattcataattccgtgacgcgtgtttgccctaaaccgacccatatgattggtggatacgctcagttggcttatagctttaactactatggaactgtgggctctaaccgcgatgaatttgttgtggtacgtaagatgaaacagattgattggcttgatggtgaaggcgatgcttatcaacaaaccctgaatggacaggagaaggcataa

SEQ ID NO: 294636 - DNA, 1392 bp, Proteus mirabilis
atggcactttctcaacacccagaaaaaatgaaaaaaggggtgatcgaaaattggcatcctgaagataaagctttttgggaaaaaactggtcaaaaaatcgcatcgcgtaatttatggatttctgttccttgtctactgctatccttctgcgtctggatgctatttagtgcagtcgctgtcaatttaaataaggttggctttaattttaccactgatcagctctttatgctgactgctctaccttctgtttcaggtgcgctactacgtgtcccttactcttttgttattcctatttttggtggtcgtcgttggacggctattagtacggtatttctgattattccttgtctctggctagggtttgccgtgcaagatctaacgacatcttattccacttttatcgttatctctctgctgtgtggttttgctggcgcaaacttcgcatcgagtatggcaaatatcagcttcttttttcctaaagcacaccaaggcggtgcattaggattaaatggcggattgggtaacttaggtgtcagcgtgatgcaattaatcgcgcctttggttgtcagtgtgggcgtttttgctatgtttagtggccccggtgtcgttcaacctgatggctcacgtttatggctagagaatgcggcgtggatttgggtacctttcttgcttatctttacctttgcggcttggtttggcatgaatgatctggctgctaataaagcttctttaagtcaacagctacctgttttaaaacgtggtcatctttggttactcagtatcctctatctgtgctcttttggttcttttatcggcttttctgccgggtttgcaatgttatcgaaaacccagttccccgatattgtcattttacattatgccttctttggtcctttacttggagcattagctcgccctgtgggaggtgcgctatctgataaatttggtggcattaaagtgacgcttatcaactttatcattatggctattttctcagtgctcctgttcttaaccctaccggaaaatggtgctggtggatcgtttattgctttctatggcgtgtttatggtgctgtttttaactgcagggctaggcagtggttcaacattccaaatgattgccgtggtatttagaaaaatcactattgatcgcatgaaggcacaaggggcttcagatgaagctgcgcaaaaagaagccgtaacagaaagtgcagctgcattgggttttatctctgcaatcggtgcgattggtggcttctttattcctaaagcctttggtacatcccttgcgatgacgggttcacctgctggggcaatgaaaatcttcgttctgttctatatcgcctgcgttctgatcacttggttggtctatggacgtaaacacaataaataa

SEQ ID NO: 294637 - DNA, 399 bp, Proteus mirabilis
atgaaacaactaaactggacactccagttaccagaaacgataagggcggctatgagtcgccctttttcatggggtgaatttgattgttgtatttttgcctctgaatgtatttacgcacaatgcggtttctctccaataaagccttatctcaatcactataaaaccaaagccgaagccttcaacctgctcaaatctaaatttggctccttagagaaagccgtatcacgctatttcaaatccattgagattgagcgcgttcagcgtggcgaccttgtactgttcaaaggtgaggacggtgacagtttagcggtggtctgggcgaggcattattggggcgtaaccccacaaggcgtgaagccggtgcagattaacccaatcaaagcgtggagagtggaataa

SEQ ID NO: 294638 - DNA, 333 bp, Proteus mirabilis
atgaaattcatctttgcactttgctttgttcttgttttatcaggctgctcaattaaaaaagagattgttcctgttggagggagtaaggctgatggaacaatccgaatggggtatgtggtaggagataaatttggtgcttttgaacgtcctcaagtggatctacagcaagcagaagaattggcagctaaaaaatgcaaaacgtgggggtatgaaggcgctgagccttttggcggtaaaactgaaacttgtactgcatctacagcggtaggctgtactagaatgaatgtattcattgaataccagtgtattggtggtaaagctgctcagaattaa

SEQ ID NO: 294639 - DNA, 582 bp, Proteus mirabilis
atgcaatatcatccattttctgacgccatggtcaacgcgattaatgaaggggcttatatcgttttagcggccagacttgatttgaaatcaggcgtgacctgtgcgcataccggtgttgggcaactgattattgcgggggaaacttatttgggcgtgggcagtttaggcgaaatcagtcagctaaaagaaaataagacaaccagtcctccacaattacagcttaaattagcaggttttgataaatcgttggtgggaatggtgatgaatgagcaaagtcgaggacgcgaagtccggttgatgatggtcgccatcggtgaagagggaaaaccgttgcttgctgaagtcttatttgttggacaaatcacatcgattaatgtggtgtctggcgaagaaaatgccgtatgtgttaatgtttctaatcgattcgagcgatggtcaatcgggttacccgatagattcaccgatgagtcgtggtcatctcgaagacaaggggatcgcatctttcgttatgttgctcaaatggctgaacgggcgatttattggggcagtaagaaagacgcacctgcatttgtttataaataa

SEQ ID NO: 294640 - DNA, 597 bp, Proteus mirabilis
atgtctattcttgaatggccaaaagaggtgatccccacacaggaaaactggcaattattgagtaacagcaaaacctttacctcgccatttaatggaagtagccagacggtacgctttccaggaagtcgttggcgttgtgagctgacatttaataatttaaatgaagagaaatcgcgccagttagaagcgctagtggcttcattggatggcatgtcgggacgggtcaaaatatcaagctggataagaaaagggcgttatgggtatggttcgcctcgtattgcaataccgagtcaattgggggatcggctagaaacaaaggactggaagcgcaatatgcgcgtgttacagcaaggggatcgcttaactgtgggcaatgaactcaaaatggtggtggcggatgtggtcagtgataatcaggggcgtgccattattcttatttcgccgatgttaagaacgtcacctgctgtcaatgaaatgctcgaggttgagcgtccttttggggtttttcggctcgttgataatgaacagggtaaatttcagcatcgtcgcttggggtatacccatatcacgttatcttttgaggaggtgttgtactaa

SEQ ID NO: 294641 - DNA, 3252 bp, Proteus mirabilis
atggctggcgcattaggtagattaaatattgatttgacgctaaatacggcaaatttcacaaatgcgatcaaccgtagccagcgccaaacagaacaatttgggcaaagtattcgcgtcagccttcaagctatcaccgtgcaacaagagcgaatggtatcgcaaaccgcaaaatcctcggcgctttttgcccgttttgcgagtgtcatcgcaagtgcattatccattcatcaagtcattaattatgctgatagttggacggaattacagaaccgcttaaaactggtgacagaaagctccgttgagttaaataaagccacacaagcggtctatgatattgcccaaaaaacctatcaatcattggatgccacagcacaggtttatcaacgttttgcggataatgccgatcgtttaggcttaagtcagcaaaaagtcgctgaactcacggaaaccgtctcaaaagccgtggcgatttcaggcgcgagtgcaaccgcagcccaagcggcattaactcaatttggtcaagcattagcctcggggcagttacgtggggaagagctgaattcggtgatggagcaaacgcctgcgttagcgaaagccatcgctgacggaatgggtgccagtgtgggcgaattaaggaagaaagcccaagacggtgaaatgacgattgagaaagtcattcaagccttagaacgtgcagccgacagtgtggataaaaaatttgctaccagcgtgacaacggttagccaaggtttcactaatcttcaatcggcgataacaaaatttatcggtgaagcgaatcaaagtacaggtgcgactcagcttttaacaacggggctttctgcattatcgaatcatttttctgaagtgatgagaattacggaagctttagccatgacggctattgcaataaaaatagccaaatggactcaagccacttatgcacaagccgcggcaacgaaattaaaagttcaacaagatttaatcgccgctaaagccacaaaagccaagatgacggctgaattagagctagcccgtgttgaaatgcgttctttacaaacgcaacttcaactcgctcagacagaagcacaacgcagtagtattcgaatgcgaatgaaagcgcagtcttccattattgtgtcagccacaaatgcagaaacattagcgatacaacggttgaatgcggcacaaagagccagttctacattagggagaagttttggtggtgcacttgcctttcttgggggacctcttgggattgcgacaggattattgaccgcgggggcaatggcttactatgagtggcaacaacaagcagaacaatcaagacaaaaagctcttgagtatgcagagtcattagacgttgcaacggagtcattaaataaattaagtgatgctgagcgtcaagcttcaatcggaaaactggctgaaggtttagatgcacaaattgagaaaatagaaaagttaaagagaaagcaagaggacttaaaaaaatcatcggatttgggtggggcaaataaaggcatctctttttattatacaggagattacgagtcattttcagcggaagtagttaaagctagaaaagatgaactccaagtaactgctgatcttgaaacaaagaatagagaattagaagttatacgtaaaaaaatggcattattgcttgatgctgaagttcaaaaaaacgggatggtctctaatgcctatgcgctttatgccagccgtatttacgatgcttctgtaaaatctgatgaattgattggtaaactccatctacaaggttctgcttttgataatttagcgcaatccattcgttcagctacccaagagcaacagcagttttcggcaaaatcgttaattgttgtttctgatgatgcacaaaaatcaatcgatgcttctcttcgtactattgaaaaatctaaagcagaaggtaaggctttagctaaactcaacgccgaagatgtattggcgagtagaaaaatcacaccggacatgatggggtatgacaaagcgttacaagctgaaattgaagcccaacttgctttacagtctaaaaaacttaagccacctaaaacaccaaaatccaccattgattatgccaagcagtacaccaaaatcttaacggaattagaggaaaaacaagcttcattgattgcggatggggaaagcattcagctgtacggcactacctcttcctttaaggagtacacatccgccttagctgatatcaaacagaataaagacaagtttgatgccatcttaaaaatcgatcccaacgccattgagacgatcaaagaaaaagcgaaagccattgatgatctggcgcgagccaactcggttgcgcaatttgcttatgatcgcggtaaagaaattgagcagatgcaatttgaaaccgccttgataggaaaatcacgcgcagagcaagaaaagcttaatgcccttcgtcagattgatgtgctgtatcagcaagccagtgtggatttaggcgagaaagagttggcgaacttacaacgtaatgtcgaactcactaaacagcagattgaggcagagcttaggaaacgagaggccatgaaaggcgatccgatggcgggattaaaacaaggtttatcggatttcagtgagtcggctatggatgtgatggaaaacgtcagaaacgtcaccaccaatgcccttaataatatgtctgatgcattagccgattttactttaacggggaaaggaagctttaaagattttgccaatgcggtgatctccgatatcactcggatggtgatgaaaatgctgattttcaaagccatagaagcaggcgggcaggcaatgggctttgatatgggatggatgagcaaagggcatgcttacggtggttatacggggcatggtgggaaatttgagcctaaaggaattgtgcatggtggtgagtttgtttttaccaaagaagcaacggctaaattgggtgtcggcaatctctatcgcttaatgcatgcggcgcaaggttatgcttcggggggctttgtgggggcggtcgcagggcgaataccgattacaccgcaaccgacgttagcccgtgtaggtggtgtgcaaatgacggtcgttaatcatattacggtgacaggaaatggtgacgctgtacttgctcaagcaatgaaagaagccgcacaacaagggacagaagcaggcgcacagaaagctcacgcgatgatgttacaagactttcaaagtaatggcgcagcacgcagaacattaggagtttaa

SEQ ID NO: 294642 - DNA, 231 bp, Proteus mirabilis
atgcccgaaagccacttgtgtgaatatgaagccttttatcgcaaacaaccctttggtttatggcgagaggattatcggatggcacaagtggcgcatcttcttgcgatgataaatcgtgatccgaaaacatctccgcctgaattgatggattttatgccgatgtggaagaagaaaatcacggaagaagaggtgtgggataatgtcactgagagtgtattagctaatcgatag

SEQ ID NO: 294643 - DNA, 417 bp, Proteus mirabilis
atgtctaacgctttattgcgtgaattagtgttaaaccaagcactgaaagtgacgccttttacctatttagacaacaccttttatgtcaaagagctggatgttggcaccatgaattacattcagcgcaaacttcgccaaattaaaatcaagctcgctgaggcgcaggacatttatttagacgaagacgaccccgaacaatttaatgaggcgataaatcgtgtctacgatgaatatgatgtcgccagaatgctggcctttaagttgtgtgatgaaaaaggggaactgctttttgatgctgaaaatgaagcagatttaaaaggtcttaatcgtctagggcaagggttctctaatgcggtgtttacggctgaagcggggaacaacgaaaaaaactcggagaccgacgacaatttcaattga

SEQ ID NO: 294644 - DNA, 666 bp, Proteus mirabilis
atgacaaagccaaagaatcataaagcgacgccttttcttggcacgaagatctttgtgcaaaccggcttaggggaggcgatgacagtgacggaagcgacgttatcacccgcaaccattaccatcgccaataataaactgaaagcggatgacatgattatgttatcgggtttaggggagttagatgggcgttttcccattgcacaggttgatggcaataaagtgaccctgtgcgacgaagtggattggagtgataaaacgctacctacggatttttcaaacgccaaagcacaacgtattcaatggtctaataatttctgtgcggtaaaaagtttcagtaaagacggttcgacaaccgaacaaattgatgtcaccaccatttgcagtgatggcaaggaatatgaatccggtgatacggaatacggctcaattaaattgaccttcttcttacgttatagctccagtgatgtgcagcgactcttgcgtaaatatgaaaacagcaaagaaaaattcgcagtgaaaatggtcttaacgcgagatgaaggctccatgttttattacggctccgtcgaaacaggtatgaacattgatggcagtgtggggcaaatgatggattcggggatctcgattaaattgtccggccgtgattatttgaatgtgaagaaataa

SEQ ID NO: 294645 - DNA, 342 bp, Proteus mirabilis
atgatacagcaattaaaagagaccctttcaccgctggtcgatggaagggttttttttcaggtattacctgaaggcaaaaggcattatcccgccattgtgatccagttcgccagcatcacgcctaacagtgcgctggaggatacagatttagacaactatcgtgtgcaacttgatgtgtatgcgccacagccacaacccctcatggtcttgcgtaaaaacattgaggctcagattgttgcgacaatcccatttgcacaacgggtgaatgcggtctttgggtatgaagcggatgtcaaattgcatcggcttgttcttgaattaatgatttcatcagataaataa

SEQ ID NO: 294646 - DNA, 474 bp, Proteus mirabilis
atgatgggtgagattaaaatcagtggattgtctgaactcgctcaacgaatgcaagacattgcccgtaaaaccagaaatcaaagtgcgcgtaaggcgatgaatgcaggcgcttcggcgttaaagcaggaaatcaaacatcgagtgccgatccttaaggaaacggtgcctcatcgacgcaaaggcaccatcaagcgcaatattcgttctaaaacgaaagtgcagcgtaatggacaagtcaaaacgcgcatttgggtgaaatcattatcgggtaaaaaggtgtctgcctttaaacaggtaatgggaaaaagtgcggcattgaatccaaatgatccgttttattggtggtttgtcgagtttggtaccgccaagatgcccgcacaaccgtttatgcgccccagctttgaagcgaaaaaggaagcgacggctaaagtgattgttcaaacactcaaagatgatattgaaaaaacaaggtag

SEQ ID NO: 294647 - DNA, 330 bp, Proteus mirabilis
atgcgtgcaggacgattacgccacaccattgatattcaaaaatcagtattagcgccttatgccatcagtggcagtgatgtgatttggacggatcatgcgacgaaagtacgtgcagcgatcatgccttatcaaggacgggaatattttcaagcccagcaagtacaaagtgagtccacaacgcgcattcttattcgctatatcgctgatattgatacttcgatgcgtattgtatggggtaagcgaatatttaatattatttcgattattgaccctgatgagcgccatcgtgagcttcaattgatgtgcaaagagggcgtgaatgatgggtga

SEQ ID NO: 294648 - DNA, 327 bp, Proteus mirabilis
atgctttctctcgaattggtgaagcagcattgcaatatcgatcctgattttacggatgacgataatttattgacgctgtatatcggttccgccgtgaaatatgttgaaaattacacgcgtagaacattacataaaactcaggagatggataaagcacaagaagatcccgatgccttattcttaacggatgatgtgattgcggcaatgctcttattaattgcgcaatggtatgaaaatcgtgagggagtgatttcggggcaagctttttctacacaaccttttgcggtcaccgcactacttcaaccttaccgcatttatgggttgtag

SEQ ID NO: 294649 - DNA, 189 bp, Proteus mirabilis
atgaaattagtcatcttacgagccatttattttgagggacgtgtggtgcttgaaggcgagcagattgataccttagagcaacatgggcgggagttaatccaaaaaggctatgccaaagaacaggaagaaacacatcttgttactgaacccgaaccgaaaagaaatattaaggcgaaaaaggagaaataa

SEQ ID NO: 294650 - DNA, 1215 bp, Proteus mirabilis
atgtcagagacaaatgaattattaaaaaacctatcggcaaaaattgaagaagccaatcaacattttaatgccaaagctgaagaagcgttaaaagaagcgcagaaagtgggtggattaaatgaagaaacgaaacatgccgtagacaaaatggcaaccgagctaaatgcgctacgcgaatctgaaaaaacactgaaagccgcattaggggatttagaacaacatgttgcgcaaatgccactcaataatgcgatgcaggttgtaaaaagtgttggtcaacaagtgatttcggctgaagtattaaaagagatcaattccagcattcaagggggcaaacgtgtttcaattcctgttcaagcagcattaacatctacgggcgttgccgaaggcgtggttgaaccacaacgtttgtcgggtatcgatgttgcaccgaaacaacgactttttattcgtgacttaattgcatcaggtaaaacgcaatctcccgccattttctgggttcagcaaacggggtttaccaacaaggcggcggttgcgcctgaaaataccactaagccgtatagtgacattgcctttgcgaccaaaatcacgccagtcacgacgattgctcatatgtttaaagcgtctaaacaaatcttagatgattttgcgcagttgcagtcgttgattgatgcggaaatgcgttatggattgaagtttgttgaagagcaagaaattttatttggtgatggctctggggcacatttgcacggcattatcccacaagccactcaatataaagcctcctttacggttgaaaaacaaaacggtattgatgatttacggcttgccatgcttcaagctcaattggcacgatttcctgcttctggtcacgttttacactttattgactgggcgaaaattgagctaaccaaagactctttggggcgttatattttggctaatccttccgcattaacaggaccgaccttatggggattacctgttgtggcaacagaaacccccgcgtttaaagggaaattcttaacaggggcatttaatgcgggggcacagctctttgaccgtgaagaaacgaatgtggtgatttcaacggaaaacgccgatgattttgagaaaaacatgatctctatccgttgtgaagagcgtcttgctttggcgatcaagcgtccagaagcctttgtttacggtaattttacggtagcaacatcaagtgattaa

SEQ ID NO: 294651 - DNA, 852 bp, Proteus mirabilis
atgaaaaaaaatcagttgccagtcgcgctggaggatcgcccctgcgcatcgattcgctatgagctgaaacccaaagcactggataaatggaatagccgtattcgggcatccagtgcggataactcgatttcgatattggacgtcgttggagaagattattggggtgaaggtgtcaccgctaaacggatttccgccgcgcttcgtgccattggtgagcaagatattgtcgttaacctcaatagtccaggaggcgatatgtttgaagggttggcaatttataacttgcttcgtgctcacagtggcaaggtaacggtcaatattttgggcattgccgcttccgctgcgtccattattgcgatggcaggggatgaaataaaaatggggcgcggtgcctttttgatgatccataactgttgggcaatgggggtaggaaatcgtcacgactttgcaaaacttgctcatgatctcgccccttttgatacctcgatgaccgatatctatgttgcacgcagtgggcaatcgagtgacgtggtgagtcagatgatggataacgaaacatatatcagtgcgagtgaagcgatagaaaagggatttgcggacagcctactttctgccgatgtgattgacgaaggtgatgaaagtccccaagccgcgatccgaaaactggatgcgctacttgccaaaaccaacatacctcgtgctgaacgacgaaaactaattagtgcattaacccgaagtacgccgagcgctacttcccaatctaatggtatgccaagcgctacctgcgatattaatcctgaaatcctgtcaaaattggaggaggcggtgaccgcctttgcctgcgttaagtaa

SEQ ID NO: 294652 - DNA, 1323 bp, Proteus mirabilis
atgcgtaacgtgaaaaaaaagagccgaataaaatcggcgatcctcaattggatggggatacccattaatttaactgatggcgccttttgggaagaatggattggaaagagtagcagtggcagggtggtcaccgcagataatgcattacagctgtctgcggtatggtcttgcgtgcggttactcagtgaatctatttcgacattgccattgaaaatctatcaaacgaaggcggatggctcgcgcgaactggcgaaacatcatcccgcttacaccgtattatgtcgaaaacccaatgcagaaatgacgccttctcgctttatgttgatgattgttgccagcttatgtttaagaggaaatgcgtttattgaaaaatgttatatcgggaaaaagttggtttcacttcaaccgttattacctcaaaacatgacggtaaaacgattggaaaatgggcagttagcatatacctataccacgcctaaatcgaataaacgggttattcccgttaaaaatatgatgcatattcgagggtttggtatggatggtgtttgtggaatgatccctattcaagtaggaagagatgttattggtacggcactatcaacggatgaagctgcaggaaaggtttttgaaaatgggttacaaaccagtgggttgctcacgtcaaaaacagcattaaagccagatcaaagagagcgcttaagaaaacatttgacgactttttctggctcaaaaaatgctggaaaggtgatgatcctcgaagcggatttgtcttatcaaaatgtcaccatgaaccctgaaactgcgcaattattacaaagtcgtggatttagcattgaggaaatttgccgttggtttcgcgttccgccttttatggtggggcatgccgataagcaaagtagttgggcatccagtgtggaagggatgaatatgcagtttttgactaatacactacgtcccttattggtcaatattgagcaagaaattaatcgttgtttactcgacagtgatgatgattattatgcggaattttctgttgagggcttattacgtgcagacagtgcaggacgttcagcttattacacaacagcgttacaaaatggctggatgagccgaaatgatgttcgacggttagagaatttaccgcctattgaagggggcgatatttatacggttcagcttaatttaacgccactggatcagctcggaaaagatatcacgaacaatgaagctgaaaagctcaaagcacagatcactaactggttatttcctgaaggtgaacctgtaaccccatctcaatccaatccacctcgtcccgaggagtaa

SEQ ID NO: 294653 - DNA, 1743 bp, Proteus mirabilis
atggtggagaagaagaggaagatccgctcaaccaatatttcggttgatccggcaacgcaatacgcacaagacgtgcatcaaggcaaaattttagcggggcctgatattcgtcatgcatgtgcgcgtcatctcaaagatttaaatgaagccgagcaacggggattagtctgggatgttgaggctgtcaaaagggtgatcgactttttcgcgaaagtcttaaagctcaatggcggggagcatgaagggaaaccgtttattttattgccttggcaatgctttgtgattggctccatttttggctggaaaatgattgacggtacacgccgatttcgcatggtgtacgttgaatcaggtaaaggttcaggaaaatccccgatggcaggtggcgttgggttgtattgtttagtcgctgacagtgaactgcgtgccgaagtgtatgcagcagccacgaaaaaagaccaagccatgattttgtttcgtgatgcggtggcaatggttgatcaatctcctgcattaagtcagcggatcaccaaatcaggcggaacaggcaaagagtggaacttggcttatttgaaaacaagttcattctttcgcccgattagctcagatgatgggcaatcagggcctcgtccccattgtgcgctgatagatgaaattcatgagcataaaaataataccgctgtcgagatgatgcgagcgggcacaaaaggtcggcggcaagccttgatatttatgatcaccaacagtggccatgataaaaccagtgtgtgttatgactaccatgaatacggtcgaaaagtcgccgaaggcactatcgaagacgacagtttcttttcctatatttgctcactggatgagggcgatgatccctttaaggatgaatcttgctgggggaaagccaatccgtcactgggttacaccttttctgatcgctacttacgcgagcaagtgacacaagcccgaggtatgcccgcaaaagaaagtattgtcagacggcttaatttttgtcagtgggtggatgccgataatccatggattaacagtgaaacatggatgcagtgtgaaaacacgttcacattcgatgatcttcaaggtgaagagtgttatggcggattagatttatcaggaaccaaagatttaaccgcattagccttgtattttcctcgccttaaacgtctttatgttgaattttggacacccaaagacaccttattggatagagcaaaaaccgaccgagtgccctacgacttatgggtaaggcaaggttttatgcataccacgctagggaatgcggtgaggtatgaatttgtggcagaacgcattgctgaaatggcgatgcacgtcagcatgagagccattgcctttgacccttatcgcattaaataccttgaacccaaactcgatgaagcgggtgtgacggttcctttaactccgcatggacaaggatattacaaagccaaagattcagggctatggatgccacactctatcgaactgtttgaacagctcattgatgacaagaagattgagatccacgccaatccttgtttgagatggaatgccgcatccgctgtgcttgaggctgaccaaaaagataaccgcgtctttgccaagaaaaaaagcacgggtcgaattgatggtgtggtggcctctgcaatggcgattggggcttctgaaggggaattcgaggatgaaggggatattgatggtttctttgataacccaattattgtggggatctaa

SEQ ID NO: 294654 - DNA, 468 bp, Proteus mirabilis
atggcaggaagacgcccgaaaccgacccacttgaaggtggtcaccggtaatccgggaaaacgaaaactcaacgataaagaaccccaacctaaacgtgaaataccaagcccacccgaacatttaacggattgggggaaaatggcgtgggcaaaattaaccttattactcgatgggatgggcgttttaaccgtggctgacacgctggcattagaacggctgtgtgatatctacgccgatattcttcaattacgagacaccattgcgattgaaggtcggacatacaccacaaaaacgcaattaggggattttttaattaaagcgaatcctgccgttgccatgttagctgatgcagatcgtcgttttaaaagttatttaatcgagtttggtttaacccccgccgctcgttcgaaggtgaagatggatggtggagaagaagaggaagatccgctcaaccaatatttcggttga

SEQ ID NO: 294655 - DNA, 339 bp, Proteus mirabilis
atgaaaaaacgcaatgtctatggtggtcgctgggctaaagtgcgattagcgtttcttaatgaacatccactttgtgtcatgtgccaagagcaagggcgtattactgctgccacagtagttgaccacattactccgcatcgtcttaaagaagcacttgaatcaggcaataaagagcgtatcgcaaaagcccaagccttgttctgggataaaaataacttccaaagcttatgcgaactgcatcataactcaaccaaacaacgtatcgaaaagagtggcaaagtcattggctgtaatgcggatggcattccactcgatcccaattctcattggcatcaataa

SEQ ID NO: 294656 - DNA, 408 bp, Proteus mirabilis
atgtcaaacaaacagattaattatgaggcaataggtcattgtgtttacttgcaaaaagaaatatcgcagctaattgaagagagaagcaacctatataaagaattcatagcaatttgtcattcagggcaatttccttatacagatccaagaaacacaaaaatcatcgatttaaatagtattgataagccagttaaattgctaaaaaaaatacatgagataaatcaaactatcatcacactagcaaccactcataatcaatgggcggataaggctgattatgaacattatgttattagtagtgataattctttaggttttagtacgtctagtgacgctatattcaaaggaattattacctgcaataagcaatcatcaatagaaactgatgttgtcagaaataaaccatga

SEQ ID NO: 294657 - DNA, 513 bp, Proteus mirabilis
atgcaatatccaagagtaagtattaatggtgtgtctgtccgtgttgatagtgaaggtagatataatttaaatgatcttcatgcggccgctgttgcggatggtaaagcaacggaatcacaaaggcctggtgcatttttgaaaagtcgtcaaataaggcgatttgttcaagctttaagcgatgcaacaaaaagtgcatcggttaaagtgattaaaggtggactcaatcagggaacttgggctttagagttagtcgttattagatatgcagcttggttaaagccagaatttgaaatccttgtctacaacacgtttaaagaggctacgaggaagggattagatgttatgtctaagttgaacaagctagatcatgtcattaataccgaaactaaaaatataagtaactgtgcaaggacgatggctaactggggagttggtggtagaaagcagttactactaacagcaagggaacgaattcttaaagaagctcaaatctatattcctggtattgaatag

SEQ ID NO: 294658 - DNA, 240 bp, Proteus mirabilis
atgatatatatcttggaaattagagatccttccgataaggattgtagccttgcccacctaaagagtagtgagccttttatgacatttaatgttggcgacactattcatgggcaatcaattcctgtagaaggtgaaatggcttatccacataacctcgttattacagaaattgaacactttatttttactattagagataccattcatcacaatgtaatgttgtatacgaaagtaaaataa

SEQ ID NO: 294659 - DNA, 462 bp, Proteus mirabilis
atgaaatacgggaaactctatgccatcattgcgttggtaggcattattgtgggtagttattgggtgattaactggcaagctaataggattaattcactgacagatatcaacaaaaaactggccgtggctctcgaagaacagaagtctattaatactgactatcaagcacgcataatgagattaaatcagttggatattcaatatacgcaggagttagcgaatgctaagaatgaaattagtcgcttgcgtgatattagtgagcgtcatcctgagcgggtgtatatcaaagccgagtgccccaaagtcacaaccactccctccaccagcttggcttatgcaaccaccgccagacctactgacaccgctatccgaaattattggttactccgagaacgaattgcagagtcagaacagatgattaaagggttgcaggattacattagagctgagtgtgtgaactaa

SEQ ID NO: 294660 - DNA, 159 bp, Proteus mirabilis
atgtcatggaaacctttaattatcgttattagctttatcctcgtattactcattacggttgctggtggcatttatctcttgattgataactcatgtactaaagaccaagtgagtttagaaaaacgctgtcagattgcactctcatatcatcggtactaa

SEQ ID NO: 294661 - DNA, 471 bp, Proteus mirabilis
atgtctctcaaacagaaaatagctgcgctaacaacggcgggagcaacagccatcgcgttagtagtaatagcccattttgaaggtgtgcgttatgaaccttatcgtgatgtggcaggtgtcttgacggtttgttatgggcatacaggcaaagacattattcaaggtaagagatacacacaacaagaatgtgatgcgttattacaaaacgattttattaagacacaacagcgagtcgatgcattaatcaaagtaccactcgatgactacaccaaagccgctttatattcctttgcttttaatgtaggaacgacagcatttgctcactcaacattactcaagaaactaaatgcaggtgatagagcgggtgcctgtgaagaaatgaaacgttgggtttatgcaggaggaaaggtttggcgagggcttatcagtcgtcgagaggcggagtcagcactatgtcatggaaacctttaa

SEQ ID NO: 294662 - DNA, 270 bp, Proteus mirabilis
atgcgtatggataaattaaccaatgtaacctatggaacagcaggcctaacggccttttttgccagtctctctttatatgaatggggatttgttatcgggatggcgttcagcatggttctaggtttagccacttattttatgactcgaagagaacagcgaaaacgcactcaattatttgaagagcttgttcgtcatgttgacccacaaaacccgaccgaaacgttaaaaagacttgctgaattaatggtgaaagcaccaaaggatatttaa

SEQ ID NO: 294663 - DNA, 423 bp, Proteus mirabilis
atgtcaaaagagataagcgaattacagtttagccttcactatgcttcagaaacagacagtgaaaagaatacctccgtcattttaacggcgaatattcatacggctgatggcgaaactcaacaactgacgcaactaatttgtacaacatctcccgcaggtaaaaagcaatatcgaatcggtacacaaaaaattaatgatgcaggtgacccattgctggtggcgattgaatcctattggcgcaaaaacatacaagagagttgtgtttatttgttagagaaagcgaagcaatttattcaaggacacttacaacaaacgaatacatggatatccatgtatggtcttgtgattgtttctagtgcgtcacttgaagagcagttgcctgaaggtttattaaaggcacttaaagtatcaatacccgcctaa

SEQ ID NO: 294664 - DNA, 246 bp, Proteus mirabilis
atgaatgctgaagtaatagctttacaacaagttgtatctttgcttttacacagcttgcctgatagtaaaaaagctgaagcttacaaaattattgagtcaataaaggctcaagattatgaatcctctctattaaattccgaggctaacataacacccgaaactgcgtccttaattgcacaaaaaataaaagatgcatattcacaagtgataaaaacatcaagatatttcgatgatttgtataattag

SEQ ID NO: 294665 - DNA, 177 bp, Proteus mirabilis
atgagtactcaaaatttagaaatgttagttaatatgttgtcagtacaagtggtacaacaagggcaacaaattgcggagttacaaaaacagctcgctgatatgcaattaacgagctgtgaattagatgctattaataatgctacactaatggctatttctaataaccaagataactaa

SEQ ID NO: 294666 - DNA, 2628 bp, Proteus mirabilis
atggcgaagaaacagaagtcaaccagcagcgagctactgtttaacaaactcaagcagtttgatgagccaggcttgttcaacgaccactatgagatgccgaattacgttcaggcgaatctgaaagatgaactgcgtccgtatcaacaaggggcgctgcgctacctgcattatacacagcgcaatcgggaggaagcttcgctgcattatcgccatctgttgtttcacatggcaactggtgcgggaaaaacgatggtgatggcggggacgatactctatctgtttaaagagtacgggtatcagaacttcatcttcttcgtgcatactgatgcaattatccagaaaacccgcgagaacctgctcaatccgcagtcgccaaagtacctgttccgtcaggaattggaaattgatggggaaaaaataatcattaacccagtagagacattcccgtccgtaccggaacacaatacaatttatctcaagctatcgactatccataagatacacgacgaattgaacagctaccgtgagaacagcatcacctacgaggatttgaaagagatcccattagtactgcttggcgatgaggcacatcatttcaatgcaggaacaaaagctagaggaaaagcgaaaacctcaccggagaacgaggagcagacgtgggagcgcacgattgaaaatatccttgacctacgaccagataatcgcctctttgagtttaccgccactattgaccttacgaataaagatatcgggcaaaaatattgtaacaaggtggtatatcaatatgacttgaagcagttcatgtcagatggttactcgaaaaaagtcatgctgttggaagccaatcagaacgacagtgacaagatgcttgatgccgtactactaagtcagtaccgtaaactggtggcagtggataatggcatcattgctttcaagccagtcattctgttcaagtcgaataaaattactatctcgaaagcgaagcaagatgagttttcgcaactaattgctgcgctgactccggaaagcgtcagacttcatctggcgaataagaaagtgcaactcagctctgataccagtatctggcataaagtaatacaacgttatgctgatagtgatttggtgacgattattggacagattcaggaagactttaacgattttaacctgctgaacgtcaataaatcagatctacttgaagaaaaccctgtgttactgaacacgctggaagaagttgataatccgataagagctgtttttgctgtagcaaaagttaatgaaggctgggatgtcctcaacctctatgatattgtccgtatcagcgaacaggcaagtagtagcaagactagcacagatagcgaagcgcaacttatcgggcgtggtgcacgctattatccgttctgttatgacggtaagcggagcttcacccgcaggtttgataccagcgcgaggaatttaagtgtgctagaacaattgcactatcacaccattaatgaaccggcgtatatcaaaacattgcacgcttcccttgagcaagcggatattgatgtgcatcaagatggtggaggtacgattgaacacgccaggctgaaagctgactttaaaaagtctgctgtctatcagacgggtaagctgtactttaacgaagtggaagcgattgagaatagtagccgtaattgggaaacatactcactagaaactcgctttgatataccgtatcagctcgtcagtgaggagtcgctggataatctggtaggagcaacaggcggtgttgtgaaagtcgagccgttggtactggacgagcgtttttatcgtaaggcgatgcagaaaattcgcttctacgcactggataacctacaacgttatttccctaagctgaaaggtatccgtgaattcataaatagtaatgactatctaggtaagctgaaaattactgttactgtgccacaattactggatttttctgccgtgccagcaaaagagaagctgcatctactggaaattgtcctgctgcgaatctcagagaacgtgcggcgcaatgaccagaaagtaaaaggcacctatcgcttcattagccagccgatcaaggacgttataaaggattacagcctgcatattgatccgtccgtgataatgaaccagaaaatcaccgctgtacagactattggtaaaaaatggtatgtgtatgataatgcgatactgaatcagcttgaacatcgtctggtgaaaacgctggaaacctttatgccgaaactcaaagcccgttacgacgatatttatgtgctacgtaacgacgagcaatcaacgcgttttaagctcaccgagttcggcggcgtgcggggtttcatgccggatttcatcatgatactgacgcgccatgtggataacgcttactggcaagtcttccttgagccaaaaggggatgaccggttgttggatgacgcatggaaagaggggatgctggaagctctgaatggcagggagcgtgttgtgattgatgaaaatgataatgtcagactagttgggattaaattttttgctaattgtaggatggatgaatttattactgatatgcaaaacaagctgaatgaaggggaaacgttagagatgaaatcgcttctactttaa

SEQ ID NO: 294667 - DNA, 1917 bp, Proteus mirabilis
atgattactgagttaattcgagaaataaacaatgtattgaaggtgttcccaaaattctgggagggtgaagaattgcaccgttctatggtgattgatgcaatcaaccgaaaacaaccggatgttattaaagcgctagttgctaatgaaaaaatcaaatccgtttacggcacggatattgacggtatctttatttttgattttgaaaaattatgtagtctgcttaaatacaaagaatattgggcaaacagttttactaaatatcgcaataaagtgggattaaccagtgaaggaaaataccttgattacagctcagatgtggtgctggattttccgtttaaagattgtgtgcttgaaggcggcatgaccaaagaagatcaaggtaaagaggaaatctattacaatgaaatcattgcacgtgacgaaatagatcgcctgttttcaccaaaggtattcactaatgctaaacgctatacaaaagatggggtaaaaaagaatataacttcctttgaccagaacgataatttaattattaaaggaaataacctaattgctttacactcactaaaagcgatattttctgaaaaaataaacgttatttacatagacccaccttataacactgaaactgacagctttaaatacaatgatagattcaataggtcttcatggctatcattcatgaaaaatcgcttagatatagctagagatctactgttagataatgggattatttttgttcactgtgacgacaatgagcaagcatatttaaaagttctaatggacgatatatttggtgaaaataattttatcgggacaatacctagaaagaccagaaatggaaaatctgatgttccgtataaattctctcaggactacgactgggtattagctttcacaaagggggctagtgaaaagtctcctctatttcaaagaaatgttgaaagaaaatattataaatcaaacgactttgaagaaagatggcggctagccgacttaacaaagcaaacgacccctgaagagcgcccaaactcgaactttactatgataaaccctaaaaatggtgatgaatacccagtaaaccccaaaagaagttgggctgtcacgaaagaaaccttccttgattactataatcaaggacgtattgtctttcctggagattatgattttttaaatatatcaaaaccttcaatgcgtgtttttgaaagttcagatgctggaaaaagtagttatgtatctagtgatttcatcatcaatttagaaagtggatttgaaaacacaaaaggaaataaacaaattgatggtatttttggagctagagcattctcatatgctaaaccagaagagcttatagaaaaaataattagcacaacaactaaagaaggtgatttgattttagattttcatctaggtagcggaactactgccgcggttgcccataaaatggggcgtcgctatatcggtatagagcagatggattacatcaatgaagtcactgtgcagcgcctgaaaaaagtcattgagggtgaacaaggtggaatatccaaaaacgtcggctggcaaggtggcgggagctttgtctacgccgaactgatggagctgaatgcttacttcgtgcatgaaatccagaaagcgaagtctacagaagagctccaaaaactttttgccgtgatgaaaacggaggcgcatctcaattatcaggtggcactggaaaacgtcttgtctgctgagtatgaaatggacggtatccctcgtaaagttgcttttagtgaactggaattatatgagcagaaacagctactgattgaaatcctcgataaaaaccagctttatgtgaatgcctcggagatagacgactgcgatctgaacatttcagagagcgacaaagcctttacccgcagcttctatggtgtggagtga

SEQ ID NO: 294668 - DNA, 402 bp, Proteus mirabilis
atgagagatatgcaggaagttttatcgcgttggggggcgtggtgtgctgataatactgaatcagttcaatggtattctatcgcagcaggttttaaaggattaatacctaataaagtaaaatctcgtcctcagtgctgtgaagatgatgcaatgataatttccagttgtatggcccaattaaataaaaaaaatagcgatatgcatgatctcttgctcgattattatttatttggaatgactttcattcagttagccaaaaaacatcattgctctgatacttacattggaaaaaaactacaaaaagcggaaggtatcattgaaggaatgttaatgatgcttgagatcccattagaaatagatcgatatgtaaaaaaaaaccgcttcaagactttacgatcgtaa

SEQ ID NO: 294669 - DNA, 642 bp, Proteus mirabilis
atgaagtcgctaaggcgacggcgctgtaaaatatgtagagaatggtttcatcccaaatacagtaatatttggtggtgttgcccagaacacggcgcagaactggcaataaaacgaaggaataaggaaaaagaaaaagcgttagtaaaactcaaaaaggcacaaagagaaaaggaaatcaaagcaagagacaaactcaaagcctgcaagttagcagtaaaacctacctcatattttatcaaacaagctcaaactgcgtttaatcaatatatcaggctcagagatcatgatgagccttgtattagttgtggtgaaactaatcctccagatttacatggaggacaatgggattgtggccatttcttatctgtgggttcacaccctgagctgagatttgatgaacgtaatgcatataagcaatgtaaatcatgtaatggtggatcagggcgatttacgcataaaaatgccagtgtaagtcaaaagtatgaggaaaaacttatcgaaaaatttggtcaagaattagttgattggttacgagcacctcatgagctcccgcattggcgacgcgaagattatatccagatacgcgataaatacagagagaaggtgaggcaattaaaacgagaaagagagatgaaggtgtaa

SEQ ID NO: 294670 - DNA, 234 bp, Proteus mirabilis
gtgacagatgatatctgtctccataagtccaatctcaacagtattttcaaagtgctctccgaaatcgtgacaacaggtaaacgctatcgcatcaaaatcaccgagtggcgtgatttaagaaccataccaatgaataaaacatggcgtatgtggatggaaaccacaggcgagtggttacgtgcacgtggcgttgttatcgatattaaaaatggtgtcggtgaaatcgttttatga

SEQ ID NO: 294671 - DNA, 1386 bp, Proteus mirabilis
atgaaccaagttccgaataatttaatggcggaacaaaatgttattggaggactcctgcttgacccgcaaagtgataatgcgcaatcaattttctcactgctaaaacctgaagatttttatgcccaacaccatcaaattatctatctcaccctgcgagaaatgtatacccaacgtatgccaatagacatcatgacggtgacggattgtctggagtcaaaagggcgagttaatcaatcaggtggctttgcctatcttgctgagatggcaagagaaacaccgagtattgctaacattatggcttatgcgaaaaaaattcgagagtgttctgcacagcgttttgttatcgaaaagacggttgaaattcaaaatctcatgatggcgccaagtgagttaagttttacggataaaattgaacaggcacaacgcttgcttgatgaagctacgtcgtttggaaaaatggggagaaaaacaggattacgccgaattgatgatgtgttggatgatgtttttaccgacatttgtgaccgacaagataacccagagaaacatcgaggattaaaaacgggatttaaagattttgaccgcctattaagcccgaaacagattgtcatcggttcactgttcgtgattggtgctcgtcctaagatgggaaaaacaaccgttctcactgaaatggcaaaaaatgtctcacaacaaggtaagcctgtattgctgttcagcatggagatgacagacaaacagcttgttgaacggacactagcccaacaaacccaaattaattcagataaattttaccaaaaattagaagagcatgaatgggataggctttgcagtgccatcggtcgccttaaagatgagcccaatatttgggtggatgatacaccaggcatgtccttacagcatatacgctctgaaagtcggaaaatcaaacgcaaagtcggtgatattgggtttattggtgtcgattacctcactttgatgcaagcgggaaaagctgaccgtaatgatattgcctatggtgaaatcactaaggggctaaagatattggcaaaagagctcaatacggtggttgtgttgcttgtacagttgaatcgagggttagaaaacagggcagataaacgtcccgtaccgagtgattcaagagaaacaggacaaatcgagcaagattgtgattattggttaggcatttatcgtgatgcggtgtaccacaataatgcggatgaaacgctgaccgaaatgattttaaggctcaatcgacacggtaaaacaggcaccgtgtatgttgaccaacaaggattgagtattacaccagttgatcaatatatggctgcatatcgcgctcaaccgaaaaaggaacccaaaaggtattgtgaaaaatcgttttaa

SEQ ID NO: 294672 - DNA, 768 bp, Proteus mirabilis
atgagtatgcttctaatggcaaaagccatgcaattacaggtggggagtacagcacaaaaaatggtgctactgaaacttgccgataatgccaatgataaaggtgagtgctttccttcttatgaaactattgcacgtcattgcgaaattagccgtcaaagtgcgataaaccacattaaaagtttatgtaaaaaagggtttgttcgtaaagttacgcgaaaaactgataaggggcatacttccaatttatatattctggatttggaggctaaatctcttgatgacggtagtcaaaatacagtaccacctagtcaaaattctgtaccagaggtggtcaaagaatttgaccacggtagtcaaacggttggactagggggtagtcaaaaatttttacccagaaccagtcagtcttttaaccagtcaattaaccctaaaaaattatcgtctgacgacttgaaacctgcaaagcagatttcaattaatcgacaaactaaaattccttatcaggaaatcatgcaagccttcaacgaatcagcaggggatagattacccaatgccgaatcactgaatgacaaacgcaaaagagcaatatccaaattcctgaaagaacttaaagagcccacagtcgaatcagctaaaaattattttgattattttatggaaacggcgagtgcttggtacttcggagaaaataatcggggttggcgagcgaattttgattatttacttagacctgagacggtactcaaaacaagggagggggcactgtga

SEQ ID NO: 294673 - DNA, 174 bp, Proteus mirabilis
atgagacaaagaataaatcatgaatttaatggctgtgatgagcataaaaacatcatgagaaataggctattacaagaaataaccccactgggttgtcagcgtttaaaggaagcattgaaaggcgcaaaattaaggaaagcacatcgggataagttattaggagagcgaaaatga

SEQ ID NO: 294674 - DNA, 228 bp, Proteus mirabilis
atggagttaaaaaaatatatagattcacttgagtgggggggagctaaagaattagctgaccaattgggtgtttcgaagtctttcctttctcaaatggcatctggtgttagtgctatttctcctaaacgttgtgttgaaattgaaatagcaacaaaaggtgcagttacacgcagagatttaaggccagacgattggtataaaatttggcctgaattagaaactgtatag

SEQ ID NO: 294675 - DNA, 651 bp, Proteus mirabilis
atggaaataaaaaaattaagacaaataaaactctcacagtggtttaaaggtaaaaccctgcccactaaagagaaaagctatatatctcaactgatgagtggtaaatcatcgtttggagagaaggctgctcgtcgtctagaaagagactatgggatgcctattggttatctggatacccaagatattcaggatgatgaggttgaattcataggtagaataccatcaggtttagtcaaagtacgtggcgaagcatttctaggtgtcgatggtgctattgatatgattgaagcccatagtggatggttaaaaatatacagtgatgatgttgatgcatacgggcttaaagttaaaggtgacagcatgtggcctcgcattcaatcaggtgagtatgttgtcgttgaaccgaatacatcagtaaaaacaggtgacgaggtatttgtacgtacgattgatggtcacaatatgataaaaatctttaataaaactagagatggagactatcaattcaccagtatcaacaactcacataaaccaataacgttatcaccagatcaagtagatacaattcattatgtcgcagctatagttaaacctatcaagtttattgatatctgcgaaaaaacaggtaaagcatttttcccaacagtctaa

SEQ ID NO: 294676 - DNA, 744 bp, Proteus mirabilis
atgcaaaataataatcaattagaagtcacagaggctattcgccaaatggacgctggctctacaaaacctattttatgctcttgtgatgatggaaatctttacgttataaaaagcaatgcatctgtatcaagaagagaattaattcatgaatatgtggcatcagctatagcaaagaaaatcaatttgccgatccctgattttgctatcgtatatgttccaagtgatattgttgattttttacctcctgatctaaaaggaaagctttcctgtggatatgcattcgcttctcaatttatcgaggactcagctagtattacatttacattggctcaccaacttattgacatacaaaaacaaaaagaaatatacctatttgatagattgataaataactcagacaggtcgcttaccaaacttggtggtaatgtaaatattatttataacgtaaaaaaacaaagctattatttaatagaccataatcttgcatttgatccaaactgcaacatagacatgtttgaattccatgtattctcaccaaaaaacagaagttggcaatatgacatgttcgatgcaatatccaatgaagaattaatagaatgtattaactcttcatgcgatgatgcactagaggaaataccaactgaatgggttgatgatgagttatccaaaaatagtatttctaacaatatattacataccgtagctagaggaagaagtagtgagtttaggagtacaataatatga

SEQ ID NO: 294677 - DNA, 825 bp, Proteus mirabilis
atgaaaataccattactttacagcattataagatatgctccatacgcagaaactgaagaatttgcgaatgtaggtgtggttatttgctctccgaaaaccaacgaacttcattttagtttgacgaagtctaacgatgctagaatacagaatttttttagggatgactctatctttaaagtggttaaaccattaatagaaaatgaattaaacgtagcatcagatattgcatctaactttaattctgctgaaggattaagagacttcttttttaacttaaccgaaaagcgtgagtctattttttgttatagccctgttcgtgtattaatggctcacaatgcaaatgaagagcttgataggctatacagcaaatttattaaacaaacaggcaatacaaaagagcgcagagaagacatcttagccgcagaattaagacatagattccaagttcacagcgagctaaaaggcgcatttaaaaaaatcagattagggggagagctcactagttttgaaatgccactagtagcagagacaagtgcaaaagagattctttgtgccataaagccacttgcattcaaccaaattgagccaagcaaaatgcttgagcattgtgataagtgggtagctagaataagacgagctgttgatgagaaaatactgacattcaataatgtactattcactattgaccacaaagtcaaattaaaaaccccagagtcaaaagctattgatgaaattaggtacaccctagataaatataagataactcactttgaagctaaagataaagattcagcaattaagtttgctaagcaaaaattagcctga

SEQ ID NO: 294678 - DNA, 321 bp, Proteus mirabilis
atggcaactataaaagtgaagaaatcacgcaaaccagactttttacgtggtaactctgcaaatagacgtcatgccagacggaaagtcgaagccattgcaattaaagatattgagatgcaactaaactcaatatttcaactagaaactaaaaaattaaaccgcgttgaaaagacactatcgctaagccacattcctgtgactagaagtattgaacctaagtatcaatcatcacctgataactgttgtttaccagacgtattaatattttcaggagttaaaacaaaaatgccccgcaataagttcagagtgaccgctagatag

SEQ ID NO: 294679 - DNA, 540 bp, Proteus mirabilis
atggtctttgtcattaatttcttatgcccagttacgcaaaatacaattagtcagcttcaagataggtgcttaacagctatagcaaatggagctactgaaataaaaatacacatatctagtcaaggtggtgatatagctgctggattcactgcgtataactttttaaaatctcttcctgtaaatgtcaccacgcataacatttctaatgttgaatctatcgcaaatattatctatttagctggctcaaaaagattaataaatcctatggctaggttcctattacacccatttcattgggggttgggaggattgcagagcgtagatcatgaaagactaagggaatgggttttaagtttggataatgacttagatagatttatcaatgtaatgaatacggaatgttcccagcaagactggagaggtataattaaagcatcaacaatatataattcttctgatgctattgagttaaatattgccagtgaaatttccgatgcctccatagaaagtactgataagttgctttgggttatttgttaa

SEQ ID NO: 294680 - DNA, 231 bp, Proteus mirabilis
atgactcaacaagatacttctgtcgttattaacgtcaaattaactttaaatcacattgaaaataaaccacatcgagtagaagtaaacactcaaataaatgcttcagatgaaatccctgagttagctatattactaagcgacttctcagataatttgattggagaaaatgcgataaaagcggcattaaaaaaagccgttttaaataccttagtaaacaaagttaaacattaa

SEQ ID NO: 294681 - DNA, 186 bp, Proteus mirabilis
atgaacattgataaatacacactttgtttagctcaaagccaagcaaggaacgctcattttctcaaagatgaacatggatggaataaggccaatcagacattaaaacaggcttatggcataaaacagcaatacaacgcaaaggtatgcaaagaaataaatatcccaatgaataggctctatggatag

SEQ ID NO: 294682 - DNA, 327 bp, Proteus mirabilis
gtgaataattttaataatcaaatatacccaaatgataaataccctcgactaagttcatctactccgaaaaggaatttcaaggaagttctcgctcatgcaatagctattattgaaggagaaatacctaacaattcgcctagcatagctgaacagcgactcgctatgacgctttggtatatgaatttagatgcatccaagaatcaccctcctcttcctgagcatattcgagcccaacgagattcaaaaaggacatatgtacctagtaataaatttgaagtcgattactacggaagtgatcgccgtcaaggtcaatatttaggggattaa

SEQ ID NO: 294683 - DNA, 1029 bp, Proteus mirabilis
atgacgacttcagtagaaaaaaaggctcaaaagcctattgtattcagtggtgcacaaccttctggtgagttaactatcgggaactatatgggagcactacgtcagtgggtacaaatgcaagatgactacgattgcatttactgtatcgttgaccaacatgccatcactgtacgccaagatcctaccgaactgcgaaaaagaaccttagatacactggctctttatctcgcttgtggcattgatcctgaaaagagcacaatctttgtacaatctcatgttccacaacatgcacaattaggctgggcgctaaactgctacacctactttggtgaattaagccgtatgacccaatttaaagataaatcagctcgtcatgctgaaaatatcaatgcaggattatttgattatccggtcttaatggcagccgatatcctcctttatcaaaccaaccaagtacccgttggtattgaccaaaaacaacatcttgaattaagccgtgatatcgcccaacgctttaatgccatctatggggacattttcaccgtacccgatccttttattccaaaaggtggcgcacgcgtgatggcattacaagatcccgctaagaaaatgtctaaatctgatgataaccgcaataatgttatcgctttacttgaagatcccaaagcggcggcgaaaaaaataaaacgtgctgttacagactcagaagagccacctcgcgttgcgtatgatctagaaaacaaagctggtgtttctaacttattagatattttagcgggtgtaacaggtaaaactatccctgaactcgaagctgaatttgaaggcaaaatgtacggtcatctaaaaggcgcggttgctgaggctgtatcagatatgctgacaaatattcaagaacgctttaacaccttccgtaatgatgaagcactattaaataaaatcatgaaagaaggtgctgataaggcgaaaacgcgcgctcaaacaaccttagataaggtttatgaggctattgggtttattgctcacccataa

SEQ ID NO: 294684 - DNA, 711 bp, Proteus mirabilis
atgacagaaaaaaaactcaaaggtattcgtgctatcgcttttgatcttgatggcacactaactgacagcgctgttgggctaacagaagccacaaactatgcactaaaagcaaaaggcttcccaacagtggataaacaccatgtcaccatttgggttggtaatggtgttgatatgctattaaagcgcgccctacaccattgtggtgttaaagatgtcaccgatactttattaaaagaggtacgtgatctctttgatgagtgctatgcaaactctgtcaaaacaggaagcaatctatttccacacgttaaagagacactagaaaaacttgcttcgtattctctctccttaggcatagtgacgaataaacctactccttttatccaaccactgttaaagcaattaggtatagacaacgacttctcattggtgcttggtggtgatgatgtaaaacaaaaaaaaccccatccagcgccattatatttaacaatgggcacgtttggtgttaaaaaagaagagcttctttttgtcggagattcccgtaacgatattatcgccgcacaagcagcacagtgcccttgtgtggggttaacttatggttataactacggtgaacccattgcagatagcaaacccgattttatactcgacgattttgctgatttgctctctatccttgatattacgtcaatgacaacagtggaacagaactaa

SEQ ID NO: 294685 - DNA, 675 bp, Proteus mirabilis
atgaaagattttctgattgccccttctattttatctgcagatttcgcccgccttggtgaagatacggagaaagtgctcgctgcaggtgctgatgtggttcattttgatgtgatggataatcactatgtccctaacttaacgttcggtgcaccaatttgtaaagcgctacgcaactacgggatcacagcacctattgatgtccacttaatggtaaaaccggttgatcgtattattcctgattttgcacaagcaggagcaacctatatttcatttcatgctgaagccagtgagcatgttgatcgcactattcaattaatcaaagattgtggctgtaaagcaggtttagtccttaatcctgccacgcctctcaattatctcgattatgtaatggataaattagatcttattcttctgatgtcagtaaaccctggcttcggtggtcaatcatttataccaaagacactcgataaattacgtcaagttcgcaagatgattgatgatggtggctatgacattcgtttagaaattgatggcggtgtcaaagttgataatattgccgaaattgctcaagcaggtgcggatatgtttgttgctggctctgctattttcaatcagccagattataaacaggttatcgacaatatgcgccgagaattagataaggtatcgaaatga

SEQ ID NO: 294686 - DNA, 816 bp, Proteus mirabilis
atgaaaaaaaaacgcgcattcctaaaatgggctggtggtaaataccctttggtagatgacattaagcgtcatctacctcaaggtaactgtttaattgaaccttttatgggtgctggctctgtatttttaaatacagaatatgattcatatattcttgccgatataaatagcgatctcatccatctctataatacggtaaaactgtatcctgaaaaatttatgaaggatgctcaattattattcacccctcagatgaataatgcagaagagttttatcaactacgacaagactttaatcaatcaacagatccataccaacgcagtgtgctttttctctacttaaaccgtcattgctacaatggattatgccgttacaactccaaaggtgaatataatgttccttttggtcgctacaaaaaaccttattttccagaagacgaattgatttggttttcagaaaaagcgcaaaaagccttatttgtctgccaaagctattcatcaaccatgacaaatgccaccaaaggttctgttgtatactgtgatccaccttatgcaccgttatcaccgacggcaaattttacctcataccatacaaatagctttagtttccaagaacaacagcatctagctcaacttgcctcaatgttggcttacgagagacagatacccgtgttaatatcaaatcatgaaactgcgttaacaaaagagtggtatgtagacgcgaaagagctacatagtgtgaaagtcagaagaacaattagtagcaacacactaggtcgtagcaaagtgaacgaattactagccttatataaataa

SEQ ID NO: 294687 - DNA, 945 bp, Proteus mirabilis
atggacgagttcaaacctgaaaatgaaattaagagtggcgataactcactcaaacctgatacttcggatagacccgaacgtcgcactaatcgacctcgtaataacccattaaaaaatgctcgtttctctgtatcccgtcaacagatgatgataggtgttggggtactggttctcattcttttaattattgcgataagctctgcgctgaaatcaccagacagtgataaagaaacaacggcctcaacaacaggaacagaaaagaatattgaactgtctcagccttcggtaacatcaatagacaatcaaacatccacacctcaggagctgacgggtcaacaaatacagcagcctacaacgcagccatctcaaaatctccccccaatgattgactctcaaggtcaacgtgttgagatcccaggagatattgttgattcactcaatcaacaacaagcaggtgttaaccaagctgttaatcaacaacagcaaaatacacaaaaccaaccgacaacgccacaaactccggtgaccaaaccgcaaccggcaccaacacaaaaaccagaggtcaaacctacaccaaccaagccggtaacacctcctgcaaccacacagactaagcctgtggcaaaaccaaccacaaaacccgttgcatcaggagctttatcagcaaataacctagcagccattcctgcaacaaattatactttgcagttaagtggtgcgagtcgccaagatacgttagaagctttcgctaaaaaaaatcttaatggaaactacgctatttataaaacccagcgtaatggtaatccttggtatgtactcatctatggtaactatcgtaatataagcgaagcaaaacaggccgtggcttcattaccggcggctgtgcaagctaaaaaaccttgggttagacctatgaaacatgttcatcaggatctaaaaaaataa

SEQ ID NO: 294688 - DNA, 1095 bp, Proteus mirabilis
atggaaaaaatcactgtgactttaggtgaaagaagctatcccattaccattgcttctggcctttttcaccagcctgaaacctttttacctttaaaaaaagggcaacaagtgatgattgtcacaaatgtgacacttgcgccgctctatctagacaaggtaacaaacaccttagaacaacaaggtgttttggttgatagcgtgattttacctgatggggaacagtataaatccctaacggtaatgaatgatgtctttactgcattattagaaaaaaatcacaatcgagatacaacactgctcgcactagggggtggtgttattggtgacttaacaggctttgcggctgcaagttatcaacgtggtgtacgttttattcaagttcctactacgttattatcacaggtcgattcttctgtcggtggaaaaacagcagttaaccatccactgggtaagaatatgattggtgctttctatcaaccggcatctgttgttatcgatctcgattgtcttgcaacgcttcctcctcgtgagttgtcatcaggcttagcggaggtgattaaatatggcattattttagataaagacttctttatctggcttgaaaacaatattgataaactgatagcgcctgaacctaaagccatggcttactgtattcgccgttgctgtgaacttaaggcacaagtagtcgcagcagacgaaaaagagacgagtggtctacgagctttacttaatttaggtcatacttatggtcacgcaattgaagcacatatgggatatggtgtgtggctacatggtgaagctgtcgctgcgggtatggttatggcggctaaaaccgcacaagatttgggtcaatttactcaggcagaaactcagcgagtgatccaattacttaaaaaagcaaatcttcccgtcaatggccctgatgagatgcaacctgaagactatttacctcatatgatgcgagataaaaaagtttccgcgggtaaattgcaccttgtactaccaaaaggtatcggtcaatcagaactacgtgcggatatatctcgcgaacaagtgtataaagcgataacatcatgcattaatgcaaattaa

SEQ ID NO: 294689 - DNA, 576 bp, Proteus mirabilis
atgaatttggcggggcgggttatcattaacgaatatcttagtaataccaaaaacatggcagagaaacgtaatatctttctggttgggcctatgggtgccggcaaaagcactattggtcgtcagttagctcaacaacttagtatggaattttatgattccgatcaggaaattgagcgacgtacaggtgcagatgtaggttgggtatttgatgtagaaggcgaagaaggcttccgtcaacgtgaagaaaaaataatcaacgaacttactgaaaagcaaggcattgtactggcaacaggtggtggttcggtgaaatcaagagaaacccgtaaccgactatcagcacgcggtgttgttgtttatttagaaaccaacattgaaaaacaacttgctcgtactcagcgagataaaaaacgtcctttattgcaaggtgttgaacccgtacgtgatgtactggaaaccctcgcagaagaacgtaatcctctttacgaagagattgctgatatcaccattcatactgatgatcagagtgcaaaaatcgttgcaaatcaaattattgaattattagagaaaaactaa

SEQ ID NO: 294690 - DNA, 1116 bp, Proteus mirabilis
atgaaaagcgtctttttttatttgctgttactactatctatcttgtgctttgctggttttgctcaatccagagatcctttttatccagaacaacctattgatagtaataacactcaccatttcattgataaaacagataatagtgaaactcttcaacaccaaaacagcacattacaccatcgtatctacccactacagtatgctgatgtaaccaccgtggcacagcagttaacgaactatggaatttcattactcagtgatcatggacgaatagccatagataaagattcaaatagcttatccattattgatacagaaaaagcacatactgaaatttctgattggttaaaaattaaagaaacaccacagcaacaggtgcatattaccgcacatattatcagtagcagtcaggatgcgttaaatgagttaggaacgcagtggggattactcaatatgaaatcggcaaatttagaaggtacatcaaacaatactacaacaccccataacatagcatcagcaccgctcacagcaccttctcttgccacattggcactgcatcaaaaaacaaaaaaccccttacattacatagcctttaatatcgccagaattaatagtcgccttttagaattagaactaagcgccttagaacaagagaaacaactcgccatcattgccagtcctcgattaacggctgcacatgaaaaaacggcatctatcaagcaaggaaccgaaattccctatgtcagcagagataacgacaccatccgagttgaatttaaagaggctgttttggggatggaggtaacgccgatcattcaaagaagcaataaaattagattgctattaaaaattagtcaaaacacaccaggtattgccttagtacaaggaggtagtgaacacctttcaatagataaacaagaaataatgacagaagttactattcatgatggtgagactctgatgttaggaggaatatttcaacaaaagcagcaacagcatacagcaaaaattccttttttatcttcactgccattactagggatactttttagccataagcgtgaccaacatagtcgtcatgaattggttatttttattacacccaaattaatctaa

SEQ ID NO: 294691 - DNA, 534 bp, Proteus mirabilis
atgaaaataaagactaattgggtaatttatttcgcccttttacctttttggcaaaaggcactcttaagtttagccccttctataatagtgagtttgttatgttatttattcagcttttcgggctatcagcaggacataaccgcgcaacaacagctcattagccaacaccaaacgcagatacaacaactgcagtcgatattgcattcgtctcctgctatagccttattaaaaacgttacaacatgactataaacttccaccacaaacaggctcagcctatcagcgtttacaacagataatcgataaccatcacttgatacctcatagttggcaacatagtgtcgataatagttttaagctacgtttttcactctcttactcacaattactaacgttattagcgcatctacatcaagcaggttgcgctctttctgcactgctcatttcgcctatcccccctgatttactctcagttgaattgaatttagtcgacataacgacaccaaatgttctagcgcctttgaagtcagagtga

SEQ ID NO: 294692 - DNA, 600 bp, Proteus mirabilis
atgtatcaaataaattttcttccttggcgtcaagccttatatcgacatcaagcacaacggtggctttattggagcatgatactcgttgttattacattcagtgcttgcggttactacgcttattatttagtacaacaagtaaaaacactctcacttttacaatcacaatatcaaaaacgtgagtactcactacaaaagcaatatcacaatgaccaacatgaacagaaagtcacccgcttatatcaacagcgttattggcattattatcaacattggcttcactatttaaattacctcgctttctttcaagcactagaaacactgctccctacggaaggttatatcgcgcagttttctgaaaatgatgcaacattttcgcttcaggtgcggctcccttgtgagcaggcacttacttttatatctaaagttaaccaacaccccaacctgacatcattaacactctcctcttttcaacagagcaaacaagatccccgttacagcgaaataaggttttctggtaagtggcagagttggcaatatcaagtatctcaacataggcatagcgaacaggatgtcgataacaatgaaaataaagactaa

SEQ ID NO: 294693 - DNA, 825 bp, Proteus mirabilis
atgaaaacagataattatcagattggtattgaaattaatatcaatcatatcaatgccgttttagtatttcagcagaataagcaatggaagatcaatgcattttggcaattccctttacctcttaatgataatatagatgatataaatttaagaactatcttaaaacgatggcaacaatctctaccgccaatcaaccgtgttgcactggcattacccgatacagtggcaagttatcataccattgctttatctaacctgatttccctgacaccagcagcctattatcgattagcacaactccgagccacatctcatcaacaagtcaccaaacaagcggtacaattcgattatcggcaacataaccaacatctcgccatccatttacataacaagacactgatagagacttatattgccttattcgccaaaataaacttaaccatcactgcgattgatattccagcttgtgcgttgcgttatgttgccacacatctcaacatatcgcctcacaacatattaattttttgtcaaaataatcaattgctttgggtttgtgcagataaagagatgccccattacggtactctttcttatcaagaccaccaagagcaagaaaaacaattacagcaattactcatcaagcatcattggccacaggagcaatgttatttctcaggtgacaatgcagaatactttcgccaacaaatgcctatttggccaacccaaaaagagcggctatttatgtctataccgcccaaaaagacgctacctctaattgccattggtttagctttgcgtccttgggagacagcatgtatcaaataa

SEQ ID NO: 294694 - DNA, 2463 bp, Proteus mirabilis
atgtataaatatgtcgagcctcaactacccgatgtcgcgacattaaaagatgttcgtttacaaactcctatgcaggtctttagcgcagacggagagttaatggcgcaatatggcgaaaaacgtcgtttgcctcttaccttgcaggagatgcctccgcaattaattaatgcctttattgccactgaagatacgcgttttcgtgaacatcatggtattgaccctattggcatctctcgtgctgttgttgttgcgttaacatcggggcaagcatcgcaaggtgccagtaccatcacgcaacaattagcgcgtaatttcttcttaacacctgagaagaaattaatgcgtaaaatcaaagaagcctttttggctatccgtattgagaaagagcttactaaagatgagatcttggcactttatctcaataaaatttatctaggaaatcgcgcttatggtgtgggtgctgctgcatatgtttactttggtaaaagtgtgcatgatcttagcttaagtgagatggctgttattgcaggtttacctaaagccccttcgacactaaacccactttattcgtatgatcgtgccttaaaacgccgtaatttagtgttacaacgcatgttggaagagaactatattacccgcgaagagtatgacagtgctaaagctgagcctattgtggctaaatatcacgccccacaaattgatttttcagcgccttatttgactgaaatggtcagaatggagatgtatcagcgctatggcgaaaatgcctatacggatggttataaaatttacactacagttatccgcaaagatcaattagccgctgaacaagcgctacgtaataatgttattgattatgatatgcgccatggctatcgcggtgctcaagaggtgctgtggcatgcagggcaaactccttgggatgataaagccattaacgataagctaaagggtatacagacttatggcccattaatccccgcagtggtgttatccgctgatgctaaagaagctcaggtggtattaaaaaatggcgataaaataacactcgatttaaaagcggttcgttgggcgcgtaaatttatttctgatacggctcaaggggccacgccgagcaaagttgatgctgttgtacatgctggtgagcaaatttgggtacgacaaaatagtgaaaatgattggttattagcacagcttcctgaggttaatgcagcttttgtcgcattagatccacttaatggcggtattattgcgctggtgggaggttttgattttgaattgagtaagtttaatcgcgtatctcaatcgttacgtcaagttggttcaaatatcaaacctttcttatatgcggcagcattagataaagggttaacattatcgacattactaaatgacttacctattagtcgttgggatgcaggagctggaactgattggcgccctaaaaactcaccacctacttatgcagggcctattcgtttacgtcaaggtttaggtcaatctaaaaacgtagttatggtgcgcgctatgcgggcgatgggggttgattacgctgcagattatctattgcgttttggttttcctaatcaaaatatagatagaacagagtcattagctttaggctcaccttcatttacaccaatgcaaatggctcgaggttttgcggtaatggcaaatggtgggtatctcattgagccatattttattcagcgtattgaaaatgctgatggtgaagtgatctttactgctgagccgaaagtcgcttgtcctgaatgtaccgatatccccgtgatttatggtgatactacgcgctctattgcattatctgatgattatatggaaaacgtcgcacaatctcagcaagcgcaaccggcagaaacggcgcctgatattgagttagagcaagctcctcttgctgaaacagtcaaagaaagcccatatgctcctcatgtgataagtacgccactggcgtttctaatgcatgatgcgttaagaaccaatctcgttggtgagccgggatggtctggtacaggatggcgtgcattgcgagatttaaaacgtcaagatatcggtggtaagacaggaacgaccaatagctctaaagatgcttggttctctggatatggtgctaatattgtggcgactgcatggattggttttgatgatagtagtcgcaatttagggcgaactgccgcaacgggtggtgaagcgggtgccaaaacggcacaacctatttggaatgactttatgaaagttgctttagaaggtgttccggtacaaatgatgccgatgccaaaaggcgttgttgctgttcaaatcgatcgcaataccggtaagttggcgggagatggaccatcaatgaaagagtattttattgaaggcactcagccaacagaaaaagcaaaaagtgaagtgggtacacggatctttgaggataatggcgaatctaacgagctattttga

SEQ ID NO: 294695 - DNA, 804 bp, Proteus mirabilis
atgagaaaattattattagtggtgcttttggcctgtacttcattggttttaaccgcttgctcaccagatgaaggtgataaaccgttaaaagtggcaataaatacagggccagatcagcaaatttgggatgaagttgttaagctggcaaaagaaaagcagggattagatatcaaggtgatcacctttaatgactacgtgttacctaatgaagctttgcgtaataatgatgttgatgtgaatgcgttccaaaccgtaccttactacgaagctcaaagcaaagagcgtggttatcaatttgaaatcataggtaaaacgtttatttttcctattgcagcttattcaaataaaatcaaaaccatagaggcgcttcctgatggtgctaccgtcgccatttctaatgaagcaaccaccctaggtcgtagtttattattactgcaggctcaaggattgattaaattaaaagatggggtggggtatttaccaacgacacttgatattattgaaaaccctaagaaacttaaatttgcagaaattgatacaccacaactaactcgtacgttaagtgatcctaatatttacctttccatcatcaataataacttctcttcacaagtgggattattagccaaacgagatggtttatttatggaaaataccgattctccttatgttaatttgattgttgccagagccatagacaaagataacgaacgattaaaaaaactcgtcgcggttttccaaagtgatgaaattttgcaaaaagcgcaagaagtttataaaggtgatgcggtgaaagcgtggtaa

SEQ ID NO: 294696 - DNA, 558 bp, Proteus mirabilis
atgaaagaactaaaaaaaccgaatatactcaatattgataacattgcccgttctcggttatttcagatccaatccgttaatctggaatttagcaacggcgaaaaacgtatttatgaacgaatgaaacccgctaaccgggaagcggtaatgatagtccctatcatcaatgatgacctgatccttattcgtgaatatgctgttggcatcgaaaattatgactttggctttcccaaaggggctattgatgcgggtgaaaccccattacaagcggccaatcgtgaattaaaagaagaaattggctacggtgccggctctttaaccgagatagctaaactgtctatggcgccctcctatttttccagcaaaatgaacattgttattgctcaagatctctatcctgaacaattagaaggcgatgagcctgagccgttagttcaaatacgttggcctatcgccaagatgatggacttattagatcatcccgactttaccgaagctcgtaatgtcagtgcactctttttagcacaacgttatttgcaacaagtttgtccaaaataa

SEQ ID NO: 294697 - DNA, 2109 bp, Proteus mirabilis
atgagattatcagtcattatattggctatcttcatgattagcctatttataatggccgcctttctattctttaaaagaaggcggcttgatggctcatatcatcttccatccctcgccaaaccgacttaccgtaaactaacacaagatgattatggggtaattagtgactatttgtcctattttggcacctctaagttttcttctgggtattcgttacaaaactttcctgaaatacccactaaaggtgaagttgttacgacactgcgtaatattgttaatcggtttgcgggatcatcagagggactcaatcattggcgctattacattgatgcggtagagatccatattcctccattactggtgccttatctgcaacaagaaaatgtcctcgatgtcgtttgtactccttctatccccattgtcattggtgtgaatggccattttcttaaagatgaaaaatcacatttttctgcgttaagtttaaaacaactttctgaacccatactgtcaaatggcacttccactatccagaaaaatgaaggtgatgcggcgcatttattacatattcgccaagaaaccaacgaagagtatcggttacatcattcttcaggtttttggaatggctcgttaatttgcttagggttaatcttatggttaacggcattaatgatgccacaagtctttctcccttggataatggctgcgggagggacttttcttgttttaggcttgtttcttatttatcgacccatcatcaaatcacgaaaacaagaagtacactgttttaaagggcgtttaaaacgctggggactgtttggtaattttgatcatgggcaggtaaaaaatatttcgttggggggaattgatttagtttatcctccacattgggaaccttatattcaaaatgatattgataaggtgacctatttagaaatgtatcctaatcatcatgttatcaagcaagggccttatttatcattgcatgatgaagaaaaaaactatccgtataagcgttacattaaaaatattatctttgttgtttgtagcctatttattataggtatgctgtatctctatcaaccgttatcattatcaatgaagttaactttttcatggataaaagagagtgaacctcatttagtgactaactttacggagttagaaacggccaagttgcatgtaggggatattattcaggccaaaggtgtcggaatgtgttatatgcctccaaacctttccagtaagaataataaaacaatatttgcaccttttgattgttcggggatttattggaacaacagcaacccaatgccaatgcctgagtctagtacgattgaaaaagcggcagcattattatatttggttgaagagcagctacaccccgtttctaacaaccgtgtaaacccaagcttaggtcaagctattactaaatctggcatgaatcttttggataattttgatggcattatcttgaaaacacaagatttatgcccgagagaaaatgaatgtattcggcttaaaatggccttggtaaacctaagtaatgtcaatgattggccatcattagttcaacgtgcagaaagtggcaaattaacaggaaccaatgttttattacgtgctgttagtgctgaggccttggaaaagctcgttgacaccaccacatcatcttttatctaccgagaaatagataaggccgcaatactgttaaatagtccaccaccgggtggtgtgcttttaatcagtgatgaaagaaaacagctcgttgattatgcttcaaataccaattctgtatttgaacctacaccattagagcaatggcgagaattacagcgattatctgatattttattacacacaccttttaatactggaggtgtaataacggggatggtaattgatgcgaatggcacgttacaaatctttttgcatagcatgcctgactcaatgaccctgttatattatatcggtaatacgttattattattcttcgctattggatttttgatcctgaatttattttttatcatccggcgccggcgacaaaataatcaacgcatgcataaaatcagtcaatattacgagcactgtttttatcgccctcctcagtaa

SEQ ID NO: 294698 - DNA, 414 bp, Proteus mirabilis
atgagtcaaccatcgcaagaaagcgctgtccgtttagataaatggctttgggctgcacgtttttataaaacgcgtgccattgctcgcactatgattgaagggggtaaagtccattacaatggtgtgcgaggcaagccaagtaaaaatgttgaagttggggctgaaatacgcttacgacaaggtaatgatgaacggacagttacagtcttaatggtgagtgcacagcgcctaggggcggctcaagcacaattgctctattgtgaaacaccagagagtattgccaagagagaaaaaatcgctctagcaagaaaaatgaatgcgttaacgatgcctcatcccgaacgtcgacctgataaaaaggaaagacgcaccttacttcgcttgaaacagacaaatttaccaggatcggattaa

SEQ ID NO: 294699 - DNA, 885 bp, Proteus mirabilis
atgtctaaaaaagacgctttatcacgctttttatttgaaaaaagcgcggtacgtggtgaattagttaccgtaacggaaacctatcaatcaatacttgaaaatcatcattatcctgagccagttcaacacctgttaggtgatttattggtcgcgacaagtttgttaacagctacgctgaaatttgatggtgatattaccgttcaattacaaggtgatggcccagtacgattagtggttattaacggcaataatgaacaacagatgcgcggtgttgcacgttttagtgatgatgttaaagccggtagcagcttaaaagagatgatgggcaatggctttatggttattaccatcacacctaaaaaaggtgagcgttaccaaggtattgtagcgttggatggtgaaacgatagaagcttgtattgataactactttaatcaatcagagcagttacctacccgtgtctttatccgcacaggtctgcaagatggaaaagcggcgggtgcaggtatgttattacaagccttacctgcgagtgcagaacatagtgctgatgagacagcagaacactttgagctattaacacaacttacgcacaccattaaagctcaagagctgtttacacttgatactaaagagattttacatcgcttatatcatgaagaagatgtgacattatatgatccacaaccgatagcattccattgcacgtgctctcgtaaacgttgtgaagatacattagtaacattatctaaagaagatgtagctcatctgttacaagaacagggtaaaattgatatggagtgtgaatattgcggtgctcattatatcttcactgaagaagatattaataatatcaataaattatctagctctaatttgcactga

SEQ ID NO: 294700 - DNA, 1620 bp, Proteus mirabilis
atgaacgttaaaggtcttacccctaaggatctcgagcagtacggtattcatgacattagtgaagtcatttataaccctagctatgacttattatttgaagaagaaactaagccaggattaacaggttatgagaaaggcacattaacctcgttaggcgctattgctgttgatacggggatttttactggacgttctccgaaagataaatacattgttcgtgatgatgttactcgtgatactgtgtggtgggctgatcagggcaaaggtaaaaatgataataaaccactctcaccgcaagtatgggctgatttaaaatcattagttactgagcagctatcaggcaaacgtttgtttgtcgttgatgccttttgtggtgctaatgcagatacgcgattaaaagtgcgttttatcaccgaagtggcttggcaggcgcattttgttaagaatatgtttattcgccctacgcaagaagagttagaaaattttacacctgactttattgtgatgaacggtgctaaatgtaccaatccaaattggaaagcgcagggattaaactctgaaaatttcgttgctttcaacttaactgaacgcattcagttaattggtggtacttggtatggcggagagatgaaaaaaggtatgttctctatgatgaactacttcctgccattaaagggtattgcttctatgcactgttcggcaaacgttggcgaaagtggtgatgtagccattttctttggtttgtcagggacaggtaaaacgacattatcaacagatcctaagcgtaaactgattggtgatgatgaacatggctgggatgatgatggtgtattcaactttgaaggaggttgttacgctaaaactatccatctatcaaaagaagctgagccagatatttacggtgccattaaacgtgatgccttattagaaaatgtcgtggtattagcagatggtagtgttgattttgatgacggctcaaaaacagaaaatacccgtgtatcttatccaatctatcatattgataatattgtcaaaccggtatcgaaagcgggtcatgctaaaaaagtcattttcttaaccgccgatgccttcggggtgctacctccggttgctcgtttaacacccgagcaaacacaatatcacttcttatcaggctttactgcgaaacttgctggcacagagcgtggtgtgacagagccaacaccgacattctctgcgtgttttggggcagcatttttatcactccatccaacacaatatgctcaagtgttagtaaaacgtatgcaggcttgtggagcacaagcttacttagtgaatacgggctggaatggtacgggcaaacgtatttcaattaaagatactcgagcgataattgatgccattttaaatggtgatattgataaagcggagactcaaactctgcctgtatttaatttggcgatcccaacagcgcttcctggcgttaatagcgaaattttagatcctcgagacacctatgcggataaagcacaatgggatgttaaagcggacgatcttgctgatcgctttgtgaaaaactttgataaatatactgatacgccagtagggcaagcgttaacaaaagtgggccctaaacgctag

SEQ ID NO: 294701 - DNA, 702 bp, Proteus mirabilis
atgatttatttacgcaaagcaaatgaaagaggccacgctaatcatggttggctagatagctggcataccttctctttcgcaagctattacgatgctaactttatgggattttccgccttacgcgtcattaatgaagatagagtgatgcccggtgagggttttggtacccatcctcataaagatatggaaattttaacctatgtgcttgaaggtaatattgagcataaagatagtatgggtaataaagaaaatgtacccgccggtgaatttcaaataatgagcgcaggtacaggtatcactcattccgagtacaacccaaatagtgataaaggcctgcatttttatcaaatttggatcatgcctgataccaccggtattacaccacgttacgatcaacgtcgttttaataccacagagagtaaacagcttattttgtcaccagatgcacgtgatggctcgttaaaagtgttccaagatatgacgctgtggcgttggaacctaaaaaaaggagaagaggcacaatatcagccagaagcaggaagaaatatttggttgcaagtcgttaaaggaaagatagcaattaatgacattattgcgaccaccagtgatggcatcgccatcgcgaatgaagatattatctatttcgttggtgatgaagacagtgaagtcttgctgtttgacttacctcctgtaacagcatag

SEQ ID NO: 294702 - DNA, 1206 bp, Proteus mirabilis
gtgggatcattcgatacagttattataggtgcaggggccgctggacttttttgtgcctctttagtaggacaagcgggattatctgttttagttttagataatggcaaaaaagccggcagaaaaattttaatgtctggtggtggacgttgcaattttaccaatatgtatatcgagccatcagcttacttatccgataatcctcatttttgtaagtcagcacttgctcgctatacacaatgggattttatcgagttagtacaaaagcaccatattgcttaccacgaaaagacattagggcaattattttgtgatgattctgcccagcaaattgttgatttattactcgcagaatgccatgaaggaaaagtaagtattcgcttacgtagtgaggtgactcaaatagagaaaaccgccgaaggctttactcttttggtaggagggaaaacaataaccgcctcctctgtagtgattgccagcggaggactttcaatgcccggtttaggtgccaccccttttggctataaaattgcgcaacaatttggccttaatgtattgcccactcgtgcaggcttagtcccttttacattacacaagccacaacttgaacaactcagcccgctctctggtgtggcgatccctgctattgtcaccgctgaaaatggcacccaatttaaagagaatattctttttactcatcgtgggctttccggtcctgctattttacaaatctctagttattggcatgcgggagagaatgtgagcattaacttacttcctgacacggatttggaaggctatttacaagaaaaacgacaagcacagccgaatcaattattaaaaaatacactttctcgcctactaccgaagcgttttatagagataatgattgaaaataatcaactgcctgatacctcactggctcaacttagcaatgaacgtattacacaaataacgacgttgctacaagcatggcttgttttacctaatggcacagaaggttatcgcactgcagaagtcaccctaggtggtgttgatacccgtaatctctcctctaaaacgatggaagcaacaaagataacaggtctctattttattggtgaagtggttgatgtcacaggttggttaggaggatataacttccaatgggcatggagctctgcttatgcctgtgcccaagcattgatctctcgacacatgactaagtag

SEQ ID NO: 294703 - DNA, 1539 bp, Proteus mirabilis
atgcgccgcgttcatgtccaactaactggcttaacgtctatgctacatttgtttactgacctggaatttcatacaggtttaatgttggttttagcactgattttcgtgctattttatgaagccattaatggctttcatgataccgcaaatgcggtagcaactgttatttatactcgtgctatgcgtgcgcaatttgcggtcgtgatggcgggtgtatttaacttccttggagttttgctcggtggattgagcgtggcttacgctattgttcacttattaccgacagatcttctgctaaatgtgagctcggctcatggccttgccatggttttttcgttgctgttagctgccattatctggaacttaggtacatggtatttcggtattccagcatccagttcacatacgctgataggtgctatcattggtattggtttaacaaatgctatcgtgacagactcgtcaatcgttgatgcattaaacatacctaaaatgatcagtatcttcctttctcttatcctttccccaattattggcttggtgattgctggcgcgatgattttcttgttacgtcgctattggagtggcacgaaaaaacgtcgtcgtatccacctaacccctgccgaacgtgagaaaaaagatggtaaacgcaaaccaccattttggactcgtaccgcgctgattttatctgcggtaggggtgagtttctcacatggtgcgaatgatggtcagaaaggtattggtcttatcatgttagttttaattggtgtcgccccagcagggtttgtcgtcaatatgaatgctagcggatacgatatcactaaaactcatgatgccgttgtacacttacaacagtattatgagaagcatcaaccagctctacaacatgcgattgaaaataccccggtagtatcagcacaagctgatcctaacgacacggattttcattgtaatagcgcaagaacgccaattgttctcaatcaaacagaacaaatgttgtctggtattagctcttatgatgagctgagtgcagaccagcgtgctcaaatgcgtcgcttactgatgtgtattgctgatacagctacggaagttgctaaactaccagaaactagcgcccaagatgcacggttcttaaaaacattgagtcgtgacctgctaaatacagtggaatatgcaccaatttggatcattatctctgtggctttagcgctctctatcgggacaatggtaggttggaaacgcgttgcggtaactatcggtgagaagattggtaaaaaaggtatgacttatgcgcaaggtgtttctgctcaggtaactgctgcagtttctatcggtgtagcaagttatacaggtatgccagtatcaacaacacaagtgttatcatctgcggttgcaggtacgatgattgttgatggtggtggggtgcagaccaaaaccgtgaaaaatattgcgctggcctggatcttaacattaccagtgagtattgctttatccggtgtgctttattggatttcactttcactgctggtgaatagctga

SEQ ID NO: 294704 - DNA, 333 bp, Proteus mirabilis
atgtttagtgtcattgttatcttttgggcgttgtgtattctttgcctgattaatatgatgcgttatttctcatcaattcgggtattactcaccatattgcgccaatctgatccattactttaccaatctgtcgatgggaatggatttttcactatgcatggtcaattttcaaaacagttaagacttattcgatatataaatcaacgccaatatactaaccaccatgatcctgaagtgattatgcgttgtgaacggatttatcgacaattctacctagtaagtcgcttttgtattcttgctgtagcaagcttgatcgccatgattatttggtag

SEQ ID NO: 294705 - DNA, 435 bp, Proteus mirabilis
atggcttataagcatattctagttgcagttgatttatcccctgagagcaacgtcttggtgcagaaagctgtatctatggcaaaaccctataatgccaaagtttccttaattcacgttgatgttaactactctgatctgtataccggtttaattgatgttaaccttggtgatatgcaacaacgcatcactgatgaaacacgtaatgcactaaaagatctctctgataactcaggttatgagatccaagaaacactcagtggtagcggggatttaggccaagttcttgttgatgcgattaaaaaatacgatatggacttagtggtttgtggtcatcaccaagatttctggagcaaattgatgtcatcagcacgtcaactaattaataccgttcatgttgatatgttaattgttcctctgaaagatgatgaagagtaa

SEQ ID NO: 294706 - DNA, 1341 bp, Proteus mirabilis
atgaatagatctggctcattatcttcgtttttagaagaggtagaaaaatataacgctcatcaacctgaataccatcaggcggtacgtgaagtttttaccactctgtggccttttttagagaaaaatccacaatatcgtgaacaatcattacttgagcgcttagttgagcctgaacgtattattcagtttcgcgtctgttggttagatgataaaggacaagttcaagttaatcgcgcatggcgagtacaatttaactctgctattggtccctacaaaggtggaatgcgttttcatccatcggtaaacctctctattttaaaatttttaggttttgaacagacctttaaaaatgcactgacaacactgccgatgggaggcgctaaagggggatctgattttaatcccaaggggagaagccacgcagaggtgatgcgtttttgtcaggcgttaatgactgagctctatcgtcatttaggggctgatactgatgtccccgcgggagatattggtgtgggggcaagggaagttggctttatggccggaatgatgaaaaagctctcgaatagcaatgaatgtgtctttacgggtaaaggtttatcatttggtggcagtttgatccgcccagaagccacagggtacggtttagtctattttactaacgcaatgcttaaacgtcacggcatgtcccttgacggaatgcgtgtagccgtttctggtgctggcaatgtggcacaattcaccattgaaaaatgccttgagctgggtgcgaaagtggtcaccgcttcagattctggcggaaccgtggtggatgaagctggatttacaaccgaaaaactggctcgcttaactgaaattaaaaataattatggtcgtattgaagagtacgccaaagagtttggtttaacttatcttgaagggcaacagccttgggctgtcgctgttgatattgcactaccttgtgctacacaaaatgaattagatttagacgccgcaaaagtgttaattaaaaacggtgttaaagctgttgccgaaggcgcaaatatgccaacgaccattgcggcaaccgatgcttttattgaggcgggagtcttgtttgcaccgggtaaagccgctaacgctggaggggtagcaacttcgggattagaaatggcgcaaaacgcagcacgcttgagttggaaagctgagaaagttgatgctcgcttacatcatattatgctggatattcatcacgcttgtgtaaactatggcggtgaaggtaaacaaactaattatattcaaggggccaatattgcaggttttgttaaagttgctgatgcaatgttagcgcaaggcgtgctgtaa

SEQ ID NO: 294707 - DNA, 750 bp, Proteus mirabilis
atggctacgcaaattgattttactctctcgaataaagtggctgttattactggtggtgcggctggaattggcttatctatcgcacagatgtttatcgaaaaaggggctaaagtcgctttgttggatagatcagagcaggttgagcaagtggcgcatcgtttaaatagtgcggtggggatctggtgtgatgtttcaagtgaagagtccgtaaaacaagcggtacattcagtcattgaagagttcgatcgcattgatattcttgttaattgtgcaggtattgtcgctttagctcccgccgaatcgttatctcttgaagattggaataaaaccttatcagttaatttaacggggacttttttactgtgtcagcaagtggggcagcatatgctacaacgcgggcaaggtaagataattaacctcgcctctcaagcaggtattatcgctttaccagaacatattgcctattgtgcaagtaaagccgctattatcaatatgacaaaggtgatggcgctagagtggggacccaaaggcctacaaatcaatgcgatatcccctactattgtgatgaccgatttaggtaaaaaggcttgggaaggtgaaaaaggtgaacagatgaaagcgcaaataccggcaaggcgatttgctgagccagaagagattgctgccgcggctgtatttttagcaagcggtgcagcggatatgatcaatggccataatctggtgattgatggtggatatactattcaatag

SEQ ID NO: 294708 - DNA, 747 bp, Proteus mirabilis
gtgaatatctgtttactttgtgaagaaggcgctgataacagcgccttatctgctttagcacaacgttggggattaattcacgacgccacacaaactatggcgttagtcttaacgcccactcaccttgaattgcgtaaacaagatgagcctaaacttggtgggatctacgtggattttgtcgcgggtactatggctcatcgtcgtaaattcggcggtggtcgtggtgaagcggtagcaaaagcagtaggtattaaaaaggattatctacccgatgtggttgatgcaacagcaggattaggccgtgatgcctttgtattagcctctattggttgtaacgtaagaatggttgaacgtcaccctgtggtagctgcattacttgaagatggcttgaaacgcgcttatctcgatgcggatattggtgagtggatgcaacagcgtatgaaactcatttatgcttcatctgcacaggctctcacgcaaatcagccctgcacccgatgtggtctatcttgatcctatgtatccccataaaaccaaaagcgcattagtgaaaaaagagatgcgggtattccaatctcttgtcggtgcggatgaagatgctgatgcactattagcaccagccatggcactggctaaaaaacgagtggttgttaagcgtcctgattatgctgagccgttaaataatcaacccgcacatgcaagtgtcaccaccaaaaatcaccgttttgatatctatccttgtatctag

SEQ ID NO: 294709 - DNA, 2043 bp, Proteus mirabilis
atgtcaaatccattacttagcacaacgggattacctgcattttcccagatagaaccaaaacacgttgtacctgccattaaagaagttttagctaattatcgtgcaaccgtagaaaaacttctcgctgacaacaccgcttttagttgggataatctttgccaaccgttagccgaagcgggtgataaactttctcgtgtttggtctcctgttagccatttaaactctgttaaaaatagcgctgaattacgcgaagcttacgagcaaagcttacctttgctgtctgagttcagtacttggatgggtcagcacgaaggattatatcaagcctataaatctatcaaagaaagcgctgattttgccttactgactcaaccacaaaaaaaagccgttgagaatgcattacgtgactttgaattatccggtatcggtttaccaaaagagaaacaacagcgttttggtgaaatcagtgcacgcctatcagaactgagcgccaaatttggtaataatgtgttagatgcgaccatggggtggtctaaacttatcaccgatgaaagtgaacttgctggtatgccacaaagcgccattgatgcagccaaagcaatggcacaagcaaaagagcaacaaggttatctattaacgctcgatatgccaagctatctacctgttatgacctatgctgataatcgtgagcttagaaaagagatgagtattgcttatagcactcgagcctctgatcaaggccctaatgcaggtcaatgggataatagtgaagtgatggcggaaattttagcattacgccatgagttagctcagttgctcggctttaaaaattatgccgaaaaatcacttgccactaagatggcagaatcgccagaacaagtacttaatttcttaactgatttagcctctcgagcacatcctcaaggcgaaaaagagctggctgaattaacgcactttgccaaaacacattatggtgtggagaaactagagccttgggatctggcttactacagcgaaaaacaaaaacaacatctattctccattgatgacgaacagttacgtccttacttcccagagcaccgtgcattaagtggcttattcgaagtggttcaccgtatctatggtttaacggctaaagagcgtcatgatatcgacacttggcacgatgatgtacgtttctttgaattatatgatgaaagcaacacattgcgcggtagcttctatcttgatttatacgctcgtgaacataaacgcggtggtgcttggatggatgattgcattggtagaatgcgtcatgctgatggcacactacaaaatcctgtcgcctatcttacctgcaactttaataaaccagtaggtgataaacccgcactctttacccataacgaagtaaccacgctattccatgagtttggtcatggtttacaccacatgctaacgcaaattgataccgctgatgtatcaggtattaatggcgtaccatgggatgcggttgagttaccaagccaatttatggaaaactggtgctgggagccagaagcgttagcctttatttctggccattatgaaactggcgagccattaccacaggctatgcttgataatatgctcaaagcaaaaaattatcagtctgcgatgtttgtattacgccaactagaatttggtctgtttgatttccgcctacacgctgaatatgatccggctaaaggtgctcgtatcatggaaatactaaatagcgtaaaagagaaagtctcggtagtacctgcaacaccttgggcgcgattccctcatgcctttagccatatttttgccggtggttatgcagcaggttattacagctatttatgggctgatgtactggcagctgatgccttctctcgcttctctgaagagggcatttttaatcgccaaacaggtcaatcattccttgataatattttaacccgtggtggttcagaagagccaatggagctgttcaaacgcttccgtggtcgtgagccgaaactcgatgcaatgcttaaaggctatggcattaaagggtga

SEQ ID NO: 294710 - DNA, 1026 bp, Proteus mirabilis
atgagtgataatcttcctgaagcaccacagggtgaatttattttgttccgcagtgaagatggtcaaactcgtgtcgaatgccgctttgagtctgatacgttgtggttatctcaatcctcgatttgtgagctttacggtaaagctaagtccacgattagtgagcatattcgcaatatttttactgagggtgagttagtcgaagattcagttgttcggttttaccgaacaactgcggatgatgctaagcagtacaatgtaaaatacttcaatctctcaatgatccttgccattggctaccgtgtccgctctgtccgtggtactcagtttcgtcagtgggcaacgcaaacgctggaacagtatctgattaaagggtttgtgatggacgatgaacggctgaaaaatccgcctatcggtcagtcagtcgtaccggattactttgatgagatgctcgaacgcatccgtgatattcgtgccagtgagcggcgggtatatttacgggtgaaagagatcttcaccatggcagcggattacgaaccatccaataaagaaacaactcgtttcttccaaaccatccaaaacaaactgcattttgcttgtactggcatgactgctgcggagcttatagctagtcgcgcagatgccagtcagccggatatgggcttaaccagctataaatttgatgaggtgcgtaaaaccgatgtcacgattgcgaagaattatctacgcgaaaatgagctgaaagaattaaaccgtatcgtcaatatgtggctggattttgctgaagaccaagcgctgcgccgtaagcaagtttttttacaagattgggatactaagctagatcagtttttaagtttcaatgaccgtgatgtattacaaggcgctggtgggattagtaagaaagccgctgatgaaaaagccaaagagatatttgatatttatgctcaaaaacgtcgtcggttaaaagaaaccgaaggggaaagggcaaatattgcggcattgaaagatttgctaaaaaaaggtaagtaa

SEQ ID NO: 294711 - DNA, 477 bp, Proteus mirabilis
atggaacagaaaataattgttatgggggcagatccttcaggttatgagcttaaaaatgccgtcaaatctcatctacaagcaaaaaattacacaataaaagatattaccgaatcagggcctattggttattgtgatgttggtgataaagttggcgctattatttcagaacatcctgaatatattggttttgttttttgtggcacagggatgggagtaagtattagtgctaataaacataaaaatgtttattgcggggtttgtgagagtgttaccactgcgcgtttttgtaaagtgattaataattgcaatatgctagccatgggggggttactgattactccctttaaagccaatatgatggtagatgcttatttatctgcaacctttacacaagggttttctgaagcgaccccagatgatttacaatgtggcttacagaccatgaaagaggttgaaaagcgcatttatactgactaa

SEQ ID NO: 294712 - DNA, 621 bp, Proteus mirabilis
atgaatcgctttgttattgcagagccacaacgatgcatagggtgtaatacctgtatggcagcttgttcggaagtacaccaagctgtgggattacaggcgcatccgcgtcttacagtggtaaaagtggaggatcagaccgccccgatgctttgtcggcattgtgaggatgctccttgtgctagtgtgtgcccagtcaatgccattactcatgaagataatatgatctttcttaatgagagcttgtgtattggctgtaagttatgcggtttggtatgtccttttggtgcgattacaccatcaggcagtaaacccgttaacttaccggctgtgtttgaccattttgtgcctgaagagatgctggcagatgtgcccgcaagtcttcctactaccaatccattccttgcatggaatgcgggtattcgcgcaatagcagtgaaatgtgacttgtgtgctttctcagatgaggggcctgcttgcgtaaaagtctgtccgacagatgccttacatctagttgaagaagatagccttgaagagcagatgaaagcgcgtcgtttagactctgtgatggaacctatgacaagtcttgatgatctatctacgttgacacaggagcgcaagtaa

SEQ ID NO: 294713 - DNA, 2016 bp, Proteus mirabilis
atggaacctcttcagttactgatgtggtcaatcatcctgtatgttgttggtggcgttattgcactgtttttaaagaaacaggaaggattggcaatcctaatatcggggatcagcgcaatcatcggtggtgtattaggtgttttaagcgcattaccggttattttaaatggtgaaacaatcagttttgctatggctgggccatttgatttcgccgcttttgtggtgcgtatggatatgcttggcgcctttatggtgtttgtcatttctttactcgtcactgtttgtgcgttgtattcactctcttatgttcaagaatacaaaggtcgcggcgcatggagtatgggattttttatgaatctctttattgcttccatggtaggactgattgttatggataatgcgttttactttattatcctatttgaaatgatgtcgttagcatcttggttcttagtcatcgctgaccaagatgacgaatctatccacgccggtttactctacttctttatcgctcacgcaggctctgtgctaatcatgatagccttcttcttaatgtggcgtgaaagtggtagccttgattttgattcattccgtcaactttctctttcccctgcaatggcttctgtggtgttcttactgggcttcttcggatttggtgccaaagccggtatgttgccattacacagttggttgccaaaagcgcaccccgcagcaccctctcacgcttcagcattaatgtctggggtgatggtgaaaattggtatttttggcatcatcaaagtaggcattgatttattaggtgcttcacaaatgtggtggggaattgtcgttctcgcattcggtgctgtctcttctgtattaggggttatgtacgcattagcagagcacgatttaaaacgtctccttgcatggcacaccgttgaaaatatcggcatcatcttgatgggcgtgggagttggcatggtaggtatggcaaccgatcatccagtgattgccgctctcggtctgcttggtgcgttataccacttattaaatcacgcggtatttaaaggattattgttcttaggtgccggagccattattaatcaaattcacactcgtgatatggataagatgggtggattagccaaactaatgccttacactgcaacggcattcttaattggttgtatggcaatttcagcattaccgccattaaatggttttgtgagtgagtggtatacttatcaatcactatttacgatgagttacgatggtaactttgtcatgcgcttaagtggtcctattgccattattatgttggcaattaccggggcattagcggccatgtgtttcgtcaaagtttatggcgtcagtttttgcggtggcccacgtagtgagcaagcgactaaagctaaagaagtaccgttgccaatgaccattgctatggggttattagcacttttctgtgttgtattaggtgtgggtgcggcttttgttgcgccaattattgccaatattgcaatgtcacttagcgaaaccagtgcattaacagtgactcaaggtgcgatattagtccctgatagtgcatcacaagcgatgttctctcctgccttaacatttattttattaatcgccttaccactaattccattcttaatttatctcggcttaaaaggtggtcaacctgcatttcgccgtaaaggtaatccatgggcctgtggttatgtctgggaaaaagacatggcagtgtccgctgggggctttactcaagcactacgtagtatgtttgcaccactttatcgtatgcgtaaacagcttgatccatcaccttggctttcacgtggctttaataaaacacagcgcggtgctgaaaaggtcgaaccattctgggatgaaagcattatttatccattggttcgtggtatccaacgttttgctaaacgtatccaatgcctacaaggcggcgatttcagactctattgtctatacgtggtggcagcgctggtcatcttgcttttagttatcgcagcgtaa

SEQ ID NO: 294714 - DNA, 954 bp, Proteus mirabilis
atgatgactttccaagaaacaccttcgtttatgatgggaatattcgcggttattcaagcactctttctgctggcgataaccccattatgtacaggtatttctcgccaaattcgtgccaagatgcattcgcgtcaaggtcctggtatttggcaggattaccgagatatttttaaattacttaaacgtcaatccgttgctcctgagcaatccggtgtgatcttccaagtaatgccttatgtgttattaggcagcatgttattagtggcaatggcattgcctgtctttacggcaacctctttgtttggcggtgcggctgacttaattgcattaatttatctgtttgcactatttcgtttctttttctctttatccggtttggattcaggtagtccatttgcgggtattggggccagccgtgaactgacattgggtgtattagttgagcctattttagtgctttcgttgattgtggtggcattgattgtgggttcaaccaatgtcggcactatcagtgcgacactcgcccaaggttgggtatcacccacagctacacttttagccttattggcttgtgcttttgcggcatttattgaaatgggcaaaatgccttttgacgtcgcggaagcagagcaagaattacaagaaggaccactaaccgagtactctggctctggttttgccatggttaaactgggtattggtttaaaacaagtggtgattgctgagctgttccttgctgtatttattccttttggcaaagcgactgaatttacttttgtcgcgcttcttgtcgccttagtgttaatggccgtgaaattgctggtcgtgtttgtattagcgtcattagttgaaaacagtttagcgcgtggtcgcttcttactgactcagcatgtgacatggttagggttcggtgttgcggcactggcttttgttttctatttaactggtctataa

SEQ ID NO: 294715 - DNA, 1440 bp, Proteus mirabilis
atggaaaatatagctcttgcgaccttactcatcccatttgcaggggcgttaattacgtccatactgccaaatcggatggcgaagtggttatgtacactgttcgctttattagccacattaggtactgttgttttaggttggcagttcctcgctgaaggtaaagtcgataccacaattacgctagtacaatatggtgatgttgcgctatttggttttaccattgatcgcgtcagtaccttaattgcttttgccgttgtgttcttaggattactcgttagtttttattcaacgggttatctcactaacggtaaccgtgagcatccccatgatgggactcgtcgttattatgctttcctgttgatctttattggtgctatggcaggtttagtactgtcatctaccattttagggcaactgctgtttttcgaaattactggtggttgttcttgggcattaattggttattaccaatcagagaagtcattgcgttcggcaatgaaggcattgttaattactcatgttgcgtcaatcggtctgtatcttgcagcagcaaccttgtttgtaagtacgggttcgtttgaactaactgcgatagcaacattagatgagccaacaaaactgattgtctttggcggtattctgtttgctgcttggggtaaatcagcacagcttcctttacaagcttggttacctgacgcaatggaagcaccaacacctgtaagtgcttacttacacgctgcgtcaatggttaaagtgggtgtgtatatctttgctcgtgccattatttctgccggtgatgtccctcatatcattggttgggtggggatcgccatggcggttatcactctgatttatggctttatgatgtatctgccacaaaaagatatgaaacgtctgttagcatggtcaaccattacacagctttcttatatcttcctcgcgttatctatctcaatctttggacctcgtgaagcctttaatggtggtgtggcttatatctttaaccacgcttttgctaaaagtttgttcttcttagtcgcaggtgctctaagttatagctgtggtactcgtatgttaccgcgcttaaaagggttaattaataaatatccattgctgggtgtgggcttttgtgttgctgcgttagcgattgcaggtgtacctccactcaatggtttctttagtaaattccctatctttgcagcaggctttgaattatcgagtgtgttctgggtaatgacacctattatggttctggtgctgattgaatctgttgcaagtttcacttggtttatctactggtttggccgtgtggtgccaggagaaccaagtaaagaagttgcgcaaggacaaccggttcctatggcaatgcaaattgtgattggaatactgattattatgtctttcgcatccagtgttattgctgtgacttggctaggataa

SEQ ID NO: 294716 - DNA, 651 bp, Proteus mirabilis
atgactggagcacttattgttaataatttagcggggttaatgatgatcacctcgctactggtgataggcgcaagaaagcctattgcttcctgttggttttatgctctgcaatcctttgttttggtgatgatttttgtcactttagcaaatacgctagatgcacatcaactgacactttgggcgataaccgccttctttaccaaagttctactcgttccacttatcttaggatttgccttccgcaaattatccgatccgagcgccaatatcagtgtcattaaaccggcattattgatgttattagccgccgtgattgtgattttatgctggtttgtggttgagccaattcaaatacctatggtggcggaattgaaacctgcattagcggtctctttaggccattttatgctaggtctactgtgtattgtgactcaacgaaatattctaaaacaagcatttggttactgcttaatggaaaacggctctcacttaacactcgctttattagcgtggagggcaccagagttggtagaaattggtatagcaacggatgccatttttgctgtgattgtcatggcagtattggcgcgtaagatttaccgcacgctcaacacactgaacgtggatcaactgaccgcgctgaaggggtga

SEQ ID NO: 294717 - DNA, 1569 bp, Proteus mirabilis
atgaatcaaacaaccatgttaacaatcttaatgtttgcaccgctggtattttcgatattggcatttttaagcccattattgaaagcagcggcacgtcctatcgttacaggcattcatactataggtatttttgtcttagtcattgccgcgttaggcactgttgctgatgtgatgtcccatggcgaaatactggcagcagcgaaatgggttcatgttgatagtttaggggcactatttctagccattttaggcatcattggttttttaaccggcctgtattctattggttatatgaatcatgaagtggatgagggcgaaatttctgttcgtactttatgtaactactatggtttcttccacctcttccttttcaccatgttattagcgatcaccagtaataacttgatcttgatgtgggccgcgattgaagccacaacattaagctctgctttcttagtaggaatttatggtcaacgctcttcattagaagctgcatggaagtacattattatctgtagtgtcggtgtcgcatttggtctttttggcacaattttagtttatgccaatgcagcaagctttatgcctgatcctgatcaggccatcttctggacagaagtgttgaaatatacacatcagttagatccaacactgatgcatttagcttttgtatttattttgatcggtttcggtaccaaaaccgggttattcccaatgcatgcatggttaccagatgctcacagtgaagcgccaagccctgttagtgcgctgttatctgcggtgttattaaactgtgcgctgttaatcattattcgttactacattattattgatgcagcaataggcactgaattcactcgtaacctattgttaatctttggctgcctctctgttgctatcgccgcgttctttattttgatccagcgcgatatgaaacgcttattagcgtactccagtgtggaaaacatggggttaattgcagtggctctgggtattggtggcccgattgggattttggcggctttattccacacgttaaaccacagcttagcaaaagcattgctgttctgcggctctggtaacgtgttactgaaatacggtacacgggatctaaatgtcgtgaaaggcatgtttaaagtcatgccattaagtgctgcattatttgctggcggtgctttggcattagggggcatgccaccatttaatgtctttatcagtgaatttatgattgttgttgcaggcttagcagctaagcatatgggattaacaattctattattattgttattaaccgtagtattaggtggattagttcgtatggtagctaaaacggtatttggtccaaaaccggatgtggttgccaaaggtgaattaggtctgttaaccacactaccgatgatcattttgattgcgcttatgttgttaatgggaacacatattcctaagccagtcagtgagttattggagaacgcagccaatatcgtgatgaatatcgatgagagtggatcaccaaattatacatggccaacaacgttaatcagcaatccatcaatatcggttcaggagaagtaa

SEQ ID NO: 294718 - DNA, 1734 bp, Proteus mirabilis
gtgagctatcaaaattatgtcagtagaaaagagggaaacgaactcggtgcgggttatgttgctaaagttcgagaaaaattcccatcagctattcttgatgaagagcgacaaaccgctgatcaattgacgataacagttaaaacgggatcactgcctgaagtggtggagtatctatattacggtttaggaggctggttacctgttttatttggtaacgatgaacgtagtttaaatggtgattatgccgtctattacgccttatcgatggaagagggtgaaaagtgctggatagtcgttaaagcacacgttagtcctattacacttgaatttccttctgttaccccgcgagttcctgcggcagtatggggagagcgtgaaattcgtgatatgtatggtcttattcctgtgggcttaccggatgagcgtcgtttagtgcttccagatgattggcctgaagatatgtatccgttacgtaaagatgccatggattatcgccaacgtccaacgccaaccacagaaacagaaacctatccgtttgtgaacgaaggcaaacaagatgcgcgtgtcgttcctatcggccctatgcatattacgtctgatgaaccgggacatttccgtttatttgttgacggtgaaaatattgttgatgctgactatcgcatgttctatgtacaccgtggtatggaaaaattggcagaaacccgtatgggctataatgaagtgactttcctatcagaccgtgtctgtgggatttgtggctttacacatagcgtggcatataccacttctgttgaaaatgcgttaggtattgaagtgcctcgtcgcgctcatactatccgttctattttattagaagttgaacgtctacatagtcatttattaaatatcggtttagcaagtcactttaccggatttgataccggtttcatgcaattcttccgtattcgtgaaaaatccatgcagattgctgaaatgctgacgggagcacgtaaaacctacggcttaaacttaattggtggtattcgtcgcgatattttaaaagatcaacgtattaaaactatccaattagtcagagaaatgcgcaaagaagtcactgaattagtcgacatcttactttctgcgccaaatatggaacagcgtaccgttggggtcgggattttagataagaaagtcgcgcgtgatttcagtccggtaggcccgatgatcagagccagtggttttaaacgtgatgtacgttttgatcacccatttgcagattatggcaacttaccattaaccctatttagttatgaaggtggggatgttttctcacgtgtgatggtgcgtattaaggaagtgcttgattctatggcaatgattgaatatgccttagataatctgccggaaggaccgttattaacagaaggctttacctaccaaccttataaatttgcacttggttttaccgaagctccacgaggtgaagatattcactggagtatgttgggtgataatcaaaaattattccgttggcgttgtcgtgcggccacttacgctaactggccagtactacgttatatgttacaaggaaatacggtttctgatgcaccattaattatcggtagcctcgatccttgttactcctgtactgacagggtaacgcttgtcgatgtgaaaaaacgtaaatcgaaaacagtttcttataaagaaattgaacgttatagcatcgaacgtaaaaattcgccgctcaagtga

SEQ ID NO: 294719 - DNA, 555 bp, Proteus mirabilis
atgttaaaattgtttaaaaccattatcaaaacaggcgatgcaacaacaaaatatccttttaaaccattagaactccctgatggttttagaggaaaacctgagtactcacctgagcaatgtattgtttgtggggcttgtacttctgcatgtcctgcgaatgcactgaccatggaaaccaacctcgaaacgggtgaacgtcactggcagttatttattggtcgttgtatttattgcggccgctgtgaagaagtctgcccaactcgggcaattgtattatcagatatgtttgaaacggcagtcacacaaaaatcagatctttatattaaaggtacatttaaattattaagctgccgtgagtgtcatcaaccctttacacctagaaaatctgttgattacgctatggcactgctggtgcaatcgggttgggatgcacaaactgttgaggcaatgcgtccacaatttgaaacttgcccagaatgtaaacgtaaacataacctactctctgatggtcaagaaaatattagtatgggcaatgtcgggagtgtgaaaaaatga

SEQ ID NO: 294720 - DNA, 783 bp, Proteus mirabilis
atgagtctaccagaaattcccatcaatcatcatgtcagccaacctatcacattaagtgatcaggtgaaaaagctgaaaaaaacgttattgaaagatattcaacgttccgcgtatgtttatcgtgttgactgtggtggttgtaatggttgtgagattgaaattttctctgcaattacacctgtttttgatgccgagcgatttggtatcaaggtggttgcttcacctcgccatgctgatattttgttatttactggtgccgtaacacgccaaatgcgtgtaccggcattacgtgcttatgaatcagcaccagatcccaaaatttgtatctcttatggggcttgtggttgtggtggtgggatattccacgatctctattgtgtatggggtgggagtgaaaccatcgttcctattgatgtgtggatacctggttgtcctccgacacctgcagcaactatttatggttttgctgtggcattaggcttattagatcaaaaactaaaaggtcaaaatcacactgaagtggataatgagcaagcgtcactgttactgccgtcgatccctcttgatactcgcgtaatgatagagcgtgaagctcgtcgtcttgctggttattatcaagggagacaaattagtgatcatttcctcactttacttgatggtgccacagtacaagaagtcagtgggcgtgttgatgaatggttacgccaagcgaatgatcctcgtttagcggaaattgtaaaacgactggtgcattcattaaaccaaggaggcgttcatgtctga

SEQ ID NO: 294721 - DNA, 411 bp, Proteus mirabilis
atgtctgatgacgctaaagtttacttttggtcattaagacaaaagtttgttgatagcgatgatgatatacctgagcaggcgcaacaagtgatgtactactcgttggcgattggtcatcacgtcggcatgattgactgcttaaaaacagagttggtttgtcctttagaaaaatatcaagcatggattgatttattacctgagggggaagcaaaacgaaaaatgcaaggattgctaactttcggtgagatcaatatcaattctgaacatactcacatgttagctttagctttcgatcctattgccaaaagtgatgatccactttttagtgagtggagccaaacgctgattaatttattaggtgaaattgttatagagccagcgatttatttgatagtaaagagaaaaccatga

SEQ ID NO: 294722 - DNA, 501 bp, Proteus mirabilis
atgagtgaaacaatgacagcacctaaggtcgtattaacggtaggaaatagcatgatgggggatgatggagccggtcctctattagcggacttaatggaagcaaacccgattgatggttggatggttatcaatgggggaagtgcgccagagaatgtttcttatcaaataagagcattacaaccgcaatgtgttgtcattgttgatgcggctgatattggtttaaaacctggtgaaataagggtaatagatcctgattatattgcagaaatgtttattatgagcacccataacatgccgttaaactttctgatagatcaattaaaggacgatatccccgatattactttcttggggatccagcccgatctggtgggattctattacccaatgaccgaagcggtaagaaacgctgttgataaagtttatcaaggcattaagtcttggcgagttgattactttcctgagcttgaagtctgtgatgaagacgatatcgaagaatag

SEQ ID NO: 294723 - DNA, 993 bp, Proteus mirabilis
atgtcctcttcttttccccaattaagtattgtggtggcggtttttaatggtgaaaaatttttaccacagttttttaattgtttacatgcacaacaactggaaaactgggaacttattttagttgatgatggctctactgataactctcgtcagatcttagataaatgggaaaaacactttcccaatgtcactattttaacacaagaaaaccaaggtgtttccgttgcgcgtaatacaggatttgctgttgcaaagggggaatacgttgcttttcctgatattgatgatgtgatagataaacgcatgtatccccgattacttgaaattgccaaggccgataatttggatgtggcaacctgtaatgggaattatgtttatgatgataaaaaccgaccaacacgccctatctttccttcaacgcgtttaacaaccacagaggtattaactgggcctcaatggcttgaacgtgcgcttgagtcgaaaaaattcttacatgttacatggctaaatatttatcgacgtcagtttttattggagcatggttattactttgagccgggtttgcatcaccaagatattccttggacgaccgaagtgttattaacggcgaaacgggtaaaatatatcgatgagcgttattacgactattttattcattctggctccgtgtcgcatacgacacccgatgatcgtattcatgtaagaacaatttataactatatgaaaatacttgagatgctggatgctattaatcaacgccatgctgagatagcaaaaacgatcaatgcttgttattggcaaatagccaaagaaggtttaggtattattcattctattgatgcgattagttcaccagaaaccaaaaaacagatagttaaggtattttttgagcggggaatttgggcattaatttggaaaaatgcgaaagattttagattaaaatggcgtttaggtcggcgttattttcgactgaaaaaaatattagcagaataa

SEQ ID NO: 294724 - DNA, 1584 bp, Proteus mirabilis
atgtctattcggtttagttggcgaaaatcgtttattgctttatcctgcttagccgcacttagcgttcctgttactacttcagcacaaaccttaaaactagccattggtgaagagccgacagaaggttttgatcccatgttagggtggagccatggtagctacttactgctacacagcccattattaaagcaaaatgcggatctgagttggtatagcaatatgctcagtgattatcagcctagtgcagagggcacaacatggaagctgacgttaaaacccgatttgaaattttctgatggttcccctttaaccgcaaaagatgttgcctttacctataacaatgctgcggcaagtggcggtaaagtggatatgggaaactttctttctgcaacggcagatgatgatttacatgtcactattgctttaaaagcgcctcaaagtacttttgttaatgtattaggctcgctaggcattgtttcagctgataaatatgatgaaaaaacctatgcacaaaagccgattggtgccggtccttatcgtatggtcagttttcaaccgggtcagcaactcatcgttgaggcaaacccttattatgcgggtaagaaaaatgatttcgaaaagcttatctttgtttttcttgatgaagatgccgcttttgctgccgctcaaagtggacaactaggggttgttcgtattcctcctgccaccgcagccattgctaaaaatttgcctaatgtaaaattgtgggaaagagccagtgttgaaaatcgtggtatcgtctttcctatggtgaaatcaggtgagaaaaatgcacaagggtatgatatcggtaatgatatcactgcagatatcgccatccgtaaagcgattaactatgcccttaaccgccaattactggcagagcaagtattagatggatatgcagttcctgcttataccggcgtaaaaggattaccttgggatcaaaccgaggccgcatttaaagatggtgatattgaaaaagccaaacaaattcttgatgatgcgggttggaaactcaataaaaatggcattcgagaaaaagacggtctagaagcgaaattaacactctggtacaccagtggtgatgcaactcgtcgcgatttagctgaatcaattcgtgcgttagtgcaacctcttggcattcaaatggatcttaagtcaggaagctgggataccgtagagcgttatatgcactcaaacccgactttgtttggttggggaagtcttgatccgatggagctctatcatcactatagtatgaatgccgcaggtgtgggttactataatcctgggtattataaaaatcctgccgttgaaaaacatttacaagcagcattagatgcaccgacatggcaacaagcggtaccacattggcaagcggtagagtgggatggtaaaaatggcgtcggtatcaaaggtgatgctgcttgggcttggttaatgaatattcagcatacttacttaaccgatccttgtgttgatttaggcactggcgctccggaaattcacggttcatggtcattattaaatagcgtagatacttggaagtggacttgtcagtaa

SEQ ID NO: 294725 - DNA, 978 bp, Proteus mirabilis
ttgtcagtaatacgtcaaacagtaggatttttcctgcgattattatgcctgctgctggtaacaacagcaggtgtttttattttattaagtttttcgccgattgatccgatcaaggcctatatcggtagtgatttgctaaacgttccgcctgagcagtatccgctgatagcggctcgctgggggatggatcagccactatggatgcgtttttggctctggtttagccagataatccaaggtgattttggttattccatgctctataacatgccggttattgatgttattcgccaacgggcagggccttcgtttatcctgcttttttctgcgtggctattttcaggtgtaataggggtgttaatggggttagtggcaggacgatatcttaatcgttggcctgataggatcatctcaaccctctcttatttgctggcctcattaccgactttttgggttggattgctgttgttatcgctgttttcggtaacgttacactgggcacccatttgctgtgcatggccgatgggcagtagtgctgaagcagccacattgggccaacgtttttcgcatcttattttacctatgatagcgttaggattattaggtacaggtaatatcgcactgcatactcgcgcaaaagttgctgaagtgatgggcagtgaatttattcattttgctaaagcccaaggtgataaaggttgggctatgatgctttttcatgttctacgtcatgccattactcccgcactttgcttacagtttgcatcaattggtgaattgttaggtggttcattattggcggagaaggtttttgcttatccgggattagggcaagcgacagtagatgccggattgcgtggggatatccccctattaatggggattgttgtatttagcacaattctcattttctttggaaacagtatctctaactacttgttacgacgaattaataaaggaattttgcgcgacttatga

SEQ ID NO: 294726 - DNA, 813 bp, Proteus mirabilis
atgatttacgatcccaataagcctttatttagactgctatttgtctcaatcgtattagtggggctggttatttatggcttatctgtttctcatactgatattgtgatggattttttagctagaaaccaagcgccatctactcagtactggtttggcacggataatttaggccgttcactgtggttacgctgttttcaaggtatgttaagtagcttaaatatcggtgtcactagtgccgttgtcagtggtgctattgctttgatatttgctgggatctcctccattaatcgccattgtgatttattggtcagaggggtggttgatgccttgttagcattacctcatttactgttgttgatcttgatctgttttactttaggtgggggacagcaaggtgttatctgggctgttgcattaacccattggcccaaattagccctaattttacgtggtgaaattcaacgtattcgtgaagcagattatgtgatgctatctcgccgtattggcaatacaccttttgagtgtgtgaaaaaacactatatcccaatgttattaccgcaatggattgtaggaacgttgcttatgtttccacatgcggtattgcatagtgctgcgttgagctttttaggttttgggcaagcagcgcatgagccttctcttggattgctattagcggatgccttacgttatttaagtaccggtgcttggtggatggtgttttttcccggattaattttaatgtgcttggtattgatatttgatcaatttgctaaagccatgcagcaactatggttaagaggggcaggatgttaa

SEQ ID NO: 294727 - DNA, 804 bp, Proteus mirabilis
atgttaagttttgaacagctttccattgatattgcgcagtttcgttggttaggaaagcgcacttggcagcctttattaaaatctatttctcttgatattaaacctggcaaaatgctggctttagtggggggcagcggtgaaggtaaaagtttactcctgcaaagtgcattgggactactacctgctaatatgcgaacccgaggcacaattaaacttaatgggcatccgttaaccgagcgagagcttattgcttatcgtggtaatactttttgctatattcctcaaggtgtaacagcgcttaatccgttaattagcattggtgaacaactgggccgttcagcgcggttaagtggtgctgatatcacctatgaagatattaaacaccaatttggtttatatcacctctctagctcgttagtgaaaacttaccccgcaaaattatcggggggaatggctaaacgagtactcgcctgcaatgcaacattatctaatgcacaatatatactggctgatgagataacatcatggcttgatgatgaacacgcttgtttattgctagagcatttaaaagagttatgtcatcaaggtaaatcagtcctatgggtcacccatgatttagctttggctgctcgttatgccgataccattgctgtgttgaggcaaggggagctaaatgagatagtcgctgctaaagcgctttatcatcatggtgggagtgagtggctaaaaacattgtggaatgcactgcctgaacagcagtttttagatctacaagagggggcttgcaacccatacccatattga

SEQ ID NO: 294728 - DNA, 612 bp, Proteus mirabilis
atgccacttttagcgctacaacaactctctgtgcaacaagccggtaagatgttatggcatgatctctctttttcattagaggcgggagagcgcttaggcatttctgcgccaagtggtagaggaaaaacaacgttaggtcgtgtattagcacaatggcaaatgccgactagtgggcaaattctttttaatcagcaacctctgcctaagaaaggttattgtcccattcaattggttccgcaacatcctgataaatgttttaatccatttagaacaaccggagagagtgtacgtgatgcatgggtgcctgatagcctgtggcttgaaaaattgatgatagagccagagtggttaacccgtaggcctaatgagttatcaggaggagaattggcacgtattgcattactacgagcacttgatcctcgaacacaattattaattgcagatgaagtgactgcacaattagatgcacagatccaagccaaaatttggcaagtattaatcgatgaaagtcaaaaacgtcctttaagtttaattatctttagtcacaataaagccttactagaaaaagtatctaccagaatatggtgggtagataaggaaaaaatatgttga

SEQ ID NO: 294729 - DNA, 3240 bp, Proteus mirabilis
atgaaaatgaaaaataaatcaatattatatatattgtgtcctctctatatatggcctattaattgctacagcaattataatataaatgatatgggagactcaatttataacccttttagtattgcaaataatgcaagtcaatattatgaattcaatcataatagatatgaatacattaaacatctccacggccgtgtcttagataagcatagttacaaccaacagttaatgacgccgtttggaagcacttacatatatgcaacaataagtgatgatacactttcattatataatcgtatagctgatgaaggtgaacgtaatattcaaaaaaagatacctaattataatgttagagaaaccgtttatttctcagaagaactcttaccaaatgaattatttattagtatagatggcggaaagaccataaaaaaaataaataaagaaaataatccgcaattagatcttctttacctttcccatatttcaaaaaatagtaaaactgttgttgggtatgcctttgcaggtgctagagccagattagagcagatggttaaaaataatagtatttttgaagatactatcggttgtggtacatacaatggatgttatgtatttgcctataacgtatataacaatacattttctattttagatagaaatatggagattagatatttaacgaaagatggtaattttattttatatgaatacaaaggtgatgagagaaagaagctatatatttatgatatctataaaaaagaaaacttcgaattaacattcgataacgttaataagtatttagctaatcatctagaaaaagcaattttactttcaccaattactgaatatcctttcttaaagggaataaaaagaagaggtgttgatattcaaaaaatcagtgataatggtcaagtctttattggccagctaaaccgagatttgcctaaaaagaaattactggatagagaatatcctaaagttgcctttatcacaacagcatcaggccctatacgagaacttagtctctctgaatttggatcgacaaaacttgcagatacctcagcagatgggaactatagtgttggctggggagatgtttggcataataattatgcaattaggttacctactagaacaaaaacttcttcagcaatttttagtcaagcattactctatgacttctctaatgataaactcatcaatattggtaacctttctacaaaaaaagaagaatcggaatttagaaatgctagagcacttgatattactgctgatggtaaatatgttgtagggtggtctgaaactgatgagtataacttaaaaaccattccaaaagatctaacaggcactggtcctcatgcctttatcatgtttcatcgtcatggttttatttatttcaataatcatatgtatgacttaggaacacttgacgggggaaaagattcagaagcacatgccatctcagatgatggaagaatcatttatggtgtagccactaatgaacgtaataactggcgtcaagttatttggagaaatgatgaaatcgatgataaatatttcaatactgaacaaaaagaaattgcagatgaaaaagataagcaagctgagcaagaaaaggcggagctagaaaaagcggagcaagagcgcctagccagactgcaagctgagcaggaaaaagcgaagcaagaaaaagcggagcaagagcgcctagccagactgcaagctgagcaagaaaaagcgaagcaagaaaaagcggagcaagagcgcctagccagactgcaagctgagcaagaaaaagcggagcaagagcgcctagccaaactgcaagctgagcaagaaaaagcagagcaagagcgcctagccagactgcaagctgagcaggaaaaaacggagcaagagcgcctagccagactgcaagctgagcaagaaaaagcagagcaagagcgcctagccagactgcaagctgagcaggaaaaaacggagcaagagcgcctagccagactgcaagctgagcaagaaaaagcagagcaagagcgcctagccagactgcaagctgagcaggaaaaaacggagcaagagcgcctagccagactgcaagctgagcaagaaaaagcagagcaagagcgcctagccagactgcaagctgagcaggaaaaaacggagcaagagcgcctagccagactacaagctgataaagaacttccccctgtagaagatgaacaagtacaacaggctaaagcaaaggtaaaagagaaagaaacagcaaaatcatcgacagctatcagtaaaccaatcgatgtagaaaacagctataaatccatgcaattaatggctgaaaatagctataaacttatcgatatgcaacagggtcaattgcgttatttagcttccgccacctgttctgtcggtactgaaaaagcatgtcttagtggcttcacacactatcaaaatattgataaagccaacgctatacaaacgggcattagtggagcttatcgttttgatatcaatcaaacaccattagtggttggtcttgctattgatagcgatagctactcttctttacccacaggctatgaatatcaaggataccctttaccgttaattggttttagcgttgatttaatcccgtcactaaacccaacctcgaatggcaatgcattacatctttcattaaaaggggcatatgtaaaccgcaaagtcacgattaaaagaccaatattagataataccgaagcgggtaaaggccacgcaaagatctccggttattatattgatttccaaggatattattcttacacactcaataaccttatcactgtaacgccttttgcaggacttacttttaatcaaacatcacgctctgcttatagcgaaacacaagggactaaacttgcagtccattatcaagaacttaatgcacattcattgcttgcaaaaataggattaggaatagagtatacagtcaatgccaaactcaaactggacagcaaagcgggtttattatggcatttatcacatcaccaaggtgacttccaaagtcatattgattatctaggtcagcaaaaaattaactataacgacaacaaaaaacagttagcacagcgtccatttgctagtgtagggctaacttaccaactagataaacagtcatctgttaatacgacaacaaattggcaaatgaccccttatcgtaatcaagatattcatatgggtattggttatacatatcgtttttaa

SEQ ID NO: 294730 - DNA, 867 bp, Proteus mirabilis
atgaacagcagatgcgcttcgataaataaaatactgcctttttcttgtgttgatggcccaggcaatcgcctcgccatcttcctacaaggatgtaatttacgctgtaagaactgtcacaatccctacactatggggatttgtgataactgcggggattgcattgccacttgcccacagcaagcgctttcattacaaaacggtgtaataaattggaacgctgacagctgtgagcaatgtgatacttgtattcagcaatgtcctcgccaatcaagccctatgacattgacctatacggttgatgaactaattgcaattacgcgtaaatatgcagcctttatcaatggggtaaccgtaagtggcggggaatctacgttacaacttccatttttaattgattattttaaagcaatcaaagaagcccctgatcttcgacatcttacctgtttaattgacagtaatggcactctttcacttaatggttggcaaaaaatcgccccctttatggatggtgcgatgattgatttaaaaagttggagtgaagaaacacatatttatttaaccggacgtagtaatcaacgtattaaaaaatcaatcaaatggttaagtgagcataatttacttgcagaattacgccttttatatattccagaaaaaaccgattatttagagaatatagaaccgctttcccagtttattaattcacttgatgaatccattccaattcgtattaatgcgtttcatcagcatggcgtatatggtgaagcgaagaattggcgatccgcaaataaagaacaaatcataaatctacaaaatgaattaatacttagaaaagtaaatttaattaaaataccaaatatatatacataa

SEQ ID NO: 294731 - DNA, 1542 bp, Proteus mirabilis
atgactgaacaatctgttatccaacgttgtcaacaaatcgtagaaaatccaaccctttcccccgaacaaaaacgtcattttctagcattagaagcggaaaatatgttgccatacccgacattatctaacgaggcgagccttgcgctaaatgaacgggttatctgcgatatgtatgaaggtcatgccccttataaaccacgttatgtattacctgattacgcgaaattcttagcacaaggctcgcgctatttagagcttgaacctgcccaagattttgatgatgcgctaaatatgctgactatcctttatcatcatgttccttcagtcacttcaatgccggtttatttaggtcgtattgataaaatcttactaccttatgtggggaatttgacgcaagagcaactctatccaaaattaaagcgtttctggcgctatcttgatagaacccttcctgatgcctttatgcacgctaatattggccctgaagactctatcattacacgtttaattcttaaggtagatgttgaacttcaacaagtagccccgaatctcacctttatttatgacgcggcactaacaccttctgatttattgcaccaagcaatcaccaatatttgtcatagtagtaaaccccatattgctaacggtacattgcaagatgctgtatttggtaaagatgaatacggtattgttagttgttataactctctaccgcaaagtggtggcggtagcactttagttcgtatcaatctcaaagaagtagcaaagcgcagccaaaatagtgccgactttctagagaatgtattgccgttttacatgcaaaaacaaatcgagatcatcaatgctcgttgcgaattcctctatgaaaaatcaaacttttttcaacaaagctttttagtagaagaaggtttgatctcacccgatcgttttgccccgatgtttggcatttatggtatggctgaagcagtttctctattacttgaaaaagaaggtcatacagcaaactatggtcatagcgaagcggccaataaacttagctatattattagtgaaaaactggcccaatttgttgcacagactcctgtaaaatatggttggaaacagcgtgccatgttacatgctcaatcaggcataagttctgatattggtactacaccggcgacccgaattccttatggaacagagcctgatcctgttactcatttaatgaccgttgccccccaccatcaattttatacttcaggtattagtgatattttaaccgtggatgaaactatcaaacaaaatcctgatgccttaatgcaactgtgcttaggggcgttttcttgcggattacgtgaatttaccgctaatgtgggtggcaatgatttagtccgtgtcactggctatatggtgcggttatctgatttaaaaaaatataaagaagaaggctctcgcctaaatacaacttggttaggagatgaagcaacaaccaattgccatattgctgaacgaaaaccacgagtgattagccatgaacagcagatgcgcttcgataaataa

SEQ ID NO: 294732 - DNA, 693 bp, Proteus mirabilis
atgcttaaagataaactaaaattcaaactacaaaaaacagcgattatactgatttgtatcgcattattggcttttttgatgcaaggcgcctcttattttagccgtgcaaatcagcacgcccgtatcacccagtttgaagagcttgccaaaacactggcagaacaagttgccttctcattatccaattatatggatgacagtagcaaagataacgtaaatccacacattatagctaatttaaatcatctaactcacgatagtcgggtactggatgcaagtctttattggcaagatggcacacaaatagcgcatagtggtgaaaatgtgacggtaaaagagcgattggccttagaaggacaaaaaagtggcggttcttttaatcatcagctggtggtgcctatccctggtcaagatcagccaaagggttttctaagattgacgttagatacacaccaacttgtcacagaatctggccaagtcgataacaccactaatttattgcgtgtgatgctattggttgctctggcgattggttttttactgtcccacagcttattgcaattaacaccagtgcattggcagcaatcgccctatttattaaccgcaagtttacccactcgtcatgaaaaagaagatgatgaacaaaaaagtgatcagcaagaagaaacagaaaatagatctgaagttaaataa

SEQ ID NO: 294733 - DNA, 978 bp, Proteus mirabilis
atgtcaaatagtctgacctattgctatttaccggatgagatccgtaaatggccaggtctaccgctatcactcagtggtgaagaagtgatgccactggattatcgtgcaggcgatagcggatggttactttatggacgagaacttgataaaaaaagaataagtgagttccagcataaattaggtgtggctattgtggtggtttcttcatggcgtattgatgattaccaagtggtacgtattgcgggaagtttaacccgtcgtattcgtcggttatctgatgaatgtggtttagatgttgtaccctttgggcagatcccacgtttacgctctccgggacttttagtgatggatatggattccacggctattcaaattgagtgtattgatgaaatcgctaaactggccggtgtcggtgataaagtggccgagataacggagcaagcgatgcaaggtgaaatggattttagtgaaagcctaaaattgcgtgttgcacaattagcgggagctgatgcgaatattttacaaaaagtaatggataatttacctctgatgcccgggttaacaagtttagtgcgtaagcttcaggcaatggattggcaaattgcgattgcatcagggggatttacttattttgctgataacctaaaacagcgattacgtttagttgcagcggttgctaatcagctagaaattaaagatggtaaattaacgggcaaagtcaaaggccctattgttgatgctaaatataaagcgcaagtgcttacacgcttagctaaagatttagatataccgctggaacaaaccattgcgataggtgatggcgcaaacgatcttaaaatgcttagaaaggcgggtttaggtattgcctaccatgccaaacctaaagtatatgcacaagccaaagtagctattcgtcatgctgatttaatgggtgtgatgtgtattttaagtgcaggattaaagcacgaagaacgataa

SEQ ID NO: 294734 - DNA, 1392 bp, Proteus mirabilis
gtggcaaaagcagccaaaagagcctttgtatgtaatgaatgtggtgccgattacccgcgttggcaaggacaatgttctgcgtgtcatgcgtggaataccattacggaagtgcgccttgcggcgacaccttctgcccgtaacgatcgttttagcggttttgccggagatgcgaaaggaataagccgtgttcaaaagctctctgaaattagccttgaagcattacctcgcttttctactggatttaaagaatttgatcgtgtgttaggcggaggggttgtgccgggaagtgccattttaattggcggaaatccgggggcaggtaaaagtacactattactgcagaccatgtgtcgtttagccgctgaaatgaaaaccttgtatgtcacgggagaagagtcattacagcaggttgccatgcgggcgcaccgcttaggcttaccgacaaccgaattgaatatgttgtcagaaaccagtattgaacaaatttgtttaattgctgctcaagagcaacctaaattaatggtcattgactcgatccaagtaatgcatatggccgatattcaatcttccccgggcagtgtggcacaggtacgagagacagctgcttatctgactcgttttgctaaaacgaatgatattgccattattatggtgggtcatgtcaccaaagatggcacattagcgggacctaaagtattagaacactgtattgactgctcagtgatgcttgatggtgaaacggactcacgttttagaacattgcgtagtcataaaaaccgctttggtgcggtgaatgagttaggtgtttttgccatgacggaacaaggtttacgcgaagtgagtaatccatcggctatctttttaagtcgtggtgatgaggtgacttcaggcagttctgttatggtggtgtgggaaggaacgcggccattactggtggagatccaagcgttagtcgatcactctatgttatcaaatcctcgccgtgttgcggtgggtttagagcaaaatcgcttagcaatattattagccgttttgcatcgtcatggtggtttacagatgtctgatcaagatgtctttgtcaatgttgttggcggtgtcaaagtaaccgaaactagtgcagatttagctttattactatcattagtatcgagttttcgtaatcgtcctttaccgcgtgatttagttatttttggtgaggtaggactcgcgggagaaattcgtcctgtaccaagtggacaagagcgaattgcagaagcagcaaaacacggttttaaacgtgctattgtgcctaatgcgaatatgccaaagaaaaatccacctgatatgaaagtgtatggagtgaagaaactatcagatgcgttatctgtacttgatgatttggacgacttctaa

SEQ ID NO: 294735 - DNA, 1245 bp, Proteus mirabilis
atgggatcttttgattatatcaaacaggcaataaaaaagaatggctataccttacagcaagttgccgatgaaagtcagatgacaaagggctatcttagccagcttattaataacaaaatcaaaagccccagtgcacaaaaaatgtccgcattacaccaatttttgggattagaatatccattacaacagaaaaccattggggtgatttttggtaaattctatcctcttcatactgggcatatttatttaattcaacgagcttgtagtcaagtcgatgaattgcatgtcattttatgtcatgacgaacctcgtgataaagagctatttatcaatagtgcgatgtcacaacagccgacggtaagtgataggttgcgctggttattacaaacttttaagtatcagaaaaatattcgtattcatgagtttaatgaacatggtatagagcctcaacctcatggttgggaaatgtggagtgagggtatcaaagcctttctacaagaaaaacagatcgcgccggattttatctataccagtgaacgaggggacgccagtcaatatgaagcatttttaggtattgaaacggtactggtcgatcctgagcgctcgtttatgaatattagcggtagtcaaatccgtcaagcgccatttaaatattgggaatatattcctaccgaagtaaaaccttttttcgtgcgtacagtggctatattaggtggtgaatcgagtggcaaatcgaccttagtaaataagcttgccaatatttttaatacaaccagtgcgtgggaatatggccgtgattatgtcttctctcatttaggaggagacgaaatggcattgcagtactctgattatgataaaatcgctttaggtcatgcccaatatattgattttgcagttaaatatgctaataaagttgcatttatcgatactgattttgtaacaacacaggctttttgtttacgttatgaaggaaaagaacatccttttgtacaggcattgattgatgaatatcgttttgatttagttattctgctagagaacaatacgccatgggttgccgatggtttacgtagtttagggagtgataaagagcgccgtcgttttcaaacattgttgatagagatgttagataaaaacaatattgaatatgtcaaagtagatcctcctgattatgatgagcgctttcttcgttgtgtcgaattagtcagggaattgctgatgatgcaatcaaagcatatcgaataa

SEQ ID NO: 294736 - DNA, 1140 bp, Proteus mirabilis
atggcgcaaccttcccgtatttcacttcagatcaaaaaaacagttatttcattagccattgctgctttaggctttacggcttcctcttctgcattggcttatcaaaaagtccatcaacccgataatagctatcagcaatatatttctcagcgccaaacggtggatatgttgatccaagatgcattagaggcatttaaatcgccagcgcgtgtttctgacgctggatttacgggaaaactaccttctaatatggaagtcgtagcacaaaagctacaacaagcttataaattagagccttatcgcttagatttactatttagtgccgccagtgcttatgtctataacaatcaaattgagcgtgcggtaacgatttataaacaaattttagaagccgcaccggatgatattgatgcattaatttatgtgacttcttggacgcgttttgaaggtaaagataaagaaagtgaagcctattttaacaagttaaaatcccttaatccggcaaaagctgaagagctaagccgcttttttgctcaaattgatcgtgtaagcaaaatgccattaagtgataagttaacgccagcagatttggcaacgctaaataaaacaaaaggaaataatgccattgtgacattgggttatgcacttaatccagatggtacgatgaatcagatcttgattgatcgtttaaataaaacccttgaagtcgcaaaacagttacctgatgcaatgattgttgtgacaggtggtgtgccgaaagcacatcaaactgaaggtaaattaatggcggattggttagttaaacaaggtattcccgcagagcgaattttccaagacaattatgcgcgctcaacggtggagaatgcgttatttagccgttatgcattaactaaacaccgaattaaaacagcggtgattattagctctggtagtcatgttcgtcgtgctgatgctatttttacggttgcgagttggcaaagtggccccagtgatatcacctatttaacggttgtagcccccgataagccattagctgaattacaaaaaacatcaaaatctgatttacaaggtatttatcgcgatggcttaaaagcattaggattatggagcttccgtagttatccattagaagagcgttga

SEQ ID NO: 294737 - DNA, 1545 bp, Proteus mirabilis
atgatctgcgcattgatggcctctttttctagtttcgccaattgcttatcaataacagaaaataaagaaatatcaggccaatttaatcacgataaggcactctgttttactacacatttacagagccagcgctatgctgagttagatgttaaaggtatacaaaatctgcaattagcaaaccaagatggcactcatattcgtcgcttattaaaagatgtgcccgttgatggacaacaacaaaagatacgcttcctattacctgaaacggcaaattatcagtttattgcccaaggagaagttggggtacagtggcatatcacactgaaaacatacccttatcagcctttagataaagatgcgggtatagcattaactagccctagattgcaaatgctggcacaagatctcaccgccagcaatatacagttattctggcaacagatacagcaagagggaactccccttgttgaaccttacgataatcataacaagcgcgtgacttttttatggcaaggtgcgcaatctaatgtatatctattgggatcgcctgcaggtgatcatgatccgttaacgcgtttagccaatagcgatatttggtatcgtagttatatcgtgcctaacgatacattaatgcaatataaattagcaccagatgtgccagtcattgaaaatgcaacagctgcacagcagcgccgtgctattttaacgacggcacaggccgatccttttaatcttcacccttcaccaagtaaagcggacgatcgttataattacttttcattgctgtcacttgattatccccgtgaatgccagttgccagatatcttagataggacaatgaatggcaatacatcaatcagtcgttttcatagtgaaattttaaacaatgatcgagagattgcgctttatttacccgcacagaaaatgacgacaccgcgactattggtgctatttgatggacaaatttatcgccaacaatatggcatagaccggttttttgataagttgattgaagaggggaaattacctcctattgctatcttatttgtcgatagtattgatagtgatcgtcgtagtgttgaattaccacctaatcctgattttcaccgctttttagcggatgaacttttggtttggttagagcaagagaaaggcctgcaagtagccgctaaggaaactatagtctcaggctcaagctatgggggattggcctctgcatgggtggcatttaaccgtcctgatcgctttgggaaagtgcttagtatgtccggctcttattggtgggcgccagaaaacgaagccccagagtggttaattcgccaatatcaacaggcggataaaaaaccattacagtttttcttagaggctgggttatttgagtctcgcgaaggcgctggaggaatattaaataataatcgccaattaaagcaggttttacagcaaaggggctatcctgtgcaatcgctcgagatggcgagcgggcatgattatatctcttggtgtgaggcgctttatatcggcactaaagcgttaactaacgattaa

SEQ ID NO: 294738 - DNA, 1446 bp, Proteus mirabilis
atgtttaaaaacctatttgttgttttacaaaaaattggaaaatccttaatgttaccggtatctgtgctacctattgccggtatcttactaggggttgggtctgcgggactatcatggatccctgtctctgtttctcaagtgatggcagaagcggggggatcggttttctctaatatgccactgatttttgctattggtgtggcgttaggttttaccaataatgatggtgtctcagctcttgcgtccgtcgttgcctatggcattatgtcaaaaaccatgctggtggtggcaccttgggtcttaggattatctcctgatagtgttgaaatacaacgtttaactgatacgggggtactcggtgggatcattgccggtattattgccgcatcaatgtttaaccgcttttatcgtattaaacttcctgaatatttaggcttctttgcaggtaaacgttttgtacctattatttctggtctgattgcgatttttgtcggtattcttttatcctttatttggcctcctattggtactgctattcaacgtttttctgagtgggctgcgtatcaaaatccagccgttgcatttggtatttatggtgttgttgagcgtgcgttagtgccatttggtctgcatcatatctggaatgtaccattccaaatgcaagtgggtgagtatgtaaatagcgcaggacaagtgttccacggtgatattccacgttatatggcaggtgatccaactgcggggatgttatcaggtggcttcctatttaaaatgttcggtctacctgcggcggccattgctatttggcatacagcacgtcctgaaaaccgtgtaaaagttggcgggatcatgatttctgcggcattgactgcctttttaacagggatcacagagccaattgaattctcatttatgttcgtagcacctattctttatgttattcatgccattcttgccggtttagcatttgttatttgtatcttgttaggtatgcgtgacggtacaagtttttctcatggtttaatcgactttatcgtattgagtggcaatagcagtaaactgtatctattcccaattattggcatactttatgcgataacttattactctattttccgtttcttaatcgtgaaactaaacctgaaaaccccagggcgagaagtagaagataaaaacgcgaaacaagcggataaaagtgcgatgggacaatctttagtcgctgctttcggtggtaaagataatatcagtagcttagatgcttgtattacacgcttgcgtattggtgtaaaagagattgataaggtcgatcgtgatgagctgaaaagactgggagcggctggtgttgtggtggttggatccggtattcaagccatttttggccctaagtctgataatttaaaaactgaaatggatgaatatattaggtctttggatttgacgaaatag

SEQ ID NO: 294739 - DNA, 774 bp, Proteus mirabilis
atgctagatattatttatcaagatgaatatcttgtggcggtgaataaaccggcgggctggcttgttcaccgcagttggcttgataggcatgaaaccgtgtttgtgatgcaaacattaagagatcaaattggtcagcatgtttttcctgttcatcgtttagatagacccacatccggagtgctattaatggcgctctcttccgaggttgcaagaacactttcagtctgttttgaacaacatcaaatggagaaagtgtatcatgcggttgtgcgtggctatgttgaagagccaatgataattgatagcccacttgttgaagagcatgacaaaatcgctgacaaatttgcctctcaacctcctaaaattcaacactgtattacgcattgtgtgccacttgcaaaagtggaaaaagaagtggcgatagggcgctatccaacatcgcgttttagcttattggaattacgtcctgaaacggggcgtaagcatcaattgcgccgtcatatgtctcatattcgtcatcctattattggggatacagcccatggtgatttacgacaaaatcgtggggtcgtaaatcattttcaatcacatcgtttgatgttacacgcaagtcagctaaacttaattcatccgatcactcaactacctcttaacttaacagcgaagtgggatctgccatggcaacatctgattaatcagtttggctggcgtggtctaaagcccgaattagagcaattcggtgaggatttagctcaccattttgtactttcttga

SEQ ID NO: 294740 - DNA, 324 bp, Proteus mirabilis
atgacctcagaacaacacattttagcaagactgttattaattgaagaagagatgaaaaacatagggttatggcaattggatgcgcctaatgatgaggcttttgcaagctcagagcctttttgtattgatacaatggaggcgcatgaatggttgcaatgggttctgatccctcgtttatcttctcttattgacagtggtatggcattgccgacggcttttgctatcgcaccttattatgaagaagcatttaaggacgatgagacgcgtgattatgttgatttactcaatcaccttcgtgaacttgatgcgttatttaagcaataa

SEQ ID NO: 294741 - DNA, 549 bp, Proteus mirabilis
atgaatgatatttccactgaattaaaacagcttacgcaaaattatgttgatttatggcaacaagagtcagggtttcctcctgccagccatgagctttatggtgttccttctccttgtatttctcgtaccggagataatgtggtttattggttaccacagccttttacgggtcgagataaattagaaaaagttgaaaaagcgatgggaattattattcgccctgaattacatgactattttactacgcaatatgctggtgatatgcaagtccgttttgattcgctcaactttactctgcttcaaatttggagtgaagaggattttattcgtctacaagagaacatgatcggacatcttgtgacacaaaaacgattgaagctcaccccgactttgtttatcggtacaacagcgtctgaaaacgatattatttctgtatgtaatctttcaggtgaagtaatactagaaacttttggtcaaaagaaaagggaagtgcttgcagataatttatcactatttttaacaaaattaacccctgtttttgataagtaa

SEQ ID NO: 294742 - DNA, 846 bp, Proteus mirabilis
atgtctttatatcagggagataaggctctcgaagcactatcattaggcaaagaaacacaataccacacacactatgatgcgagtctattacaaggtgtacctcgtcgcttaaatcgagattcactctctttaactgctgacaatctaccttttcatggtggtgatatctggacaatgtatgagctatcttggctcaacagccaaggcttacctcaagtggctattggccatgtagaattagatgcaacgacagaaaatctcatcgaatcaaaaagctttaagctctatctcaatagctttaatcaaactcgttttgaaaattggcacattgttgaagaaacattactcaaagatttaactgcttgtgctaaaggcagggtgcatctaacgctttacccactttcccattttacctcacagcctattgtcgattttgtaggagagtgcattgataaccaacctattgaaattgataattaccaattcgatagccaatggttaaacggatcaacaacagatacactggttgaggagacgcttgttagtcatctgctaaaatcaaattgcctgatcacgcaccaacctgattggggatctgtgatgatccaatataaaggcaaaaaaatcgaccgtgaaaaactactacgctatcttgtatcctttagacagcataatgaatttcacgagcagtgtgttgagcgaatattccacgatattatgacattttgttcaccagacacattaactgtttatgcaagatacactcgccgtggaggattagatattaatccttggcgtagtaattgtgagtttgttccagaaactggtcgcttagccagacaataa

SEQ ID NO: 294743 - DNA, 1368 bp, Proteus mirabilis
gtgataactcatgtcagcccattaggttccatggatctgctttcacagctagaagttgatatgcttaaaagaacagccagcagtgatctttatcaactgtttcgtaactgttcacttgcagttctcaactctggtagccttactgatagtagtaaagaactgttatctaaataccaagattttgatattaacgtactgcgtcgcgaacgtggtgtaaaattagagctagttaatcccccagaagatgcctttgttgatggaaaaattattcgctctctacaagcaaacctatttgctgtactgcgcgatattttgtttgtgcatgggcaaataaccacggcaaaacgcgacctacatttaaaccttgaaaacagcgcccatataacaaacaccattttctctatcttacgtaatgcaagagcgctgcatatcgatgaagatccaaatatgatcgtttgctggggcggacactccatcaatgaaacagagtatctttacggtagaaaagtcggtaatgaattagggttacgcgaactgaatatctgtactgggtgtggacctggggctatggaagctcccatgaaaggcgctgcagtggggcacgctcaacaacgttatagaaatagccgttttattggtgttacagagccatcaatcatcgccgcagagccaccaaatcctctggttaatgaacttatcattatgccagatattgaaaaacgtctggaagcttttgttcgtattgcccacggcattattattttcccagggggcgtaggaaccgcagaagagctactctatctacttggtattctgatgtcaccagaaaaccaagaacaagtactcccactgattttaacgggtcctaaagagagtgcagactatttccgagtactcgatgattttattgttaataccttaggtgaagatgcacgacgtcattatcaaatcatcgtcgatgatgcggctgaagtggctcgtattatgaagaaatacatgccattggtaaaagataaccgtcgtagcacaggggatgcttacagctttaattggtcaataaaaattaatgcggacttacaacatcctttcgagccaactcatgaaaatatggcatcacttaatttaagcacgcatcaatctcctgaaaaactggcggctgatttacgccgcgcattttccggtattgtcgcaggtaacgtaaaagaagtgggaatgaaggcgatagaagctcatggcccttataaaattcacggtgaaagcgatattatgcgccgtatggatattttattggcggggtttgtcgaacaacatcgtatgaagctacctggtggtagtgcctatcaaccttgttacgagatcatcagctaa

SEQ ID NO: 294744 - DNA, 750 bp, Proteus mirabilis
atggtacatttgctgatcattgatgcattaaacctgatccgccgtattcatgcggcatcaggttcttcatgcctgacagtgtgtgaacatagcgtgaatcaattgcttaatcacacacggcctactcacgcggttgctgtttttgatgaagatgatagggaaaatagctggcgccatcagttattgccggaatataaagcaggccgctcgccgatgccggctgatctgcaccaacagcttccagaaattaaagcaatgctacttaacttaggtataaaaagctggcattcaggaggcgatgaagcggatgatgtagccgcaaccttggccacgaaagtcgctcaagccggacataatgtgaccattatttcaacagataaaggttattgccaattactttctcctgccatacgtattcgtgactattttcaaaaacgctggctcgatcttgaatttattagtcaagagtttggtgttaaaccgacacaattaactgattattggggattaacaggcgttagcagcagtaaagtttccggtgtccccggtattggccctaaaagtgcaacagaacttttgcaactttatcctaatttagagtcactgtatcaacacattgatgaagtgcccaaaaaatggcaaaccaaattgagtgataataaagaagttgcttttattagccgccaaatcaccacacttcgtactgatattcagttaaacggtaatttacaacagttacgtttaaaatag

SEQ ID NO: 294745 - DNA, 1098 bp, Proteus mirabilis
atgaataaagtagcattatattgtcgccctggttttgaaaaagagtgcgcggcggagataacggataaagcaggacaaataggtgtttatggcttttctcgtgtgaaagagggaagtggctacgtcatttttgaatgctatcaagaaggtgatgcagataaaattgctcgtgatgtggattttagaggacttatcttcgcacgccaattatttgtttgtggtgaattattaaagaacttaccaccagaagatcgtattactcccattattgaccagctaaaaggtagtacagaaaaagcaggtgaattacgtgttgaagtcgctgataccaatgaaagcaaagagttattaaaattttgccgcaaattcactgttcctttgcgtaatcaattacgtaaagaaaagatcttattaaaagttgaaaattatagccgtccggtgatccatgtcttttttattgctccggggtgttgttacgtgggctattcctatagctttaataactcgccattctatatggggatccctcgcttaaaattcccagccgatgcaccaagtcgttcaactttaaaacttgaagaagcgttccatgtttttattccttatgaagagtgggaagagcgcttagccagtgggatgagtgcggttgatcttggggcttgtcctggaggatggacttaccaattagttaaacgtagcatgatggtgcatgccgttgataatggtcctatggctccttctttaatggaaacaggacaagtgcgccaccatcaagctgatggctttaagtttgagccgacgtcaaagaatattacttggctggtgtgtgatatggttgagaagcctgccaaagtggctgcattaatgacaacgtggatagttaatgaatggtgtcgtgaagcaatcttcaacttaaaattaccgatgaaaaagcgttatgaagaagttgcgcatatccttgataaaattagagctgaattagctgagaaaggcattaatgctaaaattcaggctaagcatttgtatcatgatagagaagagatcacggtacatatccaaaatatctgggctgcttatcgccctgatcgcgagttttaa

SEQ ID NO: 294746 - DNA, 396 bp, Proteus mirabilis
gtgaatagtcgtacattgcttatgttttccgcaatcagtggttttttttatgtggcttttggggcattcgctacccataaattagcccctcatttatcgccacagcattgggaatatattcagttagctatgcgttatcaaatcgtacatactttactacttgtagggttagcggcgatattaatgcgcaaaaccattttatggctttattgggcaggtattttctttggtttaggcattttacttttcagtggtagcctttattgtatggcgctaacacaggttaggttattatcttattttacgccaattggtggatttagttttcttattggttggattttaatttttattggcgctttgcgtctaaggacaccggcatctcgccatgaataa

SEQ ID NO: 294747 - DNA, 921 bp, Proteus mirabilis
atgtctaaacgtttacctccactaaatgcccttagagtttttgattcggcagcacgtcatttaagttttactaaagcggctgaagaattattcgtgactcaagcagcggttagccatcaaattaaaacattagaagaatttcttggactaaaattatttagaagacgcaatcgttctttgttactgaccgaagaaggtcaaagttattatcttgatatcaaagaaattttctcttcaattaatgaagcgacaagaaaattacttgcgcgaagcgcaaaaggggctttaacagtgagcttgtcgccgagttttgctattcagtggttagtaccgaggttatcagggtttaatcaggcttatccggggattgatgttcgtattcaggcggttgatcgcgaagaagataagcttgctgatgatgtggatgtggctattttttatggccgcgggaactggactggattgcgtacagatcgtctttacgctgaatatttaattccggtttgtgctccttctttgctgacaggtgaaaaaccactaaaaaccccgtccgatctgatttatcatacactgttacatgatacatcgcgtcgtgattggcaagcttatgttcgtcaattggagatccaaaaccagattaatgtgcaacaagggcctatctttagccatagctctatggtgatacaggctgcagtacatggacaaggtgttgcattagttaataatgttatggctcgcagtgaaattgaatcaggtcgattagttaggccttttcaagatgtgcttgtcagtaaaaatgccttttatttagtttgccaagatagtcaggctgaattaggaaaaattgctgctttccgtcaatggattttatctcaagcggcaaatgaacaggaaaaattaggattactggcaacttcttaa

SEQ ID NO: 294748 - DNA, 1215 bp, Proteus mirabilis
atgaaaccattttcccctactgtttttcgccaacaatttcctgctattgaggaaaatattgtttatcttgatagtgcggctaccgcattaaaacctgtagctatgattgaagcttcagatgaattttatcgccatagctcagcgacggttcaccgtagccaatatcaacaagctaaaaagatgacacaacactttgagcaagcacgtcagcaagtcgctcaattacttaacgtcgcagatagcgatactattatttggacgcaaggcaccacaggctcacttaatcttattgctcaaggctatttccgcccacgattacaagccggtgatgaaattattgttagcgaacaagagcatcacgccaatcttattccttggttaatgttagcagagcagactggggccaaaattattcgctggccgattgaagataactttttaccttcaatcgccacactgacgacattacttacggcaagaacaagagtagtggcaataagccaaatgtcgaatatcaccggtgcacaaatcgccttagataaagtttctcaatgtgtacatcaatatgatgactgtttactcgtggttgatggtgcacaaggcatagctcatcatgcaacggatatcagcgcccttgatatcgatttttatgctttctctgcccataaattatatggtcccaatggccttggcgtatgttatggaaagcgcgaacttttagaagtgatgtctgcgtggcaagggggcggaaaaatgttaaccacggcaagctttaacggttttgtacccgcggctattcctcatcgctttgaagcaggcacccctaacatagctgctgtaattgctttttcagcaacattagattggttacaaacgcaagatatggcgcaagccaatcaatacgccttaactctggcagatgaagcacaggcgcgtcttgagcaattagaggggtttatcagttaccgcgcgcctcattcaccggtactcgcttttaattttgagggtattcatcacagtgatttagcggcattaatcgcggaacaaggtattgctttacgcacagggcaacactgcgcacaacccttaatcgatgctttaaccatctctggctgtttacgcgcttcttttatgccatataatcaactttctgatattgataggttagttgatgcggttaaattcgcactgtccttattaaaagatgaagattaa

SEQ ID NO: 294749 - DNA, 444 bp, Proteus mirabilis
atgagtaataatacacaacacccttttggtcatgacattaccttagatggattatttcaagacttccagaaatctaaatcatgggaagataaatatcgtcaattgatccaactttcaagaaaattacccgcattacctgatgaattaaaaacaacagaaaacgaaatcaaagggtgcgaaaatagagtatggctaggtgttgagttaaacaatgacggcaaataccatatttatggtgatagtgatgggcgaattgtaaaaggcttactggcggttattttaacaacagttgagaataaaacagcacaagaaatagccaatatcgatatattagctatttttgaacaattaggattggctaatcaaattagccaatcacgcactgatggtgtcaatgccattattgcgcgattaacgtcgctcacacagacatctcaaccctaa

SEQ ID NO: 294750 - DNA, 849 bp, Proteus mirabilis
atgcaaaattcattatcagactcctatctgcaacgcttttctggtattggccgtctttatggacaacaagcgctgtattatttttctcaggcacatatttgtgttgtcggcattggtggcgttggtagctgggctgcagaagccttagctcgcagtgggatcggcgctattacgttaattgatatggatgatgtgtgtgtcaccaataccaatcgacaaattcatgcgctaaaagagcatgtcggccagcctaaatgtgaagtgatgaagcagcgaattttgcaaattaatcctgaatgcaaagttacttgtattgatgattttgttacggttgataatgtggcagaaatgatgcaaaactcatttgattatgtgattgatgctattgatagtgttagaccaaaggccgcattattagcttactgtcgtcgctataaaattcctgttatcaccactggtggcgcaggcggacagattgatccaactcaaatccaagtcgtcgatttagcgaaaaccattcaagatccattagccgctaaattacgtgagcgtttaaaatctgattttaatgttgtgaaaaatagcaaaggtaaattaggcatagattgtgttttttcaaccgagcaattagtctaccctcaaggagatggtacggtgtgtgcggccaaaagtactgccgatggtgtcaagcgtatggactgctcagcgggttttggcgcggtgacaatggtaaccgcttcctttggttttattgccgtttctcatgtattaaagaagatgttagctaaggcgcaacgtactcgtcatacttcaagttgtagcgttgttgaccgcattcattcgcactag

SEQ ID NO: 294751 - DNA, 1095 bp, Proteus mirabilis
atggttacttggcgaaaatcgttgcttttggggatattagcgcttgccttaacaggctgccatcgtccaacagatcaggggcaacagtataaagatggtaagcttaaacaagatcttattgaagttaactcgccaaatacgcaaggcaagcccattaatggctcagattaccttgaacaaattaaccaaataaatcaaacatcttcacgtctatacaatagtaatcaagatacttatcaagcagtggaaaattggttacgctcaggggcagatacgcgtcaattacgtcaatttaatatcgcagcctttcaaatggaaggggaagataattatgggaatgtaaaatttaccggatattatacccctgttttagaagcacgtttaacgccacaaggtgactttaaatatccgctctaccgcatgccagccaaagtgcgtggtaaattgccttcacgagcggctatctataacggtgctttaagtcccactttaattgccgcttatagtaactccatcatggataactttatgatggaagtgcaaggcagtggctatgtcgattatggtgatggtaaacctttaaccttctttggttatgctgggaaaaatggtcatccctaccgcagtattggtaaagtgctgattgataatggtgaagttgaaaaagaagcgatgtcaatgttggcaattagagagtgggctgataagcatagtgaacaagaagtcagaaaattattagaacagaacccctctttcgttttctttaaacctgaaccttttacgccagtaagaggggcaagtgctattccgctgattgctaaagcgtcagtggcttctgatagaagtattatccccgcaggaaccgtattattagcggaaatccctattttagataataccggtaagtttactggacaataccaaatgcgtttaatggttgctttggatgtggggggagccattaaaggacatcatttcgatatttatcatggtattggtaaagaagccggacaaatggcgggtttttataatcattatggacgtgtatgggtattaaaaaaatcgcaacccaccttactgaaccccatacagtaa

SEQ ID NO: 294752 - DNA, 1263 bp, Proteus mirabilis
atgagtcattcagaacataatcaaacacgtcgtcgtcttattaaaggaattggcgcgttattgttattaagtgttagtcctgttggcttagcggcaacatcatcagtggttgccgtcagggtatggcctgcatcgacttatacacgtgtgactatcgaatcaagtagacccttgaaatatcgccagtttgcgttatcagcaccagatagaattgtggttgatcttgaaggtattcaactgaatagcgttctgaaaggtatggctagtcaagtgcaaacaaacgatccttacttaaaacttattcgtgtcggtcaaaataccccaactacggttcgtttagtgtttgaaattaaaacccccgttcagccacaaatgtttactttaaaacccgttgctgaatttaaaaatcgcttagtgctcgatttctatccaagccatgcggcgacaagtgaagatgatccgctattagcgctattgcgtgaatataacgaaggggatttacaacaagctgtgcctgaacaaacggatacgcgtaagcccggaagagcaggacgagataggccgattattatcatgattgaccccggccatggtggtgaagatccgggagcgatggggaaatataaaactcgtgagaaagacgttgtactacaaattgcccgtcgcttaagagcattgattgataaagatgccaaaatgaaagcgtatatgacgcgtaatgaggatgtgtttatccccttaaaagtgcgagtagcgaaagcgcggaaaatgcaggctgatctctttgtctctattcatgcagatgcatttaccaatcgctcggctagaggctcttctgttttcgcgctatccaaaacaggcgcaacaagtaataccgcacgttacctagctcaaacccaaaatgaagcggatttaattggtggggtgagtcgaagtggtgatcgctatgttgatcacgcaatgcttgatttagtacagaccgcgacaattaatgacagcctaaaatttggtagtgaggtattaaaattattaggtggcgtgaataagctacataaaaataaggtcgatcaagctggatttgcggttttaaaagcccctgagatcccttctattttagtagagacggcttttattagtaatattgaagaagagcgaaagctcaaaacggctaaattccagcaacaagttgctgaatctattttcaaaggtattaaggcctattttgctaatggtggtgaactgacattagctgatcgaggctga

SEQ ID NO: 294753 - DNA, 1335 bp, Proteus mirabilis
atgaaagagcgtagcaccgaattggtcgatggttttcgacactcggttccgtatattaatgcacatagaggtaaaacatttgtcattatgctagggggagaagcaatagcccatgagaactttccctctatcattaacgatattggtttattgcatagtttaggaatacggttagtggtggtttatggcgctagaccacaaatcgatgtggctcttgaagagcaaaaaatttctccgctctatcataaacacacacgaattactgatagtaaaacccttgaagtagttaaacaatctgccggtactttacaactcgatattactgctcgtttatcaatgagtttaagtaatacgcccttgcaaggagcgcatattaatgtggttagcggtaattttgtcattgcccaacctttaggtgtcgatgatggggtcgattattgccatagcggtaaaattcgccgtattgatgaagaggccattcatcgtcagttagataaccatgccattgtgttaattggccctgttgccgtctctgttacaggggaaagttttaatttaacctctgaagaggtcgcaacccagctagctatcaaacttaaagcacaaaagcttattggcttttgctcttcgcaaggggttgtagatgcaagtggccagattgtgtctgaacttttacctaatcaagcagaagaacgaattcaagcattacaaactacaggcgattatcactcaggtactgtacgttttttacgaggtgcggtaacagcctgccgtcgtggtgttgagcgtagccatttattaagctatcaagcggatggtgccattgttcaagagttattttctcgtgacggtattggtacgcagattgtgatggaaagtgccgagaaagtccgccgcgccaatattaatgatattggtggcatattagagcttattcgtccattagagcaacaaggcattttagtacgccgctcaagagagcaacttgagatggaaattgatcaattcactattattgagcgcgataatctcaccattgcttgtgccgccctctatccttatcagtctgaaaaaataggtgaaatggcatgtgtcgccgttcatcctgattatcgtagctcttgtcgaggtgacgtgttgttacaacgcatatcaacccaagctaaacagatggggttagataaattatttgtgctcacgactcgtagtattcattggttccaagaaaaaggctttacgcctgctgaaatcgataaattacctattgaaaaacaggctctgtataattatcagcgtcgctctaagatcttaattttaaatctacataaagagtag

SEQ ID NO: 294754 - DNA, 1917 bp, Proteus mirabilis
atgattaaattattagaacaagcaattgcacaaaacctattgcgcccattagatttacgttttgctcaaatgctggtggcagatgaaaatcctatcctactgtttatttttgcctatctcagtgctcaaacaggggcgggccatgtttgcttaccgttaaatatcatacaacaagataaattgtttgatggacgacacaccgagctttcacaagccatttggcagaaaatggcgcaaccatcagcgaaagaaatactggcagagcttaatcagagcgagtgtgttaatcaaggccatagtgacttaccttcacctattattctcgataacggattactttatctacaaagaatgtggcgttatgaagagcaaattgcgcaattttttcgccaagagcaacgggtggttgatatcgatgaaaatcaattaacaaacgtattaaatcaacttttcccaagcgttaaaacccatgctgaaactaactggcaaaaagtcgccgcagcggttgctattacaagccctatttcgattatttcgggtggcccaggaacagggaaaaccacgacagtagcaaagattttagctgcttttgtcatgctaacggcgaatgaaaaacccattattcaactagccgcacccacgggaaaagcggcagctagattgaccgaatcattaggtaaagcattagcgcaattggcactaagtgaagaagagttaaaatggatgcccgatcaagcgcaaaccattcatcgcttattaggtgcccaaccggaaagtcagcaagttcgttatcatcgcgataatccgctacaacttgatatcttggttatagatgaagcttctatggtggatttaccgatgatggcgcgtttaattgaggctttaccggaacattgccatgttatttttctgggagataaagatcagctcgcttcggtagaggcgggagctgttttaggggatatttgtcgttttgcggatcaggggtttagccaacgccgttttgagcagattgatcgcttaacacaaggtgaattacagaaagatcccgcttctatgacgacttctactacgccagtttcggtggtcagtgattcactatgtttactgcgtaaaagttatcgttttggctcacattcaggtattggtcaattagcttttgcggttaatcaaggacaagtgaagagtgctatgacgttactgaaaaaagcgacagtaacacaagagagcactgagcgagaaaaacataccgatccgcaggacatcgaatttatctcattagacaccgatgagagctatatgaagatgcttcaagatgttgctaaggcttatcatcactatctatcgttagtcgcgcaaaaagcagcaccagagactattcttcatagctttaatcaatatcgtttattgtgcgctttgcgagaagggccttttggtgtcacaggactaaatgaacgtattgagatgctgttacatcgccaacgcttgatacgacgacctataaatagttatcagcgggagtatattgggcgaccaattatgatccagcgtaatgacagcacattggggctatttaatggtgatatcggcattatgcttaataacgatgaaggggaaatgaaagctttctttcagttgcctgatggcacattgaaagctatccaacctagtcgtttaccgcaacatgagactgcctatgtgatgacagtgcataaatcacaaggttcggaatttacccatacggcattggtattgccgacacaattttctcctattgttagccgagaattactctatacggcgataacgcgagccaagcagaagctatcactttattcttctgaatatatggtgaaaatggcgatccagacacgtattcaacgctgcagtggattagttgaaaaactgcgttactga

SEQ ID NO: 294755 - DNA, 3639 bp, Proteus mirabilis
gtgagtgaagtgatacaggcacaggtattagatccctatacacttcctttgtatcaaagacgcctcattgaggcgtctgcgggaacagggaaaacgtacactatagggttattgtatttacgattactgcttggattagggggtgagtcagcatttcatcgtcccttaagtgttgaagagatcttagtcgttacttttaccgaagcggcaacggatgaattacgcgcccgtattcgtcaaaatattcatcagttaaggctagcctgtatccgtcatcaagtagaaaatgacaataacgcttaccaaatattattagatcaaatcccgaataaaatggtggcggcgcaatggctattagaagctgagcgtcaaatggatgaagctgccatttatactattcatggtttttgtcagcgcatgttagccactaacgcctttgaatctggtgtattgtttgaacaggtgttgatccaagatgaatatgagttaaaaaaacgtgtctgcgctgatttttggcgcaggcactgttatcccctttcttatgatgttgcctatgcggtaagcgaaatttggtctggccctgagcaactgctgtatgaaattcaaccctatttacaaggtgaatgccccgaaattcaaggtattgatttcgacgctaaaaaagagactgttgaacagcgtcatcaagcagtcattgaggctattgataaagttaaaacactatggcgtcatcattgcaatgaaattgcagattggataacttcatctggtgttgataaacgcagttacagtagtcgtttcttacctaaatggatcgatgaaattaccgcatgggccactccactcgaaaccaaaagttatcagttacctgactgtttaagtcgtttttcgcaagcaaccctacatgaaaaaactacaaagggtgctgcgcctgagcacgctttatttgcggaaatcgaactactttgccaacaaagtttaacgttacgtgatgtgatcattgctaatgccattcctgaaatacgccaagggatagaaaatgaaaaaatgcgtcgtggtgagttgggatttgatgatctgttaacgcgtctcgataaggcattgcaacgagaaggtggcgaagcattagcagatgctattcgccaacgttatcccgtcgcgatgattgacgaatttcaggataccgatcctcagcagtatcgtatttttgatactatctatggtgagcatacagagagtggtttgctatttattggtgatcccaaacaagccatttacgcatttcgtggtgcagatatctttacctatattcgggcaaggcaacaaaccgatcaccactatacattgaatactaactggcgctcggctccgggtatggtaagtgcagttaataaactgtttttacgttctaaaaccccttttttgtttgatcatattccttttattgaggtcaattcggctgaaaaaaatcagcatatgaagtttatttaccagcaaaaaacggttgccccattaaatttttggttagctgaaggtgaaagcctttcaactggtaattatgaacaattaatggcctcgcaatgtgcgatgcaaattcgtgactggttatcagccggtgacaatcaacaagcttggttaatcgaacaagacaataaaagcgctgttacatctgccgatattgtggtgctagtgcgtagtcgccgagaagcattattgatccgagatgcattagatctgttatctatccaatcagtatttttatccaatagagaaagtgtgtttgaaaccaatgaagccaaagatctactttggttactacaagcagtggtaacccctgaaaaagaacgggtgttaagagcgtctcttgccagtgcactgtttggatttaacgcacaacaaattgacgaacttaatcaagatgaacagcgttggaaccgctatgtggagcaattctctgattattttgtcttgtggcaaaaacgtggtgtgttacctatgctacgtaaagtcatgatagaaaaccaaatcgctgagaacttactcgcaagccaagcaggagaacgacgtttaaccgatatcatgcatattggcgagttgctacaagaaacatcattacagcttgatagcgagcacgcccttattcgttggttagcccagcaaatttctcgaccagatgcacaagcggaaagtcagcaaatgcgtttggaaagtgataaaaatctagtgcaaatttgtaccattcacaaatctaaaggattggaatatcccattgtttgtctaccttttgcctgtaattatcaagaacaaaagggcgcgctttatcatgatagagatgaattttacgcaaaactagatatttttaatcaacctgatagcgtgcgtcttgctgatgaagagcgattggcagaggatttacgcttgttgtatgtggcattaactcgggcgaaattttgttgttatgttggtgttgcgcctttggttaaaggaaataaacgtaagtcaggattaactgatttgcataaaaatgcgctgggatatctgttgcagcatggggaagagggtaatagtgagctattacatcaatccattaatcaattgcttgatgacaatataaaagtgatcacgttaggtgatacctcaacgcatcgatatcaatctccacatacaacggatattgctttagatgccgccatatttaagcgaaaaattaatgataattggcgtatcaccagttattcgggattaacggcacaacactctgctcgtggatatctatttgatagtgctgatttggatgccttggtgcaatctatcgctccgggcttagataccgatgctaaaggtgagaaaacagcgcaacacagcgatgaactctctattcatcacttccctcgtggtgcagtcgcggggacatttttacatagtttgcttgaagagcttgatttttcacagcctattgatgaaggttggatgcaagagcaacttattgcccaaggttttgaggaaaaatggacgccattgttggtggcttggatggaaaccctttttcacaccccattaaatacgcaaggcttatgtttagctgatattcccaaggagcatcaactcgatgagctacaattctatctgcctattgaaaaggagatgtcggcggcacagttaacagcgttaacccgccaatacgatcctttatctgcgcaatgtccagccctcaattttcagcaagtacaaggcatgctaaaaggttttattgacttagtattttgttgggagggcaagtattatgtggttgactataaatctaactggcttggtgaatcgagtgaggattacacgcaagaggcgatgagcaatgcaatgcgcgatcatcgttatgatttacagtatcaactctatactttagcgctacatcgatttttacaacaacgcttacctgattatgattatcaacgtcattttggtgggatctgctatctcttcttacgtggtattgatgctgactacccgggcaatggcgtctatacctatctccctgaagaaaagtttgtagaagcattagatgcgctatttaaaggggaagcgcttgaggttaacggcagtaaagtgaacgcgctgggtgagaacaattcaaatgattaa

SEQ ID NO: 294756 - DNA, 1536 bp, Proteus mirabilis
  misc_feature (4)..(13): n is a, c, g, or t
atgnnnnnnnnnngtatttgggtgattagccctaatgagccttcaaataagcaagcctattttgtccatgcaccttatcaagtggataaaattactgcgaagcaattagcttcatggcaggaattagccagcgacatctcattgtcattaccgacactaaacccttatattcctgataatctgtcacttattgatgctgatagtaacatcactaagcctcaactattatggcaagacagtcatgctcggttattctatatgccatcgcactatttttctgatgagccgaaagccagtgtgacgttaagtttagtgaataaaaatgcagatcgtacagttaaacagcaagttatacaaacattgaccaattaccttgctgatctaacctctagtgaactggcttatcaagcttctgttgccggcatgaatatctcctcttcttctgggcgtggagtcgatttctcagtcaatggttatactcaacatttaccagagctagtaaatgccacactaaaaagctatataacgtttgaagccactcagcaagagcttgatcaagctaaatcttggtatcgtgaacaactggaggtgacgcataaccttaaagcgtatgatgctgcaatgttacctgcccgtcgcttaaatacgatcccttattatgaagaagccgataaacttaaggcgttagagtcgataacgttacaagatattaaagataatcgtcgtgatgtcattgaaaatgcagcgcttcaagcattaattatcggtaatttaacgccagagcagagccgtgagatagttaaatcggcacaggcattattaggcaataaaggaacagaatattggattggcgacacattagtttttgataaattaaatcaagttacattccaaaataaatctaaaagcaccgataatgcgctaggtgaattgtttatccctattggttatgagcgtctacaaggaaaagcgattacatcagtattatcctctatcgtgcatccttggttctttgaacaactcagaacagaagagcaattaggttatgcggtctttgctttccaagcttcaatgggcgagcagtccggtttaggctttttactgcaaagtaatgcaaaaccacctgtttatctcaatgagcgttatcatgcattttatcaacaagcttatgatcgcttgaaaaagctaagtgaagctgaatttaatcaatataaaaaagccattattgatgaagtaaaacaaccaccgcaaacattttatgaagaggtttctctttatcgtaatgatttttatcgtaataacttaaaatatgatggtcgtgagaagtttttagcccaactgaataaggtaacgctaaaacaagcgatcgaattttatgaaaaagcgataattaaaccgacaggactcgtgtttgtttcacaaataatcgggaaagagggtaacaacgctgattatgcgcaaaataaacagtggaaaatctattcaaccgtgagtgaattacaaaaaacattacctgttgaggaaattaaagagtga

SEQ ID NO: 294757 - DNA, 1389 bp, Proteus mirabilis
  misc_feature (1364)..(1373): n is a, c, g, or t
atgagaaaatacttatcgcaactttggattatgttgctattgatgctagtcagtatcaacagcttcgcaacagatccactttggcaagtattgccggatagcattgaaaaaagtgaaagtgatccacgtgattatcaggctattaaattagctaatgatatgaccgtattactggtttcagataaaaaagcggtcaaatcattaacagccgttgctctgcctgtcggtgcattagaagatccagatagccaacaaggtcttgcccactatttagaacatatggtgttaatgggctcgaccaaatacccaaaatcaggggatctgacagagtttttaaataaaaatggtggctctcataatgccagcacaaccacttaccgcaccgcattttatttagaagttgaaaatagtgccattaatgaagcagtcgatcgcttggcagatgcattagcggagccattacttgatcctaaatatgctgatcgtgaacgtaatgcggttaatgcggaattaaccatggctcgctcccgcgatggaatgcgtttttggcaagtgagagctgaaaccttgaatccggctcatccaagctctcgttttatgggaggaaacttagaaacattaagtgataagccagagagtaaattacaagatgaattagtgaaattctatcaaacatactattctggtaacttaatgaatggggtgatttatagtaataaatcactggacgaactcgctaaattagcggctgatactttttcccgtattcctaataaaaacacccaagcaccagtaacgacggtgcctgcgatgacagaaaaagaaaaagggataatgatccacttagtcccagctcagccacaaaaaaccttacaaatcgaatttggtattgataataatcttgccgattttcgcagtaaatcagatgaatatattggctaccttattagcaatcgtagcacgggaacactagcaacttggttacaagagcaaggattagcagagaatattagtgcttcatctgaatcctatatcgatcgcaatcaaggttcatttaccatttatgtttctttaacagacaaaggccttgctgagaaagataaagttatttcagcgatattttcttatattcaactgatccaaaataaaggggtcagtgagcgctattttaaagaaatagccaatgtgcttgacctctcattccgctatggctctattgttagagatatgaactatattgaagatatctccgatatgatgctgcgctatccgattaaaaatattcttaatgcggattttattgccgatgactatcaaccttccgcgatcctttctcgtctagaatcgcttacaccagaaaatgnnnnnnnnnngtatttgggtgattag

SEQ ID NO: 294758 - DNA, 1620 bp, Proteus mirabilis
  misc_feature (31)..(40): n is a, c, g, or t
  misc_feature (1603)..(1612): n is a, c, g, or t
gtgaggcagggccgtggcaaggggtactgcnnnnnnnnnngggtactgccttacgatgaatcaagtggcctagttgctgagttagcagggcatctagcagattttttatataccttaagtgaatggcgaacacgattaagcgaaactcgcaacttagaagagtggcttgatatcggtcaacagcttgttgatgccttttttgacacagatgaagagacagagctggtattggcgcttatcacacaacagtggcaaaaggtgataaaaaatggtctagaggcgcactatcaacatgaaattccattagtgctgatccgcgatgaacttacagtgcgttttgatgatgagaaaattagccaacgctttttagccggaagccttaatttttgcaccttaatgccaatgcgttcaattccatttaaagcagtctgtttattgggaatgaatgatgggatctacccacgtaatattcagccattaggatttgatttaatggcagaaaaacgtcgtcgaggtgatagaaaacgtcgtgatgatgatcgctacctgtttttagaagcattaagctcagcagaaaaatacctttatatcagttatattggtaaatctattcgtgacgatcgcgaatgtaatccttcggtattgattaaagagttacaagattatattgggcaaaatttccgtttaagggaagatgcatcattaaatgttgatgacagtgcgcagcgtatcatcagccacttattaacccaacatagtcgagtgccttttgcgccagaaaactttaaaacggatgctttatatcgctcttatgccgctgaatggttaccggcagcaagtgggaaagggactgctcaccaagcattttcaacaccattaaataaaaaaattgagaaagtctctttagatgaactatcacgcttttatcgccatcccgtacgcgcttttttccagcaaagtctaaaaacgaattttgttattgaagagaccgagctaccggaagaagagccttttgtcattaatgcattacaacgttatctattaaaccaatggttattaaaagccttaatcgaagggacatcaacagaagcactttatgaacgcattaaagctgctggaaaattaccagctagtgcgtttggtcaaatttattgggagcaacaaatagaaacgttgcaacctttagccgaaaaagtcagaagtgaacgtttagcaacccattctgtcacaatagaataccaatttaatacgatcccattaattggtcgtttaaatgaagtacaagccgatgggttactccgttggcgacccgccacattaacagctaatgatctactgcaattatggatagaacatctcgtgtactgcttaagtggtggaactggcgaaagccgtttttatggtagaaaagagtcgcaatggtgtctatcaccggtgtctgcggatattgcgtattcaatccttgaaagattgatccaagattatcaaacagggatgaatacacctttagccttattcgccaacagtggttgggcttggttacaagcttgcttcgataaaaaaacacagacgtttttatttgatgatgaagagatacaaaacnnnnnnnnnnatatttaa

SEQ ID NO: 294759 - DNA, 1680 bp, Proteus mirabilis
  misc_feature (1652)..(1661): n is a, c, g, or t
atgttccatatttaccattcaaatcaattatcactacttaaatcactgatggtacattttatgcaaaatcggccactatcatcgccttttgagcaagaagtgattttagtgcaaagtcccggaatgtcgcagtggttacaaatccaattagcagaaagtttgggtattgctgctaatatccgttatccattacccgctacttttatttgggaaatgtttactcgggtattatcaggtatacctaaagaaagtgcgttttctaaagatgccatgacatggaaactaatggcattattgcctaattaccttgatgatccggcatttaaacccttgcgacattatcttaaagatgatgaagacaaacgtaaattacatcaactagcggggcgtgtggcggatctctttgaccaatatctggtttatcgtcccgattggttgtcggcatgggaaaatgatcaactaattgatggcttgagtgacaatcaatattggcaaaaaacactgtggttggcactgcaacgctatacagaagatcttgcgcaacctaaatggcatcgtgctaatctttatcaacaatttatttctactttgaatgatgcgccagtaggggcgcttgcgcactgttttccatcgcgtatttttatttgtggtatttcagcattgccacaagtctatttgcaagcactgcaagcaatcggcagacataccgaaatctatttattgtttactaatccttgccgctattactggggagatattcaagatccaaaattcctcgctcgtctaaatagtagaaagcctcgacattatcagcaacttcatgaactaccttggtttaaagatgaacaaaatgcatcgacactatttaatgaagaaggggagcaaaatgtcggcaatccactattagcgtcttggggaaagttaggtaaagataatctctattttctttctgagcttgaatatagcgatgtgttagatgcttttgttgatataccaagagataatttattacatcaacttcaggccgatatactcgatttagaggatttttcacaaataggtcagacgcttgaggattaccaaagtagtgaaaaaaaacggatcatcgccaatgatgatcgttctttgacctttcatgctagccatagcccacaacgggaagttgaggtattacaagaccaattattgcatctcctcgagcaagatgctgatttattaccgcgagatattattgttatggtggcggatattgatagctatacgccctatattcaagccgtatttggtaatgcgcccgcagagcgttatattccttttgccatttcagaccgaaaagctcgccaagtacatcctgtcttacaagcttttatcactttattagaattacctcaaagccgttttaccgcagagcaagtgcttgcattacttgaagtacccgccttagctgcacattttgccatttttgaaaatgagttgaagctactacggcgctgggttgaagagtcaggtatacgttggggattagatgatgaaaatgtggcctcctttttattacctgtgacaggaaaaaatacgtgggagtttgggttattaaggatgcttcttggttatgcgatggacagtgaggcagggccgtggcaaggggtactgcnnnnnnnnnngggtactgccttacgatga

SEQ ID NO: 294760 - DNA, 285 bp, Proteus mirabilis
atgctaattaatatggtgtcagtattgctattctttaatattagctttgtcgctattatagggtatagccaagccttaaaagttgattttcagcgcttagtggctatccaacaagccggagcgtctctttttgctttttatgggcaaatgtcattcaactctgttgataaccttaaaataatgacacaatcacttattgaagcggaaggctgtcaaaaaatagagggatcgataacccaccattcaggttatgtgacacgcttataccattggtcatgtgattaa

SEQ ID NO: 294761 - DNA, 459 bp, Proteus mirabilis
gtgataacgacacagggaacaataaaggagcaacagggtgtcatcggtctgatggctgcagtaggttttatggtgataagtttatcgttactgacaagttttgcttatcattatcgtcaatgtcaattaatggtgatgcaagagttacaagcaaagcagacctttttattcgctggatctgcgttgtcatggggaatgaccttaacatgggatttatcgccttctcgtctttaccaatggcaatgtcgtacttttactgctgagcctaatatgaaaagctgtttctctttgagaggaaagacaagcgctttactactcggagaggctaaaagtcatagcggagataagatatctcattatcaatggattaatctggtgggtaaggaaaaactgcatattgaagcccaaccgaatggttggctagactactgtccactagttaaagaaggctgtatttga

SEQ ID NO: 294762 - DNA, 480 bp, Proteus mirabilis
atgacaggcaatcattattcccactctaaacatttagggagtagcttattcgaggtgcttattgttatggctatagtagcaatattgagcgctttatctttgaactcatatcatcagttgttacgccaacgccagttagttcaaagtgtaagagaagtgatggcgtttttagcttatcaacaacaacgctcactgctctttaattgcaaagtgcaaattgtattgtggctatcacccatcaataaaatagaggcaaaatcgttaacaacacccacaaccaaagaaagtattcaattagggttaagcaatcagcttattcgctctacagcaacacgctttacattttgtggcttacgccaaacgttacgaccgatgcattttgtgctgtcaaatggtgatgaagaggtcaaaattattatctcttcattagggcgtattcgagcgtgcagtcagacaataaaggcattttcagtatgctaa

SEQ ID NO: 294763 - DNA, 297 bp, Proteus mirabilis
atgtcaaaagtttatcctatttctcaaattattggacataaaattcgccaacagcgccaacacttgcgtttatccgctaaagcagtggctgaaagagtcggcgttagccaacagcaattttcacgctatgagaatgggctatgtaaaattgatgttgatatgctcttccttattgctaaagaattaaatgttacaccaaccgcttttcttccttcaccgcttaatgaagatcctatcgcatcttccagcgctgtcacccaatctaagctattttggagtgcacagagtcaaatttaa

SEQ ID NO: 294764 - DNA, 1878 bp, Proteus mirabilis
atgaatgtaaaagagatcattcgtcatgaaccatttggaacattactcggttatgcacctggtggtgttgcgatttactcttcagattacagcagtatagataaagaagattatgccgccaatgattcattccgtagttatattggtaatgagtatatggggcataagtggcaatgtgttgaatttgcacgccgttttctctatttacattacggggttgtttttactgatgtgggaatggcctatgagatcttctcgttacgtttcttacgaagaacgattgatgacgatattttacccttgcaagcttttgcaaatggcagcaaacagccaccgacggtaggagcgttgcttatttggcaagaagggggagagtttaaagtcaccggtcatgtggcggttattaccgaagtattagaagataaaatccgtattgcagaacaaaatgtgatccacactaggttaccgcgaggtcaacaatggacacgagagttaccacttaaagtgagtgataatggctattttatcgaagatacctttgataataccaccttgctaggttggatgatccaaacagaacctaatgcctacagtttacctcaacctaaagttgcccctgaattgttagctattcatgaggccaaattagccaacaaggggcaatttgctggaaaatggctagatgaaagcgatccgttagaaaaagcctatgtgctagcacagcacggtcatacgattaatcaagacagctatgaatatttcaccatttcagaaagtgctgagcatgaacttatacgtgctagcaatgaaatgcatttgatgtatctgcatgcaacggaaaaagtgctgaaagacgataatttactgcgtttatttgcgatccctgaagtgttatggccccgtatccgcctatcatggcaaaatagacgtcatcaaatgatcactggacggttagatttttgtatggatgagcgcggtatcaaggtgtatgaatataacgctgattctgcatcttgtcatactgaagccggattaattattgaaaaatgggctaaacagggtggcattaaagcaggttataacccgggtgaacgtctattagatgcgttatcagatgcatggaaacacagtgatgcgaagccatttgtacatattcttcaagatgatgataatgaagaagattatcatgctcgctttatgcaacaagcactgactaaagccggttatagcagcaaaattctgcgtggactaaaagagctgcattggaatagtcgtggtcagttaattgatggtgataaacgtattgttgaatgtgtatggaaaacatgggcttgggaaaccgcgttagatcaactaagagaagagagtgaacaacagtcacttattcctattcgtattggtgatccggcgggagaagttcgtttagttgatgttcttttacgccctgaaatcacggtttttgaacctctttggacacttattccaagtaataaagcgatattacctattttgtggcaacttttcccagataatccttatctacttgatactgagttcactttaaccccacgtttgtcgcagagtggttatgcagttaagcctattgctgggcgctgtggtagtaatattggtttagttgatcaccaagaaaatgtattaggtgaaaccagtggtcaatttgaacatcaagaaaatatttatcaagagttatggtgtttaccaaaagtgtctaaccgatatattcaggtttgtacctttacggtagatggacattatggtggttgttgcttacgctctgatcctacattagtgataaaaaaagacagtgatattgagccattaattgtccttgaagataaacactttttagcggattaa

SEQ ID NO: 294765 - DNA, 945 bp, Proteus mirabilis
atgtttggatcttctaacgtgatcttgagaaataagcgcttatccagttatcaattagcacgacttcacacttttgaagcaacgggacggcatttatcattcgctttagccgcagaggaattgtccttgacgcctagcgcgatcagccatcgtattaatacactagagaaagaattagggataaagctatttaatcgctttcatcggcgtattgaattaaccgaagaaggtgaacgtatttattgggcattgaaaaaaacacttgaagatattaatcaagagattttagatatctataatcaagaaatatctggcgtattaacggtgtattctcgcccttctattgcgcaatgttggcttgtacctcgtatttctgattttactcaacgctatccttctattgaattaaacttacttactggcaatgacgatattaattttcgtggttatggtatcgatctcgctatctatttcgatgataaacacctgaaaaatctctattgtgaagatttaatctcagaatcaattattcctgtttgtagccctgaatatgctgctcgccatgaattagtaggtaatatccatcaccttgctaattgtactttgttacatgatagacaagcttggagtaataactctgattttgatgaatggcgcgcttggagtgaatatatgggattaggattatttccaaataaaagtaatatttgttttgatcgctctgatttagctgttattgctgccgttaatcattccggtgtcgcaatggggcgtaaacgcttaattcaaaaacaactcgcaaataatgaattaatagtcccttttgataattgtgagtttttttgtgcacaacgctattatctggttacccgcgatgaaaagagtaacgctaaagtacagctttttattcaatggctgaaaaaacagatcttacaagggatgtga

SEQ ID NO: 294766 - DNA, 1338 bp, Proteus mirabilis
atggaaccgacactatgggtactaggtactctgattataagtatcttgctcattgtttttactataataaaacttaagtttcatccatttttagcactactacttgccagtttttttgtcggtatggcaatgaaaatgaacccattagaaatggtcagtgcaattgaaaatgggattgggggaacgctgggatttttagccgccattattggtttgggtactattctcggtaaaatgatggaaatatcgggggcggcggagcgcatcggtatcaccttacaaaaatgccgctggttatcaccggatgttattatggtattggtgggactgatttgtggtattaccctgtttgttgaagtaggggtagtgctacttattccattagcattctctattgctaaaaaaacaaacacctcattattaaaactcgccatccctttatgtactgcattaatggccgtgcattgtattgttcctccacacccagcagcgctttttgtcactaatgagttaggggcagatatgggaacggtgatcgttgccggtcttgctgttggattattagcctcattagtgggcgggcctcttttcttaaaagtattgggtgagcgcttaccttttaaaaccgtaccagaagcattttctgatatggaaattcgtcaagaaaaagatttaccttcacttggggcgacattatttacggttttattacctattgttctgatgctgattaaaaccgccgcagagcttaatatggaaaaaggcacttcggtttatattgcattacaatttattggtaacccgattacggcaatgtttattgctgcttttgttgcttactatattttaggtattcgccgtaatatgggcatgagtaccctattgaaaaaaacagaagatagttttagctctattgccaatattttgttaattattggtgctgggggcgcatttaacggcattttaaaagggagtggtttaagcgattcattggcggtgatcctctctaatttggatatgcatcctattttattagcttggctagtagcgattattctgcatgcagcagtaggatcagcaacggttgctatgatgggtgcgaccgctatcgttgcaccattaatgccaatgtatccagatattagccctgaaattattacattggcaattggctctggggctattggctgtacgattgtcacagactccctattttggttagtaaaacagtattgtaatgccacattaagcgaaactttccgtttttatagtatcgcgacctttattgcttcatttgtggcattagggggcacttttatgctttcttttgtcatataa

SEQ ID NO: 294767 - DNA, 1329 bp, Proteus mirabilis
atgaccacgatagatataaataaattaaaaaatgattatccactggtacgtgatttagtggatttaaaagaggtggtttggtttaaccccaatgttacctcaactgaccagggacttccttatgtaggtttaacgcaaaatgatgtgatggatgcacaggcaagattacaacgttttgcaccttatttaatgaaagcctttccagaaaccgcatcaactgaggggatcatcgaatcagccgttgtggatatccctcaaatgaaagaggcactagaaaagcgctataacacccttattgagggacaattgcgtttgaaaaaggatagccacttacctatttctggttcaattaaagcgcgcggggggatttatgaagtgctcactcacgctgaaaaattagccatagaggccgggcttctgaccacagaggataattatgaaaaattattttctgatgaattccgcaaattttttagccaatacagtattgccgtcggctccacgggtaacttaggaatgtcgattggcattatgagtgcaaaactgggctttagcgttagtgttcatatgtctgcggatgctcgtcaatggaaaaaagacaagctacgcgctcatggtgttaatgttgtggaatatgagcaagattacagtattgcggttgaacaaggacgtaaagaggcagaaaaaaatcctcgttgtttctttattgatgatgaaaattcaaaaacattattcttgggttatgccgtcgctggattacgtttaaaacatcaatttgaaacgcttaatattccggtcgatagtgaacatcctctgtttgtctatctgccatgtggtgtaggtggagggcctggtggtgtcgcttttgggttaaaactggcatttggtgatgcagtacattgtctatttgctgagccaacccattctccttgtatgttacttggggtgtatacccagttacatgatggtatttctgttcaagaagtgggtatcgacaatattactgctgctgatggtttggcggtaggtagagcctctggctttgttggacgggcaatggagcgtttgattgatggttattacaccattgatgatcaagagttatataacttattgagcttgttaaacaaagaagaagggatccagttagagccttccgctttagcaggaatgacaggggctattcatgtttctcaagctaaagattatctacaaggtttatcacttgatagtcaaaaaatgcacaatgcgacgcatttagtatgggcgacgggaggcggtatggtgccaactgatgaaatgcaaaaatatcttgcgcaaggggaatag

SEQ ID NO: 294768 - DNA, 1041 bp, Proteus mirabilis
atgacacaatcagatttcgttgaactgaaaaatattgttaagcgttttggtacaaacacggtaattgacacgctcagtttatctattcctcaaggaaaaatggtttcgttattggggccatcaggttgcggtaaaacgacagtactacgcttagtggctggattagaaaaaccgacagaaggtaaaatttttattgatggtgaagatgttactgatcgctcaatccaacaacgtgatatttgtatggtgtttcagtcttacgccctgttccctcatatgtctttaggtgacaacattggttatggcttaaaaatgttaggtcgcccaaaggcagagatcaaacagcgagtggcagaggctctagccttggtagatttagcaggatttgaagatcgttttgtcgatcagatttcaggcggtcagcaacaacgagtggcattagctcgtgctttgatcttaaaacccaaagtgctgttatttgatgagccattaagtaatctggatgctaacttgcgccgtagcatgagggagaaaattcgtgaattacaacaacagtttaatatcacctccctgtatgttacccatgaccaaagtgaagcttttgccgtttccgatatggtgttagtgatgaataaaggcaaaataatgcaattaggttcaccacaaactttatatcgccaaccggcctctgagtttatggcaagttttatgggagatgccaatctcttccctgctactctaggggctgattatgtggatatttttaattatcgcttacctcgccccgagaactttaacagcaacaaaaccgaaattagagtgggtgtcagacctgaagctattaccttatctcaacaaggtgaagcttgtcagcaatgtacaataatccatgtcgcctatatgggaccacaatatgaggtgactgttgcatggcaaaatcaaacattgttattacaagtgaatgcaacccaacttcaacctaatgaaggtgatagctattatctacaaatccatccttatgggatgtttatcttagaataa

SEQ ID NO: 294769 - DNA, 2079 bp, Proteus mirabilis
atgtctcacacactcgctttgtctgaaaaaaagaggtgggatcccatatttttatggatcctgattgcatggatggcatttatattaatgccttcatggagccttgattatggtctatttgattctaccgcagatgaattacttacctcttatggctggagtaacttaaatatcagtctgctctggtttttacttcccagcatactattaattcgtcctttacatcctgtagggcgagaaaatcgtattcgtcactattttgatgcaagttttgcctttttctgcgcctttatcactattgttaccgcaacgatggaaggtcgtggtctgggttattcggttatcgtgctatttatttcattaggaatgatagccaagcatgctttaacacgcttagagtggttagggggtgatagctttgtgattggctcattaatcacagttgtcgccttaatcggtgtttttattatctttccaagtgtcgctatctttattccgatgtttcaagatagtgctggcaattttgccccctttgaatttattgccattctcagccaagcccatattgttcaggtgatgatcaattcaatcttactgtctatcgcagttggtattggctgtactttttttggtttgatcctcgccatttatacatcacgtattgcagtaagatcagcgattattggtcgagtattttctattttacctattgtcactcccccttttgttgtgggtttaggtgtgaccttgatgatgggacgttcaggttatatcactgaatttttggcaacttatgcaggtttagaaaataccaactggttatatggctttacgggaatttggcttgcacaagtacttgcctttacccctatgtcttttatgatcttagatggtgcaattaaaacaatccatccgtcattagaagaggcttcttatacccttagagctaatcgctaccaaacattctttcatgtttttatgccgttactaaaaccagcattagccaatgcctttttgatcgttatagtgcaatcattggctgattttagtaacccattggtgctaggtggcaactttgacgtgattgccactcaaatttatttctatatcaccggctctcaacttgattaccaagcagcaagtacgttaggtgcttcactgttggtattctcattattagtgttctgcattcaatatatgtggattggcaaacgctcatatgtcacggtgtcaggtaaatcctatcgtggtgatgttcaaccattacccacctccttagtaacctttgtcactagtgtgctgggtatttgggttatctttaatatcttactctatggcagcattttctacggtagctttacggttaactggggtgtggattacaccttaacctttgataactttattaaattatttggtcaagggatgagcgatggcgcatggccatcattacttgataccttactttatgcgggtatcgcagcacctattaccgctattttagggcttttgatcgcctatattgttgtgcgccaggattttaaaggtaaaaagagtatcgaatttacgaccatgctctgttttgccgttcccggtactgttgcgggggtctcttatatcttggcatttaatgattcaccgttttatttaacaggaacggcagccattgtgattatctcaatgaccatgcgtaacgttcccgtgggaatacgagcgggtattgcaggattgggacaaatcgataaatcgttggatgaggcgtcattaagtttaagagcaaattcaatgcgaactattttgtatgtgctattgcctttattacgccccgcgattttatccgctttaatttatagttttgtccgcgcaataaccaccgtcagtgcgattgtattcttagtcacccctgaaactcgcgttgctaccgcttatattttaaatcgagttgaagatggtgaatacggcgtcgcgattgcctatggctcgattttaatcatcgtgatgttggctattattttcttatttgactatttgattggcgaagcccgtgtttcacgctctaaagccaaaaatgcacagtaa

SEQ ID NO: 294770 - DNA, 1032 bp, Proteus mirabilis
atgaaactgaaaactctctctacacttgttgccgccggcttagctctttctacggtaagtttatccaccagtgctgcgggtcgcttagtggtttattgcagtgccacaaatgcgatgtgtgaagctgaaactaaagcttttgctgaaaagtatgatgttaaaaccacttttgttcgtaatggctccggcagtacattagcgaaaatagaagcagaaaaacgcaatccgcaagctgatgtttggtatggcggaacaatggatcctcactcacaagcgggtgaaatggatctgctagagccttatgtatccgccaatcttgatcagatcatgccacaatttcgtgatccggctaaacgcaaaggaaactactcttctgcggtttatgtcggtattctaggttttggtgtcaataaagatcgtttaaaagagaaaggtctacctattccgacctgttggaaagatttagtcaaacctgaatacaaaggtgaaattcaaatcgctgatccacaaagttcaggcactgcatacactgcattagcaactttcgatcaattatggggaacagagcaagcctttgattatctgaaaaaactaaataccaatatctctcaatatactaaatcaggtattgcaccagcgcgtaacgccgcccgtggtgaggccgcgattggtatcggcttcttacacgactattcactcgaagttgaaaacggggcaccactagagcttatctcaccttgtgagggcacaggttacgaaattggcggtgtcagtatcatcaaaaatgcccgtaatatggataacgctaagttatttgtagactggacactctctaaagaagcacaagaaattagttggaaagagggtaaatcttaccaaattctcaccaataccacggctgaatcttccccgatggctttgaaattatcagacttaaaactgattaactacgacatggataaatatggcgatagtgatgttcgtaaagagctgataaataaatgggttaccgaagtaaaaatgggtaaatag

SEQ ID NO: 294771 - DNA, 1338 bp, Proteus mirabilis
atgttaggtaaaaatttggcatcaataaataagacctatgatttttggcgtaaaaatttaatgttgtcgatgatcattggctatgccacgttttacctgactcgtaaaagcgtcaattttgtgatgcccgttatgcaaacggaactgcatctagataaaggtgatattggctggatagccagcctgttttatctcacttatggtctatcaaaatttctctctggtattttccatgaccaatacggctaccgttggtttatgggcgcaggtctggtaatgacaggggtgatgaatattatttttgcctactgtttatcctttcctgccttgcttttagtctgggcacttaatggtttctttcaaggatggggttggcccccttgtgcaaggttactcacccattggtattcacgtaatgaacgcggtttctggtggggattatggaatatctccatcaatcttggcgggatgagtattccccttttaaccgcttggttggcaacccattttagttggcaaatagccttagttattcccggcctaataggcattgttatggggttatggctttgtatgcaactaaaaggaacaccagcagaagaagggttacccacagtaggtgtatggcggcgcgatatttttgaattacgtcaagagcaagtatcgcctccgacccctatgttaaccattttgaaagaaagcatcttatttaaccgaatgatctggttactaggtttttcttatattttaatttatctcatccgtatggcgataaatgattggggaaatatttggttatcagaaacccatggcgctaacttgttaagtgctaatgccattctttctctttttgagatgggtggattgttaggcgcgttatgttcaggctggggctcggatttattattccgtggccaacgagcaccaatgatattgctgttttcactcgggctttttatcgcagtaacagcactttggctaatgccaattcatcattatgcattgcttgcagcctgttttttcagtatcggtttttttgtgtttggaccacagatgttaatcggacttgctgccacagaatattgtcataaaaacgcagcaggtacggtaacaggctacttgggattgtatgcctatttaggggctgcaatagcaggttggccattaagtcaggtcatggcgcattatggttggactgggatgtttgtattattaaccagtgctgcggccttaatgggactactactaatgccattgctgatcgctgatgtcagtaaacgtgagcatttagttggcccactttcattttccgatgacgacacatttaaaaggttctga

SEQ ID NO: 294772 - DNA, 1548 bp, Proteus mirabilis
atgcaaagaggcgcacgtttttttcttcaatctctctttttattgttgacctactctttactctggttgtcactttgggtgatcagtttttatcttagtcataatggtcaacaagccgctctttttttacctcaaggcttacggctagcattatttattttactttggcgacgtttttggttgccgatgttattggccgaatgggggctttattactggctaactcaacagcaattaattacccatgtaactctttatctctcacctttaatcagcttattggtcgcactagaagtacaacggatctggtggcgttacccactttattggcaacggttaaccttacttatcgcagcggtcggatttaatagcctattacaagcctttctactcagtttttttctcacgacgtccaccagcgcaatatttttgacctcaataacaggtggtattttattggctccctttgtttttctactttatgaatatttacgcgaattacaaagtcgagtattaatcgccgaaatcaccccagagccaccattgcgtacctccttattaatgtgggtattcctcttttgtcttattggattaagtgcacaattctttcttaccccagaaattgaacgcttattagttattctggtttttattcctaatgtttttatggcttatcgttatggttggcaagggggcgtattatccgcgttgttaggtagtttaatgattacctttgctagacaagtaaatggtgcttttgccgatttgcatgaattagagatgtttttaacaacccaagccttaattggtattggtttaggtattgctattagtcgccagcaacaacttgccaataatttacgtcattatcagctacgtttagagcaagagttacaagcacgccgagcgttgatggaacaactagtacataccgaagaagatgttaaaaaagccattgctcgtgaattacatgatgaaattggacaaaatattacagctattcaaattcagtcaatgttagtaaaaagaagtgcagataacgataaaacacgccagtcaggcgagcaaattgagcgattagcccaacaaatacatcaatctacccgacaactgctacgccaactaaggccgcctattttagaagagatgtcattagagaaggctctacaccatttaattgatgagttctcatttcatgaaaatggtattcactgtcattttcattatgctcttgaaacagagcctgaaagcgacaccattatttttacactctaccgactagtgcaagaactactcaataatatcagcaaacacgctaatgccagtgaaatccacatttcgcttactcaacatcaagcacaattacgactggttgttcatgataatggtattggcattttgcctacacaacctaataacggttttgggctacgaggtattgaagagcggatctgcgcattggggggagaatgggaagtaattagtcagcttggtactaaaataattgttaacttacccacaaattcaatagaaaagcgtgaaaactag

SEQ ID NO: 294773 - DNA, 633 bp, Proteus mirabilis
atgataaacgttgctctcatcgatgatcacattgttgtgcgttctgggtttgcacaactgctaatgctagagccggatattaatattgtcggtgaatacgcaaatggccaagaagcttggccctatttattaaatgataatattgatgtggcggtgatggatctctctatgcctggagagagtggcctacaattacaaagtcgattaaaacaaaaacgccctgattttcggacaattattttaagtatttatgatacccccgcatttgtacaaagcgctttagattccggtgcccatggctatttaactaagcgctgtggtccacaagagctcgttcaagcagtacgtgctgtgtatcaagggggctgttatctctgtgctgatgccatgaaagcacttcgacagacaccagaaaaagaagatgctttacatagtttaacccctcgcgaaagagagatttttaatctgctagtacaaggtattaatgttaaagctatcgccgtacaactgaatctcagtcataaaacggtgcatgttcatcgagccaatatactgggtaaattgaactgtgaaacaaccattgatttagtccattttgcattaaacaaccagttaatcaccggaacactctaa

SEQ ID NO: 294774 - DNA, 381 bp, Proteus mirabilis
atgctacgcaccatgttacaaggcaaacttcatcgcgtaaaagtcacccaagctgatcttcactatgaaggctcttgcgcgattgatcaggattttatggatgccgctggtattcttgaaaatgaagccattgatatttataacgttgacaatggtgaacgtttctctacttatgccatttgcgcagaaagagggtctggtattatttctgtcaatggcgcagccgctcgccgtgctgctgtaggtgatcgcttaattatttgctcttatgtgcaaattccagatagcgatgcgcgtagccataaacccaacattgcctattttgaaggcgacaatgaaatgaaacgcattgctaaagccgttcccgttcaagtcgcttaa

SEQ ID NO: 294775 - DNA, 852 bp, Proteus mirabilis
atgctaattattgaaacaacgcttatcttacgccgcgaaattaagcgactaaaacaagaaggtaaacgcattgcattggttccgaccatgggcaacctgcatcaaggtcacctaaaactgatagaagaagcgcgtattcatgctgatgtggttatcgcctctatttttgttaatccaatgcaattcgatagagaagccgatttagcaaactatccacgaaccctacaagaagattgcgagttactgcgcgataaacatgttgatattgtctttgccccatcagcgaaagagatgtacccaaatgggatggaaaaccaaacgattgttgaggttccagtactttcttctgtgttagaaggcgctagtcgcccaggacatttccgcggtgtaacaaccgttgtaagtaaactattcaaccttgtacagcctgatgtcgcgctatttggtgaaaaagattatcaacaactgcagatcataaaaaaaatggtcagtgatttatgttttgatatcagtattattccagtccctattgtgcgtgataaaacaggattggcatttagctctcgaaatcgtttgttatcagataatgaaaaacaacaagcccctgtgctttatcaagctatgcaacagatagccgagcaattaaaatcgggagaccttgatgttaaccaactattacaaactgccaaagcaacccttgaacaacaaggctttcgtgctgatgaatgttttatttgtgatgcacaaacactagcaccacttagcgaagagagccgatgtgccgttattttaatggcagcttggttaggtaacactcgtttaatcgatagccaacaagttagcttagtctaa

SEQ ID NO: 294776 - DNA, 792 bp, Proteus mirabilis
atgaagccggttacgctatctacgctcaatcgctataaacaagaaaagaaaaagtttgccactatcacggcttatgatgctagctttgctcgtctatttgccaatgaaggtattcctgccatgttaattggtgattcactcggtatgacactacaaggtcatgacagcacattacctgtcaccgttgagcaaattgcctatcatacccgttgtgtaagagcaggcgcccctaacgctttcttaattgctgatatgccttttatgtcttattccactccagagcaagcctgtcttaacgcagctattttaatgcaagcgggagcgaatatggtcaaaattgaaggaggaagctggcttattcctacagtcaaaatgctcactgaacgcgcagtgcctgtttgtattcacctaggcttaacccctcaatctgttaatgtgtttggtggctataaagtacaaggtcgagaagaagctgctgcagagcaacttaagcaagatgctatggcgcttgaagccgcaggagcacaactagctgtattagaatgcgtccccgtttccgtagcaaaaactattaccggatcactcaatattcccgttatcggcattggtgccggcaatgtcactgatggacaaattcttgtgatgcatgatttattaggtctaacacctaatgcccctaaattttctaaaaatttcttacaagaagctggctccttacccgaggctgtcagactgtatgttcaacaagttgaacaaaaactgttccctcaagaacaacactcatttaactga

SEQ ID NO: 294777 - DNA, 498 bp, Proteus mirabilis
atgagtaagcaacaacagcgtgtgtatattattctgggcagtaatttaaactcaccagaacagcaagtaaaatcggcgataaaagcgattagtgaaatccctaatactacactgattgcccaatcaccttggtatcgcacacgccctatgggacctcaagatcaacccgattatctcaatatggctgtcgccgttgatactactttagccccagaagagttgctcgaccatacacaagcaattgaacttgcccatggtcgtgaaagaaaagcaggtaaccgttggggacctcgtacccttgatttagatatcatgttatttggtgatcaagttatacagaccgaacgtttaactgtgcctcattatggacttaaggtgcgtgaatttatgctttatccattggcggatttagcacctgaactttgtttccctgatgacggagaacgattagcagacagattagcgctcgtacctaaaaatggtatggaaaagtggtga

SEQ ID NO: 294778 - DNA, 1341 bp, Proteus mirabilis
atgactgtgatcccaagagatcaacacccgatttcgcgtaaagacatcagtgataacgcactaaaagttctttatcgtctgaataattcaggctttcaggcttatttagtgggtggtggtgtacgcgatctattattagggaaaaaaccaaaagactttgatattgctaccaatgcaacgccagaagaagtccgtcgattatttcgtaatagccgcttagtaggtcgacgctttcgtctagcgcatattatgtttggccccgaagtgattgaagtcgctactttccgtggctctcatgaagatcatgaaacatccgatcgcaatcagtcacaacaagcacaaagcggtatgttgctgcgcgacaatatcttcggatcgattgaagaagatgccattcgtcgggattttaccttaaatagtctctattacggcgtcgatgattttgctgtacgtgattatgtggggggcttggctgatcttaaatcaggtactattcgtttaattggctctcctgaaactcgctatcgtgaagatccagttcggatgctaagagctatccgctttgccagtaaactggatatgcgtatcgcaccggaaactgcagagccaattagccaattagcaccactattacgtaatattccttcagcacgcctatttgaagaatcgctgaaattattacaaacaggacatggttataaaacctatcggttaatgcgccatttccaacttttagagcctctttttccattagttgcctcaaggatcactgagcagcaagataccccaatggaaagaatgatcgaacaggtgctaaagaataccgactatcgtattagtaaagaaatgcgcgtaaatccggcattcttatttgcagcaatgctatggtatcccttagtggagcatgccgaaaaactggctcaagaaagtggactgtcttattacgatgctttctcaatggcgatgaatgatattttagatgagcaatgtcgtactattgcgatccctaaacgtatcaccaccacgatgcgtgatatttggcaattacagcagcgtttacctaagcgtcaagggcgccgagccaataaactgcttgagcatcctaaattccgtgcagcatttgatctactggaattacgcgctaatgtacaaagaaatcctgatctggaagcattagccgcttggtgggctgattttcagatttcaaacaatacacaacaacgctctatggtctctgaattaggtccaggcccggtacgtaaaaggacacgtcctcgtaaacgtcctcgtcaccctaatgcaaaaaataatgcaccaagacaagagaacaaacatgagtaa

SEQ ID NO: 294779 - DNA, 306 bp, Proteus mirabilis
gtgccattattaataaaccaactttgttttggtggtttggttacagcattggctcgttatcttcaagctgacacaaattatgagcgttggcgctttcacatcaataatatcatcctccaattaatacttcttgatacaataactcagactattcgcactgtgatgacgatgtttattcacataaaagagaagttatttgcgtataattctatcactatagctgatggccataagcaaggaacaatattgatggagcacattttcttacctcgtcaaccgttgctgtcaggcaagattattcgttaa

SEQ ID NO: 294780 - DNA, 456 bp, Proteus mirabilis
atgcaagaagggcaaaagcgtaaaacatcgtccatgagcattctcgctattgctggcgttgagccatatcaggaaaaaccgggcgaagagtacatgaacgaagcccaattagcgcattttaagctaatacttgaatcttggcgcaatcagctcagggatgaagtcaaccgtaccgtcactcatatgcaagatgaggcggccaacttcccagatcctgttgaccgtgctgcacaagaagaagaattcagtcttgagctgcgtaaccgtgatcgtgaacgtaaactcataaagaaaattgagaaaacactgaagaaagttgaagatgatgacttcggcttttgtgagtcttgcggtgttgaaatcggcatccgccgtttagaagctcgtccaacagccgatctctgtatcgactgtaaaacattagctgaaatccgtgaaaaacagatggctggctaa

SEQ ID NO: 294781 - DNA, 711 bp, Proteus mirabilis
atgaaatttgaacaaccactacaatctgccactttattaaaacgatacaaacgttttttagcagacgtagtgacggcaaatggtgaagaattcacgctccattgtgctaatacgggtgcgatgacgggatgcgcaactccaggtgatacggtttggtattccacgtcatcgaatgtcaaaagaaaatatcctcatagttgggaattaacccaaactcaatcaggtgattggatctgtattaataccttaagagctaatacgatcattgccgatgcgatagaagctggcgatattccagaattatctgactatgatgagataagacgcgaagtgaagtatggtagtgagaatagccgtattgatattttacttaagtcaaatcataaagttgactgctatattgaagtgaaatcggtcactttattagatgctggaatgggctattttcctgacgctaaaacagagcgaggtcaaaagcaccttcgagagttgaccgctatcgcaaaatcgggcttaagggctatcttattttacgctgtcccccatactggcattacacaagtgtctgttgctaaagagattgaccctaagtatgacttattgctaaaacaagcatgtgatgctggggttgaaattttatgttatcgcatcaatattagtgagtacgatttaacaattggaaagcaattaccttttatttcaaaaggttaa

SEQ ID NO: 294782 - DNA, 2430 bp, Proteus mirabilis
gtgcatctattgccaatttttgaggtagcaggatctgttgttactgcattaaaacaatgtccccaagtcttacttcacgcccccacaggggcgggaaaatcaaccgcactgccactgtatttgcttcaacaaaatatatttgatggcaaaattattttattagagccaaggcgtattgcggcaaaaagcatcgcttatcgtttagcaagtcaactcaatgaagaggtgggtaaaacggtggggtatcgcatgcgtgctgaaagtaaagtgagccagcagacgcgcctagaagtgatcaccgaaggggtgttgacacgtatgttacagcaagatcctgaactgacaggtgtaagtttagtgatacttgatgaatttcatgagcggagtttgcaagcagatttagcgttagcactgctattagatgtgcaatcaggattacgtgatgatttacgccttttagtgatgtctgcaacattagataatcaaaaattaacttcactattgccgaatgcgccgatgattagctctgaagggcgtagttatcctgtttcacggcattattatcctattcaatcacacctgccttttgaacaagaagttgccacgatggcgcgacgtttgcttacacaagagacgggctctttacttgtttttttgcccggtagtgcagaaattattagagtcgcgcaattattagctgacaaagtggataaacacaccttaatttttccactttatggggcactttcattagcacaacagcaacaggccatagagcctgtagaaaagggatatcgcaaagttgtattagcaacaaatattgcagaaaccagtttaacaatcgaaggtattcgcttggtgctcgacagtaccattgaaaaacgtgcccagtttgacttaaaaagtggtgtaacaagcttattgcgccaacgaataagtcaagcttcacaaacgcaaagagcggggcgggcaggacgtcttgaagccggaatttgttggcacttaatcagtcaggaacaagctgagcgcggggcaactcaccaagtacctgaaattttatctagtgatctctcttcgttatggctttcaatattgcaatggggatgtcgtgatataaaccaactctcttggttagatacgcctacaccagcagcaataaacgcagctaaaacattattgcaacgattaggtgccattgataatcaagggggattaacctcgcggggagtacgtatggcacagtggggcatcgatccccgattggcggcaatattagattatgctagtgaaaaaagtgagcatcatcttgctaccgcagcaaggctgtgtgccattttagaacagccaccaagagacagagagattaatcttgaatggctgatccaacagaaaaatcatcaatggtcacagcgtgaaaaacagctattacagcaatgcaaagggcaatgtcgcccagaattattagcatcactattgagtgtcggatttgcagatagaatagccaaaaaccgtgataatcaaggtcgatttcgcctcgctaatggacaaggcgcaatgatggataatactcaaccaatgagccaatcgccgtggattttagcaccattgttgttgcaaaatgcacattatgcggatgtgcgaattttattagccttacctattgatattaatgaagtatcctctatctttccggaattgatacaagataataccaccgttgaatgggatgaaaagcgcggtacacttctcgcttggcaacagcgccaattaggtcagttaaccgttagccaaatgccattagataaacctaataaagcgcaaatgcaaacggcattattaaattggttacgtaaacaaggattaagtgctctacccttaagtgaagagagtaagcaactgtttattcgccttgctttagcgcaaaagtggtgccctgaggccaatttacctgtattgaatgaagccgttttattagactcattagaattgtggttacaacctgaattaggcgatacccaatcacttaaggcactgctacaaatggatattaatgggataattaaaaatcagttaacttggcatgagcaacaattattgcaagagctgttcccaacacactatattgctccaacgggcactaaagtgatgattaggtatgatttagataatccgccgattattgctatcaggatccaagaggtttatggtgaaaaacaaagtcctattgtggcaaaagggcaattacctgtagtgatggagttactttctccggctatgcgacctatccaaaaaacacaagatctcgctactttttgggccggaagctatacacaagtacaaaaagagatgaaggggcgatatcccaaacatttgtggccagattcacccgcaacaacggcccccactcgacgtgtaaaaaaatggagttag

SEQ ID NO: 294783 - DNA, 2313 bp, Proteus mirabilis
atgagtagaaagaaaaaaccagtaaagaaaaccaatagaaggcgttcttggttttggttatttgttaaaatcgccattgtggttgcggttttagtcggcatctatggtgtttatttatattcccaaattaaagagcgccttgacggtaatgtatgggaattgcctgctgccgtttatggacgtactgtcaatttagaacctggcatgaactatagccaaaaagagatggtaagtttactggaaggtatgcagtatcgccatgtcaataaaatcacccgtcctggggaatttgtcgttaaaaatggcactatagagatgttacgtcgaccgtttgattttccagatggtcgcgaagagcaaattttagcgaaattgacctttgaacaaaactcattggtgagtatcaccaatatgaataatcagcgtcaatttggtttcttccgcctcgatcctaagcttatcactatgatgcaatcggctaatggtgaacagcgtctattcttagcaagagataaatttcctcaactattagtcgatacattaattgctacggaagatcgccgtttttatgagcatgatggcatcagtatttattctattggtcgtgcggtgttagcgaactttaccgcaggtagagcggtacaagggggaagtactttaacgcagcaattagtaaagaacttattcctaaccaatgaaagaacgctaaaaagaaagcttaatgaagcctatatggcgattattatggatgcgagctatagcaaagatcgtattttagagctgtatcttaatgaggtgttcttagggcaaagtggtgatgagcaaattcgtggtttcccactggctagcctttactattttggtcgacctgttgatgaactaagtcttgatcaacaagcattattggttggaatggtgaaaggggcttctgcatacaatccatggcgcaatcctaaggctgcattagagcgccgtaatgtggtactaaaattattacagacccaacaaattatcgatcaagagctttatgatgtattaagcgcacgtcctttaggagtaaaacctcgtagcgaagcgctaacgccacaaccggcatttatgcagttagttcgtcaagagctacaaactaaattaggtgatcaggttaaagatttatcggggactaaaatttttacaacgcttgatcctgtttcacaagatgcagcggaaaaagcggtagaaacgggagttgctgatttacgtaaaacacgcaaaatcaacgatctcgaaggcgcaatggttgttgtagatcgcctcagtggtgaggttagggcgttagtgggcggttcacaaccacaatatgccggttttaatcgtgccatgtccgcacgccgttcaattggctcattagcaaaaccggcaacttatttaaccgcattaagtgagcctgagcgttttcgtttaaatacctggttggcggatgaacctatttcagtgcctattccgggaggaaaaccatggcaaccacgtaactacgatcgtggttataaagggcgattaatgttggtggatgctcttgctacatcacgtaatgtaccaacggttaatcttggtttagaagtcgggttagaccaagtgatcaaaacgtggatcaaactaggtgccccagcagaaaatttagaaaaagtaccagcgatgttacttggcgcactaaacttaaccccaatggaagtggcgcaaactttccaaacaatcggaagtttaggtaatcgcgctaaattatcggcattgcgctctgttatcaaccaagatggtacggtgctttatcaaagctacccgcaagcagaaacaacggtttctccacaagcagcatatatgacactgtttggtatgcaacaggtggttaattcaggtacagcagcacgagcattaaaacctaaatttggtcaatataaccttgcaggtaaaaccggaaccaccaacgacttacgtgatagctggtttgcgggtattgatggtaaagaagttactattgcatggatgggacgtgataataatggcccaactaacttaacaggatcgacaggggcattgatcctttatcgtcattatttagaaaatcaaacaccattaacattaaatccacctgtaccagaagatatagcacagatgtcgattaatgctgaaggtaactttgtttgttatggtggcggcgtgcgtacattacctgtgtggacagcagatcctgatagcctctgtacaccgttaccacaagagagcgacggcgacgatagtgcggcacctaaatggttacgcgatctgttttctgagtaa

SEQ ID NO: 294784 - DNA, 1287 bp, Proteus mirabilis
atgagcaagtctgaaacgctttataatctcgcacaacaagtgatacctggtggcgtcaattcaccggttagagcatttaacggtgttggtggcacaccgctttttattgaacgtgctaatggtgcgtatatttatgatgccgatggacgtgcttatcttgactatgtcggttcatggggaccgatggtattaggccacaatcaccccgctattcgccacgctgtaactgatgcggtgcaaaaaggcctaagctttggtgctcctacggctgctgaagtggaaatggcaaatttagtcactgagttagtgccttcgatggatatggttcgtatggtgaactcaggtacagaagccaccatgagtgccattcgtcttgctcgtggctacacgggtcgtgacaaaatcattaaatttgaaggctgttaccatggacatgcagactgcttattagtcaaagcaggctctggtgcattgacgatgggacaaccaaactctccaggtgttcctgctgattttgttaaacacactttaacttgtacttacaacgatttaaattcagtacgtcaatcatttgaaaattatccggaagaaatcgcctgtattattgttgaacccgttgccggtaatatgaactgtgttccacctaaagccgattttctaccgggattacgtgcattatgtgatgaatttggtgcattactgattattgatgaagtaatgacaggttttcgtgtcgcattaggcggcgcacaagcttattacgatgttgatcctgacttgacctgtttaggtaaaattataggtggtggcatgcctgtaggcgccttcggcggacataaagaagtgatgtctcaattagcccctatcggtcctgtctaccaagcgggaacattatcgggtaaccccattgcgatggcggcgggtctagcttgtttgcaagaagtttcacaaccgggagttcaccaaacactggatgaacttactactatgttagcggatggcttacttgaaaaagcacaacaagcaggtatccctatggtagtaaaccatgtaggcggtatgtttggtttattctttaccgatgccaaagaagtgacttgctatcaagacgtaatgaactgcgatgtcgaacgcttcaaacagttcttccacttaatgttagaaaaacgtatttacctcgctccgtcggcttttgaagctggctttatgtctattgctcatagcaaagaagatattcaacgtactatcgatgcggctgaatacgcctttagcaaaatgaaagcgtaa

SEQ ID NO: 294785 - DNA, 345 bp, Proteus mirabilis
atgagtgatgatatggctctgccgttacaatttacagatgcggctgcaaataaagtaaaagatctaattgcggatgaagaaaacccaaatctgcgtctacgtgtttatatcaccggtggtggctgtagcggattccagtatggttttacctttgatgatgctatgaatgaaggtgatatgaccatagaaaaacaaggcgttgccttagttattgatccaatgagcttgcagtatttagtgggtggctgtgttgattatactgaaggccttgaaggctcacgttttatcgtcaccaatcctaatgcgaaaagcacttgtggttgtggttcatcgtttagtatctga

SEQ ID NO: 294786 - DNA, 831 bp, Proteus mirabilis
atgcgtttcttaaacacttttgcactgttgctaagcctgatattgacaccttgttatgttatcgcagccactcccgcacaacgtgttattactttatccccgtctgccacggaaatggcttatgccgcaggcatgggagagaatatggttgcggcgagcgcttattctgattatccacaagcagcaaaagatctcgtacaagttgccgactggcaaggcattaatgtagaacgcattttgctattaaaacctgatttaattattgcatggccaagcggtaatcctcaacgaccgctcgatcagttaaaatcattgggtatccctattatttactctgatccacacagtatcgaagaaatcattgacgatcttacccgactttcttcttatagcactcatcctgaagtcgctttagcaagtgcacaaaaattacgtcagcaatatcaagaattacagcaaaagtacgcctcaacgacgcctcatcaagcgaagaaaaaagtctttattcagtttggtatgcaacccctatttacgacatcaaaacattcattacaaaatgagattaccgaactttgtggcggagaaaatatttttgcgaatagtgcagttccttggccacaagtcagccgcgagcaagtgatcagtaaaaaacctgatttgattttatttagtggtaaaccaaaccaaattgccgcaatacaacaattttggcaacctcaactagatattcctattatcgctattgatgaagatagttttagccgaccagcaccacgtattatttatgcggctcaacagatttgtgagtctatcgcaatccactcattttaa

SEQ ID NO: 294787 - DNA, 708 bp, Proteus mirabilis
atgagagttggcgtaataggtgcaatggaacaagaagtcaaacttctgcgtgaacaaattgaaaactgcgaaatagtctctcgtggtggttgtgaaatttatactggcaaaatcaatggtgtagatgttgcattactaaaatcaggtattggtaaagtggctgccgccatcggtaccacactattacttgaacattttcgccctgatgttgtgatcaacaccggctctgcaggtgggttagatgcaaaattaaatgttggcgatattgtcgtatcaacagaagtacgttatcacgatgccgacgttactgctttcggttatgaaccaggacaaatggcacaatgcccaccggcatttattgccgatcccaaactggtcaatattgctcaagagtgtattggatcactaaaattaaatgccgtgcgtggattaatctgcagtggcgatgcttttattaatggtgccgagccattagcgcgtattcgtcgtacttttccagaagtcgtcgctgttgagatggaatcaaccgctattggacatgtttgccatcaatttgatacaccttttgttgttgttcgtgccatttcagatgtggcagataaagaatcgcatttaagttttgatgagtttttatctgttgccgcacaacaatcaagcttaatggtcactactatgcttgataaattaaaaacagagactcagttttaa

SEQ ID NO: 294788 - DNA, 267 bp, Proteus mirabilis
  misc_feature (183)..(192): n is a, c, g, or t
atggcgcatttatcgcaagataaaggtttgcttgatgcttttgctcaagggaaagatattcaccgagctactgcatctgaagtgtttggtatacctttagacgaagtcacctctgaacaacgtcgtagtgcgaaagcgatcaactttggtctgatttatgggatgagtgcttttggtttatcnnnnnnnnnnaacaaattggtgttgaacgaaaagaagcacagcgatatatggatctctattttgaacgttatccaggggtattag

SEQ ID NO: 294789 - DNA, 429 bp, Proteus mirabilis
atggatctctattttgaacgttatccaggggtattagattatatggagcgtacccgtaaacaagcgtcacagcaaggctatgtggaaacgttagatggacgccgtttatatctgccagagattaattctaaaaatgcgatccgacgtaaagcatcagagcgtgaagcgattaacgcacctatgcagggaacagcagccgatatcattaaaaaagcaatgattgcggtggataattggatctgtcatgaatgccctgatgatgtacatatgattatgcaggtacacgatgaattagtgtttgaggtacgagagtcatatttagaaaaagcaaatgcgatgatccataagctcatggaaagtagcatggagcttgctattccactgaaagtcgaagtcggagtcggtaataactgggatgaagcccattaa

SEQ ID NO: 294790 - DNA, 519 bp, Proteus mirabilis
atggctgtattaacgctactgcattttcctgatgagcgactacgcaaagttgctacacctgtggaaaaagtagatgacgaaatacgcacattaatcgatgacatgattgaaaccatgtacgcagaaagaggaattggcttagcggctcctcaggttaatgtctctaaacgtattgtcgttattgatgtttctgaaaatagagatcaacccattgctcttattaacccagaaattatcagtactgaagatgaaataatggatatgatggatggttgtctttctatcccagactcttttgctcccacacaacgctttcgctacttaaaagtcaaagcactagatagaaatggtgatgaaatcgagctagaagcagccgatctctttgctggctgtattcaacatgagctagatcacctcaatggtaaactatttatagaccatttatcgccgttaaaacgtcaacgtatcgagaaaaaacagaaaaaattaagcaaactcaacagcacccaagttgcttaa

SEQ ID NO: 294791 - DNA, 624 bp, Proteus mirabilis
atgacccaatttaattaccaaaaagcacatttcattatcagtgcacctgatatccgccatttaccaccagatacaggaattgaaattgcctttgcgggtcgttctaatgcgggtaaatccagtgcgttaaatgcactaacgcaacaaaatggattggcaagaaccagtaaaacacccggtcgtactcaacttatcaatctgtttcaaattgaggaaggacgacgtttagtcgatttacctggctacggatatgctcaagtccccgaagagatgaaacgcaaatggcaacgctctttaggtgaatacctgcaaaaaagagagtgcttaaaaggagttgttattttaatggatatccgtcatccattaaaagatctcgatatgcagatgattgattgggcggtggattcagagcttccgactctcgtcttgctcactaaagcggataaattagcatcaggggcacgtaaaaagcagttaatggcggtacaaaatgcactgtcagaaaaatcaggtgatatacgtgttgaatgtttttcttctttgaaaaaaataggcattgataaattacgtaatacgttaaatgagtggtttactgatactaacgaaccagagacagaagcttaa

SEQ ID NO: 294792 - DNA, 573 bp, Proteus mirabilis
atgttaaaacgtttttttgtcactctcgttaccgcttgcaccttgacaaccacaagccttgcaatggctgcaacgggagagacctttgttaaattagtcacatctgaaggcaatattgaactgtcactggataataaaaaagcccctatcacaacgaaaaattttattcagtatgtcgaagatggttactataacgggaccacttttcatcgagtgatccccggatttatgatccaaggtgggggatttacggcagatttgcaacaaaagcagacacgagagccgattaagaatgaggctgataatggcttacgtaacttaaaaggcaccattgcaatggctcgtacatcagataaagacagtgccacaagccaattctttattaatgttgctgataatgcctttttagatcacggtcaacgtgattttggttatgcggtgtttggtaaagtagtgaaaggcatggatgttgtcgataaaatttcacaagtgcaaacccgcaatattggtccttaccaaaatgtacccgttaaaaccgtgacgattttatccgctgaggtggttaaagaataa

SEQ ID NO: 294793 - DNA, 576 bp, Proteus mirabilis
atgctgttacttattgataattacgactcgtttacctacaacctttaccagtatttttgtgaactgggggcggaggttgttgttaaacgtaatgatgagattgggcttaaagagatagaaaagatgatgccatcacatcttgttatctctccgggaccttgcacgccagatgaagcagggatctctcttgaggcgatacagcgatttgccggggaaatacctattttaggtgtttgccttggtcatcaggcgattgggcaagcttttggtgcatccgttatcagagcccgtgaagtgatgcatggcaaaaattcattaatacaccataatcagcaaggggtgtttaaagggcttaatcgacctttaagcgttacccgttatcactctttagtgattgatgcgacaaccttgcctgtcccttttgaggttacagcatggagccaacatgacgggaatgttgatgaaattatggggatacgtcatcgtactttacccattgaaggtgtgcaatttcatcctgaaagtattctgagtgaacaagggcatgagttattaaataattttcttaaatattaa

SEQ ID NO: 294794 - DNA, 1218 bp, Proteus mirabilis
atgataaatcaacgtattaatagggcaacttacgatcaggtaatgttgccaatttattcaccagcagattttattcctgttaaagggcaaggtagccgtgtttgggatcaacagggaaaatcctatattgattttgctggtggtattgctgttctagcgcttgggcatgcgcatccactattgaataaagcactgcaagagcaaagtgagaagctttggcatgtaagtaatgtgtttactaatgagccagcattatgtttagctcagaaattaatccaacatacttttgctgagcgtgtcttttttgccaattctggggcagaagcgaatgaagccgcacttaaattagcacgacattacgctattacccgtcataatccttataaaacgaagataattgccttccaccacgcctttcatggtagaacattttttacagtctctgttgggggacaacctaaatatgcggatggttttggtcctaaacctgcggatattatacatgtcccttttaactctcttgatgctgtaaaagccgtgattgactctcatacttgtgccgtaatactggagcctatccaaggtgagggtggagtgacaccggcgacagcggagtttatgcatggcttacgtacactatgtgataagcatcaagcgctattaattcttgatgaagtacaaacgggtatggggcgaaccggcaaactatttgcttatatgcactatgatatacagcccgatattattaccagtgccaaagcattaggtagtggttttcctctcagtgcgatgttaaccaccgaggatatcgcttcggtaatgggggtaggaacacatggtacgacttatggggggaacccattagcctgtgcagtaggcaatgctgcttttgatttaatcaacactcaggcggtattagaaggtgtcagtgagcgtcatcgttggatagtggatgaattgcaggcgataaaccaaacttatgctgtgttttctcaaattcgtggacaaggcttattaattggcgcgcagttagcaccactgtatgcaggtaaagcaaaagagttacttgcactggcctctaagcatggcttaatgatgttaaatgccggggctgatgtaatacgctttacgccagcgttgattattaccctcgaagagttacaagagggcatgaatgcgttacgaaaagcgcttgatgagtttgtaaaagcagagtga

SEQ ID NO: 294795 - DNA, 633 bp, Proteus mirabilis
atggttctcggcaagccgcaaacagacccgactcttgaatggtttttgtcacactgccatattcacaaatatccatccaagagcacgctgatccaccaaggtgaaaaagcggaaacactttattatattgttaaaggttccgtggctgttcttattaaagatgaagaaggaaaagagatgatcctttcctacctaaaccaaggtgacttcatcggtgaacttggattatttgaagaagatcaagaacgtagtgcatgggttagagcaaaaacagcctgtgaagtagcagaaatttcctataaaaaattccgccaattaattcaggtcaatcctgacattctgatgcgcctttccgctcaaatggcgaatagattacaaaccacatcagaaaaagtaggtaaccttgctttccttgatgtaacaggtcgtattgcacaaactttattaaatttagctaaacaacctgatgcaatgacgcatcctgatggcatgcaaattaaaattacacgtcaggaaatcggtcaaattgtaggttgttcacgtgaaactgtaggccgtattttaaaaatgctggaagatcaaaacctcatttcagcacacggtaaaactatcgttgtttacggtactcgttaa

SEQ ID NO: 294796 - DNA, 408 bp, Proteus mirabilis
atggaagcacgtgttaaatgggttgaagatttatcttttgttggcgaatcatcttccggccatcaagttatgatggatggtaattcaggtgataaagcgcctagtccgatggaaatggtattaattgctgcgggtggttgtagtgctattgatgtggtgagtatcttacgtaaaggtcgccaccaagtcattgattgtgaggtaaaattaacatcaaagcgtcgtgaagaggcacctcgtttatttactgatattaatttacatttcattgtttccggcaaagcgttgacagataaaattgttgagcgagctgtacaattatcagcagaaaaatattgctctgtttctttaatgttaggaaaagcggccaatattacgcactcttttgaaattaaagatcctgaataa

SEQ ID NO: 294797 - DNA, 870 bp, Proteus mirabilis
atgtcaatcaaacaccctattattgctgttactggttcaagtggtgcaggtactactacaaccagccaagcttttcgtaaaatatttcagcaactcaacgcccatgcagcctctattgaaggggatagttttcaccgttatacacgccctgaaatggatatggccattagaaaagcgaaagagcaaggacggcatatcagctattttggccctgaagccaatgactttaatttattaagttcaaccctaagtcactatagccaaacagggcaagggcaatttcgcaaatatcttcattcttatgatgaagcaaccccttataaccaattacccgggacatttacaccttgggaagcattgccagaaaaaacagatattttattttatgagggattgcatggtggagtcgttaccgatcaacataatgtcgctcaacacgttgacctattagtcggtgttgtgcctattgttaaccttgaatggatacaaaaattaattagagacaccacagagcgcgggcactctcaagaagcggtgagagattctgtggtacgttcgatggatgattatatcagttacatcattccacagttttctcgtactcatatcaatttccaacgcgttcctacggtggatacctctaatcccttctcagctaaagctattccaacactggatgaaagttttattgttattcgctttcgtggcttaaccgatatcgatttcccttatctattggcaatgttgcatggttcatttatgtcgactatcaatactattgttgttccaggagggaaattaggcttagcgatggaattaatcatggcaccactggtgaagaaattattgaatggtgaaaaaattagctaa

SEQ ID NO: 294798 - DNA, 222 bp, Proteus mirabilis
atgatcatcccttggcaagaactatcaaccgaaacgctagataacttgattgaaagtttcgttttacgagaagggactgattatggtatgcaagagaaaacgcttgaacaaaaagttgccgacgtaaaaaaacaactcgtctcgggtgaggccgtgttagtgtggtctgagcttcatgaaagcgtcaacattatgccagctgcacagtttcgccctgattga

SEQ ID NO: 294799 - DNA, 981 bp, Proteus mirabilis
atgtctcaatattttgatccaataccttgggctaagaatccccatttacagacacttttgcctcgaatagtgcgaagaacgccgctattaacgccttattggcaacggcttaatttgcctgataatgattttgtcgacttagcatggagtgaagaacccaaaacagcgcaacataagccccgtttagttatctttcatggtttggaaggtaactttaatagcccttatgttcacggcatgctagccgcggcgaaagcgcgaggatggctaggtgttgtcatgcattttcgaggctgcagtggcgaacccaatcggcaaaaacgtatttatcattctggtgaaacagaagatgcccgctattttctgaattggttaaaagagcaatttggcgaacaaccaaccgcagcggtaggttactctttaggaggcaatatgctggcctattatcttgccgaaagtggtgaaaatgcggtattagatgctgctgttatagtgtcagcacctttgatgttagaaccttgctcaaccaaaatagagcgaggattttcgcgcttctatcaatggtatttactgaaagggttaaaacgcaatgcaactcgcaaattgatccgctatccccaatcgttacctattagtctattaaccattaaatccattaaaaagttacgtcaatttgatgatctgatcacggcaaaaattcacggtttcaaagacgcccttgattattatcgtcaatgtagcgctctccctttactcaatcagatcaaaaaaaatacacttatcattcacgccaaagatgatccctttatgtctacagaagtgatacctgatatcacaacattacccaaaaatattgaataccaattaacagaatttggtgggcatgtaggttttgttagtggaaaactctctaagcctgtaatgtggcttgaaaaacgtatccccgactggctatcaacctatttggagaaagtaaaatga

SEQ ID NO: 294800 - DNA, 606 bp, Proteus mirabilis
atgacaaatagcctagttgtttcgttgagcgttttcctttttattgcagccattacgcccggacctaataatttactattaacctcttcgggggctcatgttggtttaaaacgctctttaacgttgatggcaggcattatcgtcggaatgcaatgtgtattacttagctctgcgtttggtattgcgacattattgattatttatcctgcattgcatatcggtttaaagattattggtagcatttatctttgttggttagcttggaaaacagcaaccgcttcttatcaacgattagatatttcaagtaaagtgccccaaacagtgacggcgtttcaaggtggattattgcaatttttaaatccaaaagcttggatgatggggctaggcgccgtaggaagttttagtttagccggtgatggttatttgggatcgattggtgtgattagtgttgtgatgttgttggttaattttatcgctggtatggtatggattttaggtggaacatttatcagtcgttttttacaaagcagacgagcatggttctcatttaatattataatggggatattaaccgccatgtgtattccattgatttggattgaataa

SEQ ID NO: 294801 - DNA, 861 bp, Proteus mirabilis
atgcctacattaacgaagatagcgtggataaaaccagggatggcgacaaatcaacgtaaaatagcggattatattttagaacaccctgaaaaaatcgtgactttatcatcacagcaattagccgaaattatgggagtcagccaatcagcaatagtgaaatttagtcaaaagataggatttaaaggatttccttctttaaagctggctatcagtgaagatttagggcgaaaaaatgctaattcagaaaaaaactccagcatattacataaccaaatagattcagaggatagcctggttgttattgcgcagaaattagcacaagaaaaaaataattcaattcgggataccacacgtcaaattaattatcaccagtttgaacaagtgatccaacagattgatgacgcctctcgggtacaaattataggtattggtggatcaggtttagttgccagagatttaagttataaattacagaaaataggtattacgactttaattgaaactgatcaccatgtacaaatttctgttgctcagatgttaagccctcgggatttacaaattgtgctctcttacagtggcaaaagaaaagatatgctggtcgctgcatctgtggctaaaaaacaaggtgctaaaattatagcgatcacaggagaaaaacattcaccactaggtctgatggccgattatatattagaaactattgctgatgaaggtgagtggcgtagtgctgctatttcttctcgcactgcacaaaacaccattaccgatcttatctttatggcattattaaagaagcgtgatgaaaatgcgaaggctttagtattaagctctcaagcactaattaatagtctggatgattaa

SEQ ID NO: 294802 - DNA, 1545 bp, Proteus mirabilis
atgcgtaacaatcaaccggtgacacagcgagaatatccggtagctgaaaacgcaacactgatgtcaacaaccgatgttaatggcaatattatttatgctaatgaggattttgttgaagtcagtggtttttcagcacaagagttaatggggcaaccccataatattgtcagacatccagatattcctgctgatgtatttagagacatgtggaaaacattaaaacagggggaggtttggacgggaatagttaaaaataggcgcaaaaatggcgatcattattgggtaagggctaatgtcacccctattattcgtcaaggtaaaattcaaagttttatgtcagtgaggacggcggcaaaaaaagaagaagtagaacaagccgcagcactgtatgccgcttttaaccaaggtaaatatccctctcacactttttctaagggggcattcatttataagggctggaaaagttggcgctcatggaaacaaacactcgcactaaagcagcgtgtacgcttacttctcttattaccatttccttttatattattaagtgtttggtttgctggtttaaatggttggggtttattcattcataccgctatcttactttcactattgatagccaatgagcgaattttttattttcaagtagtgaagccgattatgatccttaataaacatgctaatcgggtggctacaggtgatgaacacaacgttgattatcttgatcgtattgatgaaattggtatgactcaacgttctgtaaaccaattagggcggatgtttcgttggcttgtgaacgatgtcagtcatcaaatccatcaagttgctttttcttgtgatcaattagcagcggggaatcgtgatctctatacgaggactgaacaaactgcaagtcatgttgagactactgcgtcaaccatgaatcaattaaccacagcggtgagtaataatagtgaaacggcagggcaggctaataatttatctaatatgacttgcaaggcagcaatacaaggcggaacagcaatggatactattgtgcatacgatggacgatattgcgaaaagttctgagcgtatcagtaatattattggtgtcattgacagtattgcatttcaaaccaacatattggcattaaacgcttcggtggaagccgccagagcaggagagcaaggacgcggtttctctgtggtagccagtgaggtgcgtaatttagcgcaacgcagtgcagaggcggcaaaagagatcaaagcattgattaatacatcaagtaacaatattaagattggctcaaagcaagtaaatgagacggtggaaacaatggaaaatattgtggttcatgtaaaaaatgtcacgagtcttattggtgaaatcagccttgcatcatcagaacaaagtgcaggattaaaagagctcggtcgagctgtagagcagttagaatcaataacacatgaaaatgcagattatgtctctaaagcgtcgttaatttccggagaaatgaaagaacaaacgaattatttagtaaaagccattcatgtatttcactaa

SEQ ID NO: 294803 - DNA, 1728 bp, Proteus mirabilis
atgcttaaacgaataaaaatatctagtggcttaatgtttattttgatcttgttttgtgccattcagttgttttctggtgctacaggcattcgtgatgcttatttaactaataagcgaatttcacagttagccgatggttttgaacagataaaaaccatggattatggttatgccgcattaaataaattacgtgaagatatgcttaatgtaatgtttgatgctcatctcaccccagatcttgctgaaagcaaaattacagatttcctctcctcttaccctcaacgaaaaaaagaagtctctagcattattacccaatattttacctccgctgaaaatgccgattttgatcgcgaaaaagtggcgaaaatgaaaaaactatttcagcgtgtcatttacgatcttgaccagctcgtttcatgtttagaaatacgagattattacggtttccaatctctttatgctcacaatacgaatgagcggttcacacaatcactttatgaggcaacggatcatcttagtgataatgtcgtcaaccacgcgatagaagccgcacagggtaattaccaacgcgcgttgatcttcgcgtttatttttatgtcggtatttatcttatttacggtgtttgtcatgttgtggatacgccaccatatcgtgttacgtattaaacaagtcattgattatatgtcagatatctcacaagggaatttacttgaaaatagcaccataaaagccaaaggtaataatgagatagaccaacttattaatggaatacagtatatgcggtctgaattatcactgatagtcaatgctattcgcggaacaagtcatcatatttataatggtgtacaagagctcagtgctggtaataatgatctatctagtcgtactcaagagcaagcgagtgctttagaagaaaccgcttctagtatggagcaactaaccgccacagtaaaaaataatactgaaagtgctcgtgaagtatcacaccttatcaatcaaacctctaatattgccagtaaagggggggatgttacccatagaatggtaaaaaccatgaacgatattgcacaaagctctcaaaagattggcgagatcacaacggttatcaacagcattgcttttcaaaccaatatattatcactcaatgctgcggtagaagcggccagagcaggagagcaaggacgtggtttttctgttgttgccacagaagtaagagaattggcgcaacgtagtgcagaggcggcaaaagagatcaaagagcttattgatgcgtcgattaaccgcgtcaaacaaggtaatcaactggttgaacaagtcagtacttcaatggatgagatcctcacatcagttaaacatgttgaaagctcaatgactgagatcctatctgcatcagaagaacaaacgcgaggcatttctcaagtctctttagccgtcactgaaatggataaagcgacacaacaaaatgccgcaatggtggagcaatcttctgctgtagcaagtttactaaccgaaaaggcgggtgatcttgagcaaattgttgagcaatttaaaacagcggaaagtctattttcgaagaatagcacattagcaaaacccgttgagaaatcagcaaatattgggttatcgctcataaaagaaaatcaacaagactcaagaataaaagagccaaaaaaccataaaaaatcgacattcaaagaagatgaagatgatgattggacaagtttttaa

SEQ ID NO: 294804 - DNA, 1692 bp, Proteus mirabilis
atgttaaaacgaattaaaatctctcaaggtttaatgtgtgtcctgactctgttttgtattattcaggtaatatctggagtacaaagcattcacgatgcctaccaaactcaaaacaaattaaaacaaatctcatacagtttcgaccagttacgcactatggataacacctacgcggcgttaaatactttacgtactgatattattgcgcaggcgtttagttatattgctaatccacaggtggaagatgccaatattactacattcatgcaaacgatggatacacgtaaggcagaggtggatacgttgatgaatgaatatgtcgaactatctgcacaaactggatttgatcagcaacgcatggcagagatcaaacaactttatcaaaaaagtcgttatgacttagatcttcttgtgcaatatttaaatgaacgtaataccaatgcaattcgtttgatcttaaaaagtccagccaacgataacttcactaattcattatatgaagcaacggatttcattactgatgacgttgttaatccgtcagtgattgaagcagaagataactatcacgagatgctatggatagcctccctattcatgggtatattcctgatatttacgacattagtgctcttttggatccgtaaacatattattgtacgcattaaccaaatgattgaatatcaagaggcgattgctagtggagatttaattagtcgcattgaccatgatattacaggccgcaatgaaatagaccaacttatgttgggtttacaacaaatgcgagcgcgcttaaaagaaatggttagcgctatccgtaacagtagtacaacgatttatagtggtgttcaagaaattgccgcaggtaataacgatttatcaagtcgtaccgaagagcaagccagtgctttagaagaaacggcttccagtatggaacagcttaccgcaacagtcagaaataataccgaaagcgcacgtgaagtcactcagttagtcatgagcacagcagatattgccgttcaaggtggtgagcatagcaataagatggtgatgaccatgacagacattgccgatcgttcgcaaaaaattggtgagatcaccgcagtgattgatgatatcgcttttcaaaccaatatattagctctcaatgccgcagtagaagcagccagagccggtgagcaaggacgcggtttttctgtggtagccagtgaggtacgtaatttggcgcaacgtagtgcggaggcggcaaaagagataaaagaactcattgaatcaactattttacgagtaaaacagggtaatgatcttgttgaacaagtcagcttatctatgggagagatcgtcacatcagttaaccatgtatcaggctcgatgaaagagattttagcagcatcagaagagcaaactcgtggcattgctcagattagccttgcagttaatgaaatggataaagcgacacaacaaaatgccgcgatggtggaacaatctacagctgcttcagcaacactaagtgaacaagcctcaatgttagatatgattgtaaataccttcaaggtagaacaaatcgcggttacatcaccacgatcaccaacattctcggctaagccagctgaaccggaaataacaaaaacagcaacaacatccacaataaaatcccatcatcatgaagccgatgacaattgggaaagtttttaa

SEQ ID NO: 294805 - DNA, 1932 bp, Proteus mirabilis
atgattgttttttcttctttgcaaattcgccgtggtgtcagggtattacttgataatgccagcgcaacgattaatccaggacaaaagattggtcttgtgggtaaaaatggctgtggcaaaaccacactgctctctttattaaaaggggatctacaagctgaagcgggtaatgtcacgtttcctagcacttggtcaatggcatgggtaaatcaagagacacccgctttagacgttcctgccattgattatgttattgatggtgatagagaataccgcgaattggagcgtcgtctacaacaggcgaacgacaataacgatggtcatgctattgccctgatccacggccaactcgatgctattaatgcgtggactatccaatcacgtgcagccacattacttaatggcttgggattcagccaacaacaactcactgagccagtaaaatcattttctggtggttggcgaatgcgcttaaacttagcacaggcactaatttgtcgttctgatctattactacttgatgaaccgactaaccacttagatttagatgcggtaatttggctagaaaaatggctaaaaagttataatggtacgttgattttaatttcccacgaccgagattttcttgatccgattgtggataaaatcttacatattgaacaagagaaaatatttgaatattcaggtaactactcttcgtttgaaatgcaacgtgcaacaaaattggcacaacaacaagcactctttgaaaatcagcaagcaaaaattgcccatttacaaagttttattgaccgctttaaggcgaaagcaactaaagccaaacaggcacaaagccgtgtcaaaatgcttgaacgtatggagcgagtggcgcctgcgcactcagataacccgttccagtttagttttcgccaaccagaaagcttaccaaatccgcttctgtctatggaaaaagtcagtgccggttacggtgataagattatccttaataacatcaaacttaacttaattcccggctcacgaattgggctcttaggccgtaatggtgcaggtaaatctacattaattaagctgttagctggagaattagctccactacaaggaaaggttgccctttccaaagggatcaaattaggttatttcgcccagcatcagctggaatatttacgtgccgatgaatctgcattacaacatttaactcgtttagcgccacaagagactgagcaaaaattacgtgattatctaggagggtttggtttccatggtgataaagtcaccgatgcatgtggccaattttctggtggtgaaaaagcacgtttagttttatcgctactggtttggcaacgcccaaatttactactaatggatgaaccaaccaaccaccttgatttagatatgcgacaagcattaacacaagcgctaattagctttgaaggtgcgattgttgtggtatcccatgacaggcatttattacgctcaaccacagacgatttatatctcgtccatgatagtcaagtagagccatttgaaggcgaccttgatgattatcagcagtggttagttgatcaaaatcgccaagagactcaagctaataaaacgcaacccgatcaagaaacaacaaacgcctcgaacttaacggctcaagataaaaaagagcaaaagcgtaaagaggcggagtttagacaacaaactcaacctttgcgcaaaaagctcaccacattagaaagtaaaatggataagcttagccaagagctgaccgccatcgaaactgagctttctgatagtcaaatttatgaagcgaagaacaaggcgacacttaccgattgcttaaaccgtcaaagtattaccaaatcggctttagaagaagttgagatggcgtggatggaattacaagaaaaactagaagagatgaccaacgcttttgagtctcaataa

SEQ ID NO: 294806 - DNA, 561 bp, Proteus mirabilis
atgtcaaacgcatcaaatgttttactggtgtatgtccatcccgagccgcgtcaatctatcgccaataaagcgttgttgcgtgcggtgagggatctggaaaatataacaattcatgatttatatgccacttaccctgatttttttatcgatattcaccgtgagcaagcactattgtgtcaacaccaagtcattgtatttcagtttccattacaaacttatagttgtcctgcgctattaaaagagtggcaagatagagtgctcacgcgcccttttgctaataaagttgggcgagctcaacttaaaggaaaaacattccgttgtgtggtgactactggtgagcctgaacatgcttatcaacataatggtaaaaatcactacacactctctgaattattgcgtcctatcgagttaatggcggaaatgtgtggtatgcgctggttatcgccgatgattatttactccgcaaggcaacagtccaaaacaacactagggcatattagtgatgcttatcgccaatggttacaagcaccgttagagggggaacacgcggatggaaggtaa

SEQ ID NO: 294807 - DNA, 1863 bp, Proteus mirabilis
atggaaggtaattggatgataaaagccgtgctgtttttcttatgtgctgccgtgattatggtccccatcgcacaacgcttaaaaattggtgcggtattaggctatttaattgctggtattgcgattggcccttggggattaggattatttaaagatgttgattacatcttacacttttctgaattaggggttgtttttttaatgttcctgattgggctggagttaaatccagctaagctttgggagttacggcgagcaatatttggtgtcggcgccatgcaggttgtctttactgcatctattatcacagggctacttttactcttaacttctttttcgtggcaagcggcattgattggtggcctaggtatcgccatgtcatcaactgcgatggctttacaattgatgaatgaaaaaggaatgaatcataacgaaggagggcagttgggttttgcggttttactctttcaagatatggccgttattcctattcttgcggtgatccctttacttgctggcgaaacagccagtagtgattggtatcgtattgccctaaaaatagtctcattcgctgcattattaatttgtggccgctatttattgcgcccactatttcgcttaattgttaaatcgggtgtgagagaagtttttaccgccggtgcgctattagtggtattaggggcagcactctttatggaaatgattggcttttccatggcgatgggaacttttattgcaggggtattattagctgactctgaatatcgtcatgaattagaaatctcgattgaaccttttaaaggcttattgctagggttgttttttatctccgtcggcatgtcccttgatataggtatattgtggcattatttaccgcaagtgttactgggcgttgttattttagtcttgattaaagggttggtactttatggtatcgcttggttagcgagattacgtttttcgacacgtttacagttttcagccgtattaagccaaggcggtgaatttgcttttgtcgtcttttctacctctatggcgatgggggtattaaatagtgaacagatggcattgcttttggttgtcgtaacgctttcaatgatgactacgccacttgtgatgcaaatgacagacgccgtgttatcgcgccgttataatgatgcaaagatagacgaagagccttttgttgaaaataaccatccagaagtgatcctggtgggctttggtcgtatggggcaggtagtcgggcgcctacttatggcaaataaagtcaatgtgaccgtattagagcatgacgttggtagtttaagtaccatgcgtaaatatggttataaagtttattatggcgatgcgacagacttgaatttattacgtgctgcgggggctgaacacgcgaaagccattgtgatcaccagtaatgagcctgaggcgacaatggaaattgtccatttatgccagcgccattttcctcaattacaaattattgcgagagcaagaggacgggttgaagcacatgagctgttaaaagcaggggtaacagagtttagtcgagaaaccttctcgagtgctttagagctaggacgtaaaactttaattgaacttggtatgcatccacatcaggcctatcgtgcacaacagcattttcgtcgtctagatatgcagttattaagaaagttggtggacgaatcacccgaagaagtctcgaatgtttcacgtgttaaagaggctcgtcgtgaattagaagagctgtttaatgaagagatgagacaagagcaccaccagcctgatatttgggacgaatcgttaactgatgctatccctcaagtaaatagagaaaaaagacccattgataaacaggagaactga

SEQ ID NO: 294808 - DNA, 204 bp, Proteus mirabilis
atgtctgcaacccgtaagcgttttattgctggcgcagtatgtccccactgtcaagcccaagatacactcaaaatgtggcgagaagataaagtggatattgtggaatgcgctcaatgtggtcatcagcaaaggcaaacagacggtgaggttagtgcacttgtgcgtgaaaatgaacaggtcatcgggatctttacaccacaataa

SEQ ID NO: 294809 - DNA, 636 bp, Proteus mirabilis
atgaaagtagcaaacgacttggtagttagtctggcttatcaagtaagaacagaagacggtgttttagttgatgagtccccggtgagtgcaccgctagactatctacatggccgtggttctttaatcagtggtttagaaaatgcattaacgggtcgtgaagttggtgagaagttcgacgttgaagtcgcttctgatgacgcatatggccaatacgatgaaaacttagttcaacgtgtaccgaaagatgtttttgttggtgttgatgagttagaagtgggtatgcgcttcttagctgatacagatcaaggcccagtaccagtagaaattaccggtattgagggtgacgaagttatcgttgatggtaaccacatgttagcgggtcaaaacctgaagtttcatgtagaaatcgttgctatccgtgaagccacggaagaagaattagctcatggtcatgttcatggtgaagatgaaggtcatgagtgttgtggcggacatggccacggtgaagaaggcggatgctgtggtggtggtcatggtcatgatcacgatcacggtgaagaaggtggatgttgtggtggcggtcatggaaaaggtggtcacggccacggtcatggcggttgtggttgccaacattaa

SEQ ID NO: 294810 - DNA, 219 bp, Proteus mirabilis
atggacattaaggaaatagaagagttacttattcaattagagagtaaaattgctttccaagatgccaccatcgaagagttaaatcaggtggtcacacaacaacaaattgaaattagtcgttttaaagaggccttaaaaatcgtcaccgaacgattgaagtcatcccaatcgtcaatgctcgctcgccctgaagatgagaccccaccacctcattattaa

SEQ ID NO: 294811 - DNA, 750 bp, Proteus mirabilis
atgaaatctttattaaaaacgacgttgttggcaacaagtttagcatttgcatttagtgcacctcatgcactggcagaagagacagctaaagtaccaacattaaatagcgcgtttaaaactcaggatgagcagaatgcatatgctttaggcgcgtcaatgggtcgctatatggaagctgcattaacagaacaaaaaaatatcggtattaatttagattcaaaacaattattagccggtgttcaagatgcctttaataataaatctaaattatcagatgcagaaattgaattaacgctggcagcttttgaagatcaagtacgtacggttgcaacggcgaaaatggaaaaagaagctgcagagaataaagctgctggtgataaattccgtacagaatttgcggctgaaaaaggtgttgttaaaactaaatcaggcctactgtatttagttgaaaatccaggtaaaggtaaaacaccaacagatgccgatcgcgttactgtgaactataaaggtatgctgattgacggtaaacaatttgatagttcttatgatcgtaaagagcctttaactattagcctgaaaagtgttatcccaggttggactgaaggtatgaaatacattaaagaaggcggaaaaattaagttagttattccacctgaattaggttacggtcaacgtgcaacgagtggcattccagctaactcaacattagtctttgaagttgaattgctgagtgttgaaagcgacaaataa

SEQ ID NO: 294812 - DNA, 882 bp, Proteus mirabilis
atgtttttaggtcaatattgggcaaagtttgcccctactacgctttttgttctactttggagtagtggtgctattttttctcgttggggtttagataatggcagttcatttgccattttgacttggcgttttgttattgcattactgtttcttaccctactttgtctccaacgtcgccaatttcttccccctaaaggaagccgtttaaaaacagcatgggttggattgctcattatcggtggttactctatttgttacttgttagcgctcgctaacagtattacaccagggatgctcgccactattatgggtattcagccgatcctcactttatggatcattgaacgacactttactgcgagtcggttattaggactatttattgctttgataggattagtattagtggttgcgcagagtttatttaatacttcactctcattaacaggaatgatttatgcactcattgcactcctctgtatgagctttggcgcaatttcccaaaagaaattacaattagcgcctatggaggcattgccgatacaatatgtggttagtttaacgctatgcttattatttattccatttcaacctatgcagcaatcttgggatattggttttattgttcccgtactttggctagcaattattatttctgtcgtggcacaattactactctaccgactgttaactgcaggtaatctggttaatgtgactagcttattctatttagtaccgggagtaactgcgttaatggattatatcttcttaggcaataaaatgtcttggcttagcttagcggggatgggcgccattattattggtcttatttttgtatttaaaaagtctaactcgatgattgttgaagaaaaaataaaataa

SEQ ID NO: 294813 - DNA, 705 bp, Proteus mirabilis
atgtctagcccgttattctatggtgacagcaacgagtttgaaaaactagatagccgaccttttactcaaactgatcacgaaattttaaagtcatatgaggctgcagtagatggtttagccatgttaattggtcatcactgcgaaatcgtattgcactctctggaagatttgaaatgttcagcggttaaaattgcgaatggggaacatacaggccgtaagattggttcacctattaccgatttagcattacaaatgttgcatgatattacagatgaagattcaagtttttcaaaagcttattttacccgtgcaaaaagtggcgctttgatgaaatcaattacgatcgctattcgtaatcgtgagcgccgtgttattggtttattatgtattaatatgaaccttgatgtcccattctctgagattattaaaacctttattcctgaagaaacgcatgaagtggcttctgatgtgaattttgcttcttctgtcgatgatctcgtggcacaaacacttgaatttacgattgaagaagtgaataacgatcgtgaagtggctaataatgcgaaaaataaacaagtggtgttaaatctttatgagaaagggatctttgatatcaaagacgcgataaatcaagttgctgatagactgaatatttctaaacatactgtgtatctctatatccgccaatttaaaaatggagagtag

SEQ ID NO: 294814 - DNA, 393 bp, Proteus mirabilis
atgaatctgacatattgcttgctggtgactgggccacattatggcacggaacaagcttctagcgcttatttatttgctaaagcgttacttgaaaaaggtcatcacatcgcacaagtatttttttatcgtgaaggtgtgtccaatgctaatcaattggtctcacccgcaagtgatgaatttgacttgccaaaagcctggatagcattggcttcacgctacaatatccctttgcaggtttgtgttgctgcagcattacggcgtggtgttgttgatgagcaacaagctaaagagcaggggttactgagcagcaatatggcaacaaagtttgagctaagtggcttaggagccctcgctcaagcgatgttaacttgtgatcgtgtggtgcagttttaa

SEQ ID NO: 294815 - DNA, 369 bp, Proteus mirabilis
atgaagaaaatgaattctgtggcgtttatctttactcaggcacctcatggtaatagtgctgggcgtgaaggtttagatgcgctattagcaacttccgccttaaccgaaaatataggtgttttttttctttctgatggcgtgttccaattactggaaaatcaacagcctgaaggcgttctttctcgtcatcatgcagctacatttaaagtcctccccttgtatgatgtgacaaacgtctatatatcacaagaagatctagctcatcgtggtttatcgtcacaaacaatgtttattcttgacgccaaggttataacagctcaagagattgctcagaaactgagtcactatgacgtggtattacgtttttaa

SEQ ID NO: 294816 - DNA, 294 bp, Proteus mirabilis
atgttgtatacttactccgtctctatttaccaaagtgatttggacgcatttttgtctttattgacaaagcatgatgaagttttattaatccaagatggtgtactagccgttcttgaagataatcctttattaatttattgtctggctcagcaaatttctgtttatgcattaattgatgatgttctcgcgcgaggcctaaaagatcaggtttctcatcagattaaacttatcaattatggtgattttgtcgatttaacggtaaaacacccccaacaaattcactggggcgcgtag

SEQ ID NO: 294817 - DNA, 375 bp, Proteus mirabilis
atggcaactattaatcagctggtgcgcaaatctcgtagctcgaaagttgttaaaagcaacgttccagctctggaagcttgcccgcaaaaacgtggcgtatgtactcgtgtatatactaccactcctaaaaaaccaaactcagcactgcgtaaagtatgccgtgttcgtttgactaacggtttcgaagtttcttcctacatcggtggtgaaggccacaacttgcaggagcactccgtaatccttatccgtggtggtcgtgttaaagacttaccaggtgtgcgttaccacactgttcgcggcgcgctggactgttccggtgttaaagaccgtaaacaaggtcgctctaagtacggtgtgaagaagccaaaggcttaa

SEQ ID NO: 294818 - DNA, 471 bp, Proteus mirabilis
atgccacgtcgtcgtgtaattggtcaacgtaaaattctgccagatcctaagttcggatcagaactactggccaaatttgttaacattctgatggtagacggtaaaaaatctactgcagaatctattgtttataatgcgctagagaccctggctcagcgttcaggcaaaactgaactggaagcgttcgaaatcgcattagataacgtacgtcctactgtggaagttaaatcccgccgtgttggtggttcaacttaccaagttccagttgaagtacgcccagttcgtcgtaatgcattagcaatgcgttggattgttgaagctgctcgtaaacgcggtgataaatccatggctcttcgcctggcaaatgaattatctgatgcggctgaaaacaaaggcgctgctgttaagaaacgtgaagacgttcaccgtatggcagatgcaaacaaggcgttcgcacactaccgctggtaa

SEQ ID NO: 294819 - DNA, 2115 bp, Proteus mirabilis
atggctcgtcaaacccccatagcacgttatcgtaatatcggtattagtgcgcacatcgacgccggtaaaaccactacaagtgaacgtattctgttttataccggtgtaaaccataaaattggtgaaactcacgaaggttcagcaacaatggactggatggagcaagagcaggaacgtggtatcactatcacatccgctgcaactactgcattctggtctggtatggctaaacagtttgagcctcaccgtgtaaacatcatcgacaccccgggacacgttgacttcactatcgaagtagaacgttctatgcgtgttcttgatggcgcggttatggtttactgtgcagttggtggtgttcagcctcagtcagaaacagtatggcgccaggctaacaaatatcatgtaccacgtatcgcgttcgttaacaaaatggaccgtatgggtgcaaacttcttacgtgtagttgaacaaatcaaaacacgtttagctgcaaatccagttccactgcaaatcccagtaggcgctgaagaagatttcactggtgttgttgacctgatcaaaatgaaagcgattcgctggaatgaagaagatcaaggcgtcaccttcgaatacgaagacattcctgcagaactacaagatttagcagatgagtggcacaacaacctgatcgaatctgcggctgaagcatcagaagatctgatggacaaatatctgggcggtgaagaactgtcagaagcagaaattaaatctgcgctgcgtaaacgcgttctagataacgaaattatcctggttacctgtggttctgcatttaagaacaaaggtgttcaggcaatgctggatgcagttattgaatatctgccagcaccaacagatgtacctgcaattaaaggtattttaccagatggtaaagatactccagcagaacgtcattcaagcgatgaagagccattctctgcactggcatttaaaatcgcaactgacccatttgttggtaacttaacgttcttccgtgtttattccggtgttgtaaactctggtgacacagttctgaacccagttaaagacaaaaaagaacgttttggccgtatcgttcagatgcatgctaacaaacgtgaagaaattaaagaagttcgtgcaggtgacatcgctgctgctatcggtctgaaagacgttactacaggtgatacactgtgtgcaattgatgcaccaatcatcttagaacgtatggaattcccagagccagtaatctctgttgctatcgaacctaagactaaagctgaccaagaaaaaatgggtatcgctctgaaccgtctggctcaagaagatccatctttccgtgtatctagtgatgaagagtctggacagactatcatcgcaggtatgggtgagctacacttagacgtgttagttgaccgtatgcgtcgtgagtttaaagttgaagcgaacgtaggtaaaccacaagttgcttaccgtgaaacaattcgcgaagaaattactgacgttgaaggtaaacacgctaaacaatctggtggtcgtggtcagtatggtcatgttgttattgaccttagcccattaccatcaggtggtgaagagaactatgtgtttgtcaacgatatcgttggtggtgtaattcctaaagaattcatcccagctgttgacaaaggtatccaagaacagctgaaatcaggtcctttagccggttatcctgttgttgatatcaaagctcgtctgcacttcggttcttaccatgatgttgactcctcagagatcgcgtttaaaattgctgcatctatggcctttaaagaaggtttcatgaaagcaaaaccgattctgttagagccaatcatgaaagttgagattgaaacgccagaagattacatgggcgacgttatcggtgacttaaaccgtcgtcgtggtatggttgaaggtatggacgatctacctactggtaagatcattcgtgcacaagtaccactggctgaaatgttcggttatgcaactgacctgcgttcacaaactcagggtcgtgcttcatactcaatggagttcttgaagtacaacgaagcgcctagcaacgtcgctcaggctattatcgaagctcgtaaagcgaaataa

SEQ ID NO: 294820 - DNA, 999 bp, Proteus mirabilis
atgtcacttcgtagtagtggtaattactatggagcggctgtaggtgttaataatgttgtagattattgtagtaaaaacagtgcgcaatggcagaattttttattcccattcccaggaagtcaagagggggagtacggattaaaattatataataaaaacgtaagtgaagaggaaaatagggaaaattatttagttgcagctatcaatggaatagtatctatcgatgcgttgtattatcagaatggattaccttccccgacaagaattaccctgcgccgaggaaaagaaatttctagaacagaggaatattctaatcaatttgtctatcgtcacccaatgtgctggtatggtaatttatcacgtgtaagtaatactagcttgagaataagctcttattctatttatgcagtaggccatgttaaacccggtatttacgattttgtagctccaatatattttactacagctcaaacagcaacctcaggcggggctaatccagatctatcttcagttcctttttcatttggtaatggtcctattcacgtcttaaaaacatgtaatgtttctcctgctagctcaacaaatatacaatttgccgctcaactagcacaaaattttaagtcagccaagttacttgagcaaagtgtcgctagtatgcttgtctcttgccctcattcaggaaatatgtacgtgacattaaaaccctataatgagctagtcaatgcaagtaaaacggggatgacaatgtctcccaatatccctttgaaagataaagaagtcgcaccttatatcacggtatctgatgcagctaaaaaaataactaatgcagtatgtaataacaattctgccgaggccttagagttttatgcaggacaatctttgggaaaatataatgggggaactgtttataagtcattatcattcaacctttgtgccaatggaaatatacctacgaatacttataaaggaagtattgatgtatcgttcctgattgaatga

SEQ ID NO: 294821 - DNA, 696 bp, Proteus mirabilis
atgaaaaaattattacttagccttactatgctggcgataatatctacgccagtgttggctaaatcccctgtagctaacttaaaaatcaacggtgatattaagccaccaacttgtactgttaatggggcgacacagcgtgatgttatttttgattacggagtcataagcccaacacttatccctcaatcgactgtctactcttattctgacattggagttcaaaatacagttacgattgaatgtgatgcaaaaacatatttaacatttactgcatctgacacttatgctgatacagaattaagtgttaataatacatcaggctggtttcatttagttgataaagcaaatcctgaaaccgcggttggtgcggctttcttcgcatgggataatgtgactgtcgatagcaaacctgcgtatatttcacgagcaaacgatgtgtctattacaggaaccagctacaataacgccctatacaaagggccaaccaatggttggacatcagaaaaacaaacaagcgttgataaaaacgccctggctctaatttcaggtgaaattttccaagcaagttttagacaaggaatgacaatgagtacttttattttatctagagatgaattaagtaaaaaaggaatagatttatctaatggtttagattttatgggagaagctgttctcacttttaactttggtgtctaa

SEQ ID NO: 294822 - DNA, 1335 bp, Proteus mirabilis
atgaaagcacgctataaatccatcgtggatatgttcgcaaataggatccgaagcggagatatcccttccggtacacgtttaccaacacacagagcactctccacgcaggaacatatctctctagctacagcaactcgggtttacagcgaactagaagctatggggctggtcagtggtgaaaccggaagaggaacatttgtcagagaaatagcgttgccctacggtcatggaattgaccaacatgctgtggccactgatgtgtttgatctgaattttaactatccgtcgttacttggtcagggggaacaactccgtgatgccctccaaaggattgcggtctccggggatatagaatcccacctccgttaccaaccacacgcaggcaggatgacagagagaaagattattgcagatcatatcacgaccccgggatttcaacctgacgctgaaaacgtggttattgtgaatggtgcacaacacggactaactatcactgtaatgggtatgctacgcccaggagatgtagtggcagttgatgcattcacctattcgggttttaaagtactggcagagctatatcatctggagctcgtcgccatacccgctttacccagtggcccagatttatctgtgctggaagagttatgccagaaaagacatgtcaaagctgtctataccatgccaacattacataatccccttggctgggtgctcagccacagtcagcgaaaaaaaatagccgaaattgcgagaacttatgatcttctcgttatagaagacaccacatacagctacctgatccgcagacctccctcacctattgcattttatgcacctgaacgtaccatttatatcactggattctcaaaaagcgtggcgactggcttgagggtaggggctgttgtttgccctgaatcgtaccggcctgcactagaaagggcggtgagagcaaccacctggaataccccctctgtaatgacagcactggtatgtaattggatacaagatggcacagttgcccgttttgaaacactgaaacggcgggacgctcgccagcgacaggcggtattaagatccacactcggggatatgccctgtattacgcatcctgcctcttattttgcctggttccctttaccagatgatacaagagccgaccgagtcgccaagaaactgatggactgcaatatttccgtttcaacagcagaacctttctgtacttcactcgttgtcccacaggctcttagaattgctcttggatctgtcacaatagagagcttacaaaaagcgttgataaaagtccgagaagctgtggagtatgaacagtatcgctaa

SEQ ID NO: 294823 - DNA, 891 bp, Proteus mirabilis
atggtgaatacagtggtaaataaaacagatcctagagctgtttctggatggatcaacgggctgttgggggtcatcatttttagtggttcgctacctgctactcgcgtagccgtccttgatatggatccctttttcctgacatttctaagggcatcgatagcgggtgtgttggccattatgctgatttatggttttcgtgaaaaatatccgcaagtttcgcagataaagtcactcataattgtgtcactgggcgtcattatcggttttccgttgctgacggctatggcgttacaacatgtgacctctgctcattcaatcgtttttcttggtcttctgccgctgaccactgcgatttttggcgtcctacgtggtggcgaacgccccagaatggccttctggattttttctgtgcttggtagtttgctcgttatggggtttgctctctcacaaagcacgatcgtctcacctactggtgatcttctcatgcttgcagcggtggtggtttgtggtttaggttatgccgaaggtgcaaagttaacccgtattctggggggatggcaggtcatcagttggtcgttggtcctctcgttaccattcatgctgatagcgtcatttataacaatgccagcctcatttaccagtattggatcatctgcatggatagcactaggttatgtctccctatttagcatgctaattggttttattttctggtacaaggggcttgcaacgggggggattgctgctgtcggtcagttgcaacttcttcagcctttcttcgggctggggttgtcggctatactgttgcatgagaccataagtcctctaatggtattcattacgcttggcgtcgtcctgtgcgttatgggctctcgtaaattttctcgataa

SEQ ID NO: 294824 - DNA, 315 bp, Proteus mirabilis
atggttgtcgatcataatgattttatttcccagccaagacgcgcggaaattcaacctgaattctcatatataattgaatgtgttgtgacaaatctaacccgttgctttcctaagtttatacacagtctatacgtatacggaagtgtagctgaaggcagggcagaagtaggtaagtctgatctggatatgacagttattttcaaatatgaacctgatcagactattaaagagcaatttgcaactgttcagtctgttcttgaaaaaaataatcccgttatcagtaaaattgattttgattgtggcctgttagaatag

SEQ ID NO: 294825 - DNA, 1269 bp, Proteus mirabilis
atgcttgacctgctgaatctgccaggcatcaagccggtcgatatgcgccacgaaggcaaatgccttgtgatagttgctgaaccggtaacggtcgaggtgccgttgtgtggggactgcaacatccctatgcacagacacggtacgcgcaaaaacaagttcatggacacgccgttgtacatggagcccgtccgccttgaagttcagcgcccgcgctttcgctgtgagtcgtgcggaaaaatgtccatgccggagttgagttttctggatgacaaacgccgagccaccaaacggctggtcgatgttattcggcaacagtgcctgggaaccaccttccatgctttagccgagcaaactggtgtggcggtgaacaccgtcaagaacatcactaatgatctcattgatgaactctcccaaaccgttcgttacgaaaccccggtcatcatgggtatcgatgaagtaaacctggccggcgggtatcgctgtgtaatcaccaacctagcaaccaacaacgtctttgatatgttggagcatcgtactcaagagcacctgaagcccttcttcaaggatttgccggatgcagacaaggtggaatgggtctgtacggatatgtggcgacccttcaagcgttcctttgctcagtatctgcccaacgccaaactggtgatcgacaagttccatgtcgtcaagatggcctctgaagccctggaagcggagcgcaagaactatcaggcacagttaagcaaagatgatcgcatttacgtcaaaaagtccattcgctggctcaccctgaagcggcccggcaacctgacgcccgcagagcaaaaggcgctggaggttgtaaagcaggctatcccagaacttgccatggcctatgacttcaaggaagccttcttctgcatctacgacgaacccgacaagcagagcgctcagaacgcctttgaggcttgggagaacagcctgccaccttatagcatggagcctttcaaaaaactggtaaaaacggtatacaaccattacgacgacatctttgcctactgggatgcgccgttctcaatcaccaatggctataccgaagggcttaatggcttgatcaagatgtccaaccggttaggtcggggttatagctatgagatcatccgcgcaaagacgttgtactccaaagaagcccgcaaggttggcagtggtattcgagcaggacgaggcaaggtcgagtatgggccacacattccgacattgttgaagcaggcagaaggtggagagttggattaa

SEQ ID NO: 294826 - DNA, 3258 bp, Proteus mirabilis
atgcaatcagcagcacatcaggaaaaacacttccagcaatacatcatcgaccggttggtagaacagggctggaagctgggtgattccaagttctacaacaccgagcgggcggtgtaccccgaagacctagaaagctggatcaaaaccagcggccagcaggaaaaatgggacaagctggaacggctcaacggggctaaaactcttgaggtgctgatggatcgcttgaataaagcactggagaaacaaggcaccatgcaggtgttgcgccagggcttttccattgccggttgcggcctgatcgagatgaccgaggccgccccggaagacaagcgcaatgcagcagtcattgagcgttaccaggccaatatcctgcgcgtggtaccggagttgaagtatcacccggcccgtgaatttgccattgatctggtgctgtttatcaacggtctgccggtggcaaccgtcgaactgaagaccgacttcacccagtcctgcgaagcggccatggatcagtaccgcaatgatcgcctgccgtatgacgccaagaccaaacgccgggagccattgctgaccttcaagcgtggggcggtggtgcatttcgccatgtccgactctgaaatcatgatggcgaccaagctggatggagaaaacacctttttcctgccgttcaataaggggcgcaaggacgaaagcggcacggtacatgcgggtaacccgccaggtgagattaaggccgatggtacccaggaatacccggtagcctacttctgggaggcggtctgtcagccggatgcctggctgcggattttccatagctttgtctacgtcgagaaaaaggacgtggtggatattcagggcaactggtcgaagaaagaaaccctgattttcccgcgctttcaccaatggacggcggtgaaccagatgctggccgatgcccgcgaaaacggcgcaggcatgacctacctgtgtgatcacagcgccggttccggcaagaccagcaccatttcctggacggcccatgacttggtgaaactgcgcgaagataccggcgacgcggtatttaacagcgtgatcattgtcaccgaccgtaatgtgctggacggccagcttcaggacgcggtgaagcagattgaccatcagtttggggtgatcgccgccattgaccggcagaagtcatccaagtccaagagcaagcagctctcggaggccttgttgtctggtactccgattgtggtggtcacgatccagacctttccttacgcgatggaagccatcatcactgacaaagccttgaaaggaaaaaactttgcggtaatcattgatgaggcacataactcgcagaccggctctaccgccgccaaactgcaagccgcgctggggatgagtgggcaaggcaagatgtccaccatgacggtggatgagttgctagaacaactgcaaaagtctcgcgcccgcccggacaatatcagctacttcgcctttaccggcacgcccaagcactccactttgatgctgttcggtcgcccgacagatccaagccaaccggcctcggacaataacccgccgcaagccttccacctgtacaccatgcgccaggccattgaggagaaattcattctcgatgtgttgaacggctatgtgccctacaaaacggccttcaacctttccaagcagcttgaagacagcaagcgggtgagcggcaaggccgccaaacgcgccctggcacagtggatgtcattgcaccccaccaatgtgacccagaaggtacagtttatcgttgagcacttcaccaagaacgtcgcccaccggctggatggcaaggccaaggcgatggtcgtgaccagctcccgtgccgctgccattcgctacaagaaggcgtttgaccgctatatcgagcagcacagcgagtacggctttattcattcactggtggccttctccggcaagatgaccagtaagcaggtgatgcaccaggatgacagcgagttcaaggatgatgtgtttatcgtcgatgagaacgaggagttcaccgagcagagcatgaacccagatgtccacgggcaggatttgcgctttgcctttgaccgcccggaataccgggtgatgttagtggccaacaagttccagaccggctttgaccagcccaaactggtcgccatgtatgtggacaagaaaatcgccaaccatgtggagattgtgcagaccttcgcccgcctgaaccggacggcaccagggaaagatgaggtctttatcatcgactttgtgaacgatccggagaacgtgcgcaaggcttttgccacctatgacaagggcgctcacatcggcgaagtgcaagacctcaatgtggtctacgagatcaaggagcgactggacgagcacggcctgtacgacgagaaggacttggccgcgttcaaggaggctcgcttcaagaccatccgcgacatcacccatactaaatcgccgcaacacaaggcgctgtatgctgctacggctggagcgacgtccttgtataacgacaagatgaaaatgctgcgcgatggcatggcaacctgggaagcagcgtttgagaaggcccgcgccaagggtgatgaggcgggcatgaagtctgctgatcaccaccaggatgagtatgccgagcaaatcaaggcgctgatgggcttcaagtcggacctggggcgcttctgccgtacctattcctatatcgcccaactgattgattttggcgacccggagttggagaactttgccgctttcgccaagctgctgcaaaagcgccttcagcacgaagcaccggaaaccgtggacttgacaggcctggtgcttactggctttgacatcaatgctcgacccgatgacgtagaagacgaaggcaaaaccccagtattgcaaccagtaggtgcaggcggtggtggcgcggcaggcgacaagccgaaattcgtcaaagagattatcgagaggctcaacagcctgtttggtgaggcgacgccgatccaggatcaggtggctttcgttaatcagatttcagcaattaccggtgaaagcgatgtcgtcatggctcaggtggaaagcaacacccgtgagcaggctatgaaaggcaacctccccggtgctgtgcagcaagcggttgttcgtgctttgtccagtcatcagaagctggcaactcaggtgctcaagtctgaccgtcagggcatgaccgcattggttgatatggtgtatgacctgctgcgcgaaggcaaagacatcgatctgggtatggattaa

SEQ ID NO: 294827 - DNA, 1278 bp, Proteus mirabilis
atgagccagtacagagcatatcccacgtataaggattccggtattgagtggattgggctggtgcctgagcattggaaggtagcgagagtcaagcgactagcgtcattgcgcaatgaacgacgaaatgatgtatctactgataccatttatatcggacttgaggatgtagaagcaggatcagggcagtacaagccaacgaatggaagctctcgtcaatcagaagattcaactgtaggcatcttttatgaaggggatgtcctgtacggtaagttgcgtccatatttgcgaaaagccattatttcagagatggcagggtgctgctcaacagaatttttggttctgagggctgaaaaaacagaacccagatggctgcaagaatggcttttaactcctgatgtaacgcatcaaatagagtcaggatgcgagggagccaaaatgcctcgtgcagattgggggcatatcggttcaattgaagttgtatacccagatcagcctgagcaagcgcaaatactaaccaccctcgaccgcgaaaccgcccgtattgatgcgcttatcgagaagaaatcccgctttatcgagctactgaaggaaaagcgccaggcgctgattacccatgctgtcacaaagggactagaccctaacgcgaagatgaaggattccggcattgagtggatagagcaggtgccggaacattgggatgttaagccgttcttcgctttggtgacagaactgaaccgaaagaatgtgggcctagctgaaaccaatatactgtccctcagctacggaagcatcatacagaagcctgaaactagaaatatggggttaacgcccaagtcttatgaaacctatcaaatcgtagagtctggcgaaattgtatttagattcaccgatctgcaaaacgacaaacgtagcttgcgttcagcccaggttacgcaaagaggaatcattacctctgcgtatatggccgtgaaaccgcacagtattgattctacatattttgcatggttgatgcgttcatatgacctttgtaaagtcttttatgcaatgggtggaggattaaggcagtcattgaagtttgaagatgtcagaaggcttccagtacttatccctcttgtcgatgagcagagtgaaattaccaatgcaattaatgcaggaactgctcgcattgatgctctagtcgagaaaacagaacaaagtatcaccctgctcaaagaacgccgcgccgcctttatcaccgccgctgtcaccggccagattgatttgcgaggaaaacaataa

SEQ ID NO: 294828 - DNA, 2028 bp, Proteus mirabilis
atgaacgaatttacgggatcggcagcttcacaggctgactttatttggaagaacgcggaagacttgtggggggacttcaagcatacggactttggcaagatcattttgccgtttaccttgctgcgccgcctggagtgtgcgctggagccgacccgcgaggcggtgaaagaagcgcatgacgctttccaggatgccgatgttgagctggataccattctgcgctcaaccgctgaataccccttctacaacacctctgaatactccctcggcaccctaggtagcaccaagacgcgccgcaatctggaagactacatagccctgttttcagataacgcccgcgctatcttcgaggagttcgatttcggcaataccgtgattcggctggagaaggctggcttgctgtacaagatttgccagaacttcgccaagatcgacctgcacccggacgtggttccggatcgggtgatgagtaacatctacgaacacctgattcgccgctttggggccgaggtcaatgaaggggccgaggacttcatgacgccgcgcgacatcgttcacctggcgactgcattgctgcttgacccggatgatgccctgtttgaggccagccccggtttgattcgtaccctgtatgacccgacctgtggcacaggtggcttcctcaccgatgccatgaaccatgtgggcgactatggtaaccgcgacaagatccctccagtgctggtgccgcacgggcaggagttagagccggaaacccatgcggtttgtgtggccggcatgctgatccgccgtttggagtctgacccaggccgagatctgtcgaagaacattcgtcagggcagcacgctgtccaacgatcagtttgctggtgagcgtttccactactgcctgtccaatccaccttttggcaagaaatgggagaaggacaaaaccgccgtcgaagcggaacacaaaaaaggtgagctgggccggtttgggccgggcctgccgaaaattagcgatggctccatgctgtttttgatgcacctggcgagcaagctagaactgccgatcaacggtggtggccgcgccgctatcgtgctatcgggttcgccactgtttaacggtggtgccgcgtctggggaatcggaaatccgccgttggttgctggaaaacgacctggttgaagccattgtagctctgccaacggatctgttcttccgcaccaatatcgccacctacctgtggattctgtccaacaagaagccgcaggagcgcaaaggcaaggtgcagttgatcaacgccaccgacctgtggacttcaatccgcaatgagggcaacaagcgccgtattgtcagcgatgagcagcgccgccagattctggacatctacgccgcaggcgaaaccggtgcgctttcccggatgttggactaccgtacctttggctaccgccgtatcaaggtcctgcgcccgctgcgcatgaccctggagctggataaggtgggaatggagcgattggaagccgaagctgcctgggaaaagctctctgacgcgcatcagacattctggcgcgaagccctcaagcggctgaacgagcaaccgcagccctatagctgggcagaaacctttgtcagagacgcgatcaagtccgacgaagccaagcagctcaaggtcaaatccaacaaggcattgatcaccgcgctgatcaatgcctttggtcacaaagacccgaaagccgagccagtcacggattccaacggcgagctggtgccagacacagatttaactgattacgagaacgtcccctatctggaggacatcgacgactactttgctcgcgaagtgcttcctcatgtgccggatgcctggatggatgagagctttaccgatgccagggatggtcaattggggcgcgttggctacgagatcaacttcaaccgcttcttctaccagtaccagccgccgcgcaagctgcaagatattgatgaagacctgaagcaagtagaagccgagattgccgcgctactggcggaggtggccagcgaatga

SEQ ID NO: 294829 - DNA, 204 bp, Proteus mirabilis
atgatatcttttatggaaaccaaaaccaacttggataaaagtaccttctcagaattaaatgataatggattacgtgataaaatatttaaagtaacaaaagcgatattaaaaaaggttgaggaagattatttttctggttatagagttagcaataatgaacaaaatttcggctatttgcattctgaggtaggatcgcaaatttag

SEQ ID NO: 294830 - DNA, 855 bp, Proteus mirabilis
atgtgtgattgggatgaaatattcaaaaaaacaaaaaaatacttcagcataaaagaaaattctttttctgaatatgtaactaattcacgagaccctaacaagctggatagttttaaatcagagctgctttttgcattcatttttaattggttacaagaaaataaatctctagacattaagcttatgaaacaagtaggtgaaaatcatcccgacctaaaattaaaagtgaatggcaaggtcactcatgtagaagttaccaaaattactaaatatgacaataggtttcgtgaaaagagatttgattcacacagccctcaagacatcattgaacaggataaggttaagctatttgttacttctaagctttgtgaaaaatcagagcagtacaaaaaatggacctctaatggtgtaataaaggatagtgattcgaagattatcgctattgatatggggcggttatttcccgcaagtgtatccggttctttactttttgctgcttataacttcttcaaagatgaattagagttaaatattaataagaaaacgggtaagcctcaagggagaggaattccaatatcacgtaataagatgcaaaaattaaagaaggacaagaatgatgaatataaactgattgatattaaccatgacgacatattgcataaactaataacgagtaacattaacggaattatcgcttatcattcggggttaccagagtcaatacacataattagcataaacaatgatccacttatggacatgctatatttacagttggcctttaagcaagatatagatgtaaaaattttaaggcacgggattattatcgaacaaaaaaatcagcacgcaggctag

SEQ ID NO: 294831 - DNA, 843 bp, Proteus mirabilis
ttgaatgctagaggtgaaatagcgctattccgtgcatttatccgcactttcaattctcttggttcaaatgcgctggcgcatgaatatcatggtaatcgttaccaagtgacatttacagctatgcgagatgctgggagacaaaaaccacgttgtgaattatgcgatgtgatgatcatctattacccagagggaaattctagagcagcacgagtcacttttaatcaggcgaaggtctcttctaacccattacagtctgctacagcggtgtttgcaccatacaagtttcgtgcaaatttagaacagtgggacttattatcaaatcgtcctttaataagagctacttcatcaaaaattaatctgcccgccaatctactttctggcgccctactaccatcagtaggtacttttggagttttttaccccacaggtcagggatttgattttgcttactttgttgcaaatgggcttagtccattgaataacaacaataattcgtcgggtacactccagtggaaaacaaaattaggatgcgttcgcaaaattaacaattataaagaaataactgcaacttgctgtatgtatacctttggacaatcactggaatctggcttgatagggacgcctcttcagcaaattttaaatgtttcaactgaacctgctgaaatccgaatctggttgagaagcatgctatcctcactccaagaaatgcaccctgactctactctaccaaatgagttactcgaagggtttgagttaatacgcgaagaaccatctaagaacgttgaactatcaactccacgtgctgtaattttggtcaaaactggaaagccattactttcgtaa

SEQ ID NO: 294832 - DNA, 1242 bp, Proteus mirabilis
atggcaagaaaaactaagccattaaccgataccgaaatcaaagcagctaaaccgcaggacaaggactatcagttgtatgatggtgatggactcacactgctaatcaaatctagcggaagcaagttatggcaattccgttactaccgcccttatacaaaacaaaggaccaaacaaagttttggggcctaccctgctgtcacactttcagatgctagaaaactcagagcagagtctcgctcattactggcaaaagatattgaccctcaagaatatcagaaagatcaaataagaaactctcaagaggctaaaatcaataccttccaacttgtctctgaacgttggtgggaagtgaagaagtccaccgtaaccgaagattacggtaacgatatttggcgttcacttgaacgagatgtgttccctgccattggtgacatcagcgttactgatatcaaagcgcatatattggtgcaagcaatacaacccgttcaagctagaggtgcattagaaaccgttcgtcgcctttgtcagcgaatcaacgaagtgatgatctatgctcaaaatactggcttaattgatgccgttccaagtatcaacattggtaaagcttttgaaaaacccaagaaaaagaatatgccaagtattcgccctgagcaattaccacaactcatgcaaacaatgcgtacagctaatattatcttgcctaccagatgtttgtttatgtggcagctacttaccatatcccgccctgccgaagccgctgaggcccgttgggacgaaatcaactttgaaaccaaggaatggaagatacccgctgctagaatgaaaatgaatcgcgaacataccgttccgttatctgacgctgctttggctattttagagctaatgaaaccactcagtggtaaccgtgagtttatctttcctagccgtatcaaacctacccaaccgatgaatagccaaaccgttaatgcggcattaaaacgtgccggattcgatggtgtacttgtttcacacggtcttcgctcaattgctagtaccgccctaaatgagcaaggtttcccacctgatgtgattgaagccgcactcgcccacgttgataaaaatgaagttaggtgtgcctacaatcgtagtgactacctagagcaaagacgccctatgatgcaatggtgggctgattttattgaagcggctgacaggggaagtattatagaaggcggaataagagggatatcgctagttgggtaa

SEQ ID NO: 294833 - DNA, 483 bp, Proteus mirabilis
atgacaaagaaaaaatcacacaaacccggctctgccactattgcactcaataaacgtgctcgccatgaatatttcattgaagatgaaatcgaagcgggactgtcgttacagggctgggaagttaaatcactgcgtgcgggtaaagccaatatcagtgatagctatgtaatcatgcgtgatggtgaggcatacctgtttggtgccaccattacaccgttaaacgttgcctctactcatgttgtttgtgatccgacacgtacgcgtaaactgttattaaaacaacgtgaattagctaatctctatggccaaataaatcgtgatggttacaccgtggttgccctttccttatattggaaaaatgcatggtgtaaaatcaaaattggcgtagctaaaggtaaaaaagatcacgataagcgtgacaccataaaagatcgtgagtggaaattagacaaagcacggatcatgaaaaatgctaaccgctaa

SEQ ID NO: 294834 - DNA, 435 bp, Proteus mirabilis
atgcctcagattagtcgatctgctctagttccttttagtgcagagcaaatgtttaaactagtgaatgatgttcttacttatcctgattttctaccaggatgcgttggaagtaaactgatcaaaagcactccagaagaaatgattgcatctgttcaggtttctaaagcagggatcagtaaaacatttactacccataattttttaaaaaccaatgaacgtgttgatatgcgtcttgtggatggcccttttcgtaaactaaccggaggctgggtatttaccgcattagatgataatgcatgtaaggttgagtttcagctagactttgagttcaccaataaattaattgagttagcttttggccgtatttttaaagacttaacaaataatatggtgcaggcgtttactcaaagagcgaaagagatttatcgtgactaa

SEQ ID NO: 294835 - DNA, 294 bp, Proteus mirabilis
gtgactaaaatatgggttgaggtagcctacgcgttaccagataaacaatatgttatccctgtggagttaacactgggggatactgttgaacaagcaattattgcctcaaatattttaacgatttgtaatgatatcgatttaactaaaaataaagtgggtatctatagtcggccagcaaaattgagtgataatgtgcgtgatggcgatcgcgttgaaatctatcgaccgttaatcgctgatcctaaagagatgcgccgtaaacgcgctgaaaaagcacgccaaaaaactgaatag

SEQ ID NO: 294836 - DNA, 363 bp, Proteus mirabilis
atgcgttttaaactgttaaaagttgccgccttatctttagtcgtaatgacttcaggttgctcgatgttcgaaagactggtttatcacccagatatcaatcagggtaattatttaacaccagccgaagtcgccaaagttcaacaaggaatgacacagcagcaagttcaatttgccctcggaacacctatgctgaaagatcctttcggaactcaaacttggtattatgttttccgtgaacagccaggccatcaaaaagtgcgtcaagaaactctgacactgacatttgataataatggcatactgactaagattgataaacaaggtgatatgccgagtttttctaatcaaaccagtaaagactaa

SEQ ID NO: 294837 - DNA, 1662 bp, Proteus mirabilis
atgctgactcaattaactattagtcattttgccatagtccgtgaacttgaaatcgacttttctggtggcatgaccacaattaccggtgaaacgggcgcaggtaaatctattgcgattgacgcattaggcttgtgtttaggaaaccgtggtgatgctaatatggttcgccctggtgccactagagcggatttatgcgcacgattttcactctctgataccccttccgcccagcgttggttagaagaacatcatcttgacgatcataacgaatgcctattaagaagaaccattgcagcagatggccgctctcgtggttttattaatggtacttctgtccctttgtctcaactaagagagcttggctcattgctgatccaaattcatgggcaacatgctcatcaacaactattagagcctcgctaccaaaaacatttacttgatatctatgctaatgaacctgctttattaaaaaagatgaaagcggcttatcaaacctggcatcagagttgccaaaccttagcgacttttcaacaacaatctttagaaagagaagcaaggcaacaactgattgattatcacttaaaagagcttaacgagttccaacctgttgcgggggaataccctgaattagatcaagaatataaaaggttatctaactgtggccaatttctgaccttgagccaaaatagtttgcagatcttaagtgataacgaagaacaaaatattttaagtatgctgaatgtggccaaacatgagatcagcgaactttccacaatggagagccaatttaattcactgttagatatgctggaagaagcaagtattcaaattagcgaagtgagtgatgaactacgccactacagtgatcgtttagaaatggatcctaaccgtttattcgaattagaaaaacgtatttccaaatatattagtctatctcgtaaacatcgtgtcacccctgaagagctatatgaattgcatcaacaattaattgaagaaaaagaggcactattacgccaaaatgatgactgtgatgcattaatggaacaagttaaaattgatcatgcagccgcattggacgtggcaaaacaacttcatcaaattcgccaacagtatgcacacgaattaagtcagcttattaccaatagcatgcatcaattatcaatgcctcatggctatttaactgtagatacattgtttgatgaaaatgtcttacaaattgatggtgcgacaaaagttgagttcaatgtcaccaccaacccggggcaacctcatcaagctctctctaaagttgcgtctggcggtgagctatcacgtatcgcacttgctatccaagtgatcaccgcaaaaaaaatggatacacccgcgctgatttttgatgaagtagatgttggtattagtggaccaacagcagctattgtcggtaagttattgcgtgaattaggcgaatcgacacaagttatgtgtgttactcacctaccgcaagtagcaggttgtggccatcaacactattttgttaataaagagactaatggtgaagagacagaaaccaccatgaagctgttaactaaaaaagagcgtttacaagagttagcccgcttattagcgggaagtgaagtgactaaaaacacccttgctaacgcaaaagatctgctggcagcttaa

SEQ ID NO: 294838 - DNA, 900 bp, Proteus mirabilis
atgccagataataccgtaacggaagaaaaacaatttaaatgcattggcatcgtcggtcatccccgccatcctgaagcactttcgacacatgaaatgctctattattggctccttgataaaggatatgacgtcattatcgatacccaagttgctgaagaattaaaactcaccgatgcacaaacgggcgatttaacacaagtcggcaaactcgctgatctggttattgttgttgggggtgatggcaatatgctaggcgccgcccgtgttttatcgcgctataatatcaaagtgattggtgtaaaccgcggtaacttaggttttctgaccgatcttgatcctgataacgcattacaacaattaactaatgtattagcaggccattatcgtgaagaaaaacgcttcttacttgaagctcgtgtctgtgctgaaggacaaagaacacggattggcaccgccattaatgaagtcgtacttcaccccggcaaagtggcgcatatgattgagtttgaagtctatattgatgatcgttttgcattttcacaacgttctgatggtctaattattaccacaccaaccggatcgacggcgtattcactctctgcaggtggccctattcttacacctaatcttgatgcgattgcgctggttccgatgtttccccatacgctctcttcacgccctttagtcattagtagcgacagtcaaattcgcttaaaattctcacaaaccaatattgattatgaagtcagttgtgatagtcagcttgtattacctatcaaagaaggggatgaggtaattattaagcggagtcgacaaaaacttaacttagtccacccaactgactacaactattttaatacactcagctcaaaattaggttggtcaaaaaaaatgttctga

SEQ ID NO: 294839 - DNA, 612 bp, Proteus mirabilis
atgagtagtaaagaacaaaacgtacatgaagagcaagtctcaaaagaaaaagaaggaatggaatcggtaatgaatgaatctcaagagcaagtgaaaagcgaagacgctcaggcggagtttgatgcacaagctgagttagttcaagcgcttgcacgcgttgatgagctggaaaaacagttgcagcaatcacaaaaaacggaacgtgaagcgatgatccgtgctcaagccgaaattgagaatattcgccgtcgtactcaacaggatgttgaaaaagcacataaatttgcgcttgagaaattttctaatgagctactacctgtattggataatttagagcgtgctttatctgccgctgatcatgaaaatgaacaaatgaaaccgatgattgaaggtttagagttaaccctgaaatcattcttagatgcggtgcgtaagtttggtattgaagtcgttgaagaaaaaaatgtcgccttcaatcctgaagtacaccaagcgatgacattaattgatagccctgagcatgaagcaaaccatgtcgttgatgtgatgcaaaaaggctataccttaaatggtcgtctattacgtccagcaatggtagtggtatcgaaataa

SEQ ID NO: 294840 - DNA, 681 bp, Proteus mirabilis
atgactacaccattaacttggcatgatgtaataggtgctgaaaaagaaaaaccctattttcagcaaattttgtctcaagtcgcacaacaaagacaagcaggcaaaataatttatcctccacaagaagatgtatttaacgcttttcgcttcactccctttgaaaatgttaatgttgtgattttaggtcaagatccttaccacggccccaatcaagcccatgggctttccttttctgtacgtcccggcgttccggctcccccttcattagttaatatgtataaagagcttgaacaagaataccctgacttcaaacgacctaatcatggttatcttgagagttgggctcaacaaggggtattactacttaatactgttcttacggtagagaaaggccaagctcactctcatgctaactatggttgggaagtttttactgacgcggttatcgaacaaattaatcaacgtcgtgaaggcgttattttcctactttggggcgctcatgctcagaaaaaaggtcgttttattgatactaataaacactttatcttaaaagcccctcacccttcaccactctctgcacatcgtggttttttaggctgtggtcattttaaacaaaccaataatctattagcgcaacaaggacgcacgcccattaattggcagcttgatcctattaaataa

SEQ ID NO: 294841 - DNA, 384 bp, Proteus mirabilis
atgattactggtatccaaattactaaagctgataacgacgatttattacattctttttggttgttagatgatgaaaacggcgaagcacgttgtatttgtgcgaaaaaaggctttgaagaaggccaagttgttagccgtgatgcattaggcaacatcgaataccgtgaagtaccggtagaatctaaaccggtagtacgtgtagaaggtggtcaacatctaaacgttaacgtattaagccgtgaaacattagaagatgccgttaacaatcctgagaaatatcctcaattgactattcgtgtatccggctatgcagtgcgttttaactcactgacaccagaacaacaacgtgatgtaattactcgtactttcactgaaagcctgtaa

SEQ ID NO: 294842 - DNA, 1356 bp, Proteus mirabilis
atgacagccacgacattttccagtcttgaacttgatgaaagtttattgaccgcattagaagaaaaaggatatcaacgtcctactgctatccaagcagaagctatccctgccgcaatggaaggacgtgatatattaggctctgcaccaacgggtacagggaaaacagcggcattcttacttcctgctattcaacatttacttgattatccacgaaaaaaatcagggccacctcgtgttctgatcttaactccaacccgtgaacttgctatgcaagtcgctgatcaagcaaaagaattatgtgctcatacccatctagacatcgcaactatcaccggcggtgttgcttatatgaatcacgcagaagtttttagtgagaaccaagatattgttgttgctacaacaggtcgcttattgcagtacatcaaagaagagaactttgactgtcgtgctgttgaaatgctgatcctcgatgaagcagatcgtatgttagatatgggttttgctaacgatattgaaactattgctggggaaactcgttggcgtaaacaaacattactcttttcagccacattagaaggcaatgctgtgattgattttgcacagcgaattcttaatgaaccggttgaactgaacgctgacccttctcgtcgtgagcgtaaaaaaattcaacaattttactatcatgcagataatcttgaccataaaactgccttacttgcacatttactcaaacaagaagaagttaaaaaatcgattgtttttgtacgtaaaagagagcgagtcagagagttagccgcagcattagaaaaacaaggtatcaaagccagctaccttgaaggcgaaatggctcaaacacaacgtaacgaagcgattaaacgtgtagagtctggcaaaatgcatgtgctgattgcgacagatgtggcgtctcgaggtcttgatttagaagatatcacccacgtctttaactttgacttaccgcgcacagctgatgtttatttgcaccgtattggccgtacaggtcgagcgggtcgtaaagggactgctatttcattagttgaagcacacgattatccgctacttggtaaaattagccgttatatccaagagccgattaaatatcgtgttgtagcccaattacgtccagtgactaaagcccctagtcaaaaagcatcatttaagccttctaaaaaagtattagcaaaacgcaaagcgaaaaaagtagaagagaaaaaaaacgttaaagagaaagtacgcgcacgcgatcgtaaaaatattggtaaacgccgtaaaaccgctactgataaaaccaccatcactgcggaaaaaactaatcatataaaaacagagcaacaataa

SEQ ID NO: 294843 - DNA, 759 bp, Proteus mirabilis
atgaagcaaaagaaagtaaagaaagcaggtttacgcaaaggcgggtttacatttaaacaattttttgtcgctcatgataagtgtgaaatgaaagtgggtactgatggcgttttattaggtgcttgggcgcctatcactaaagcaaaaacggtgctcgatattggtacaggaagtggattaattgccttgatgttagcgcaacgtgccccgcaggttgagcgtattgatggtattgaacttgatgaagatgccgcattacaggcgcgtgaaaatgcgcaacaatcacagtggagttcgttaatccatatttatcatcatgatatttatcaatatgcgcaacaagcgccaactcgctatgatcttattgtgagtaatccaccctattttgagccagcggttgcatgccgtaaccaagagcgcgagcaagcccgttatacgaaaacattgacccatgaaggtttgcttgataatgcacaacagcttattacagatgaaggcctattttgtgtggtgttaccctatttaatcggtgaacagtttattgaaatctcacaaagaaaagggtggaatgtcgtacagcgagttaatattaaagatagtgcagataagccttaccatcgcatattgctagcctttcaaagacagtatcaaggcgaaactaaaccatgtaatattgaagagctgattatccgcaataatgacggtcattacacaacccagttccaatcttgggtcactgatttttatttatattattaa

SEQ ID NO: 294844 - DNA, 579 bp, Proteus mirabilis
atgagcgagcagttaacggaccaaatgttggtcgagaaggtacaactgggtgaccagaaagcgtttaacttgctagttatccgctatcagcacaaggtagcaagtctgatttcccgttatgtacctcagggtgatgtgccagatgttgcacaagaagcctttataaaagcctatcgagctattggatcattccgtggtgatagcgcattttatacatggctttatcgcatcgctgtgaatacagctaaaaattatctggtagcacaagggcggcgtccgccttcaaatgacttagatgcgagtgatgttgaaaattttgaaacatcaaacgcattaaaagaaatttcgaaccctgagaatttaatgttgtctgaagagttacggagagtagtttttcaaaccatagagtcgttacccgaagatttaagggttgctattacacttcgggaacttgacggcttaagctatgaagagatagccgttattatggattgccctgtaggtacagttcgttcacgtatttttagggcgcgagaagctattgataataaggttcaaccattaatacaagagttataa

SEQ ID NO: 294845 - DNA, 660 bp, Proteus mirabilis
atggctgaaccctcattcactgaagggtacttttacatgcaaaaagagaaactttctgcatttatggatggcgaagttcttgataaagaattaatgggatcgattgcccgtgatgaatctatgaaagaaacatggcaacgttaccacttagttcgtgatgcaatgcgtggtgatgtaggagaggttatccactttgatatcgcaagtcgcgtagcactcgctttagaaaatgagccagtccgcataagtcctgaacaacagcaagagcagcaacctgcgccttctcaatggcgtcagcactctttcttacaaaaattacgtccttgggctagccagttaacacaaattggtgttgctgcctgtgtgtcattagctgtcattgtgggtgttcagcaatataatggcaacaatagcgctgaggatttccaagttgatacgccggtgtttaatactcaacctattatggggaatggggcaccagtcagcttaaatttacaaagtgataatttaggccaaaaccaacaaacacgtctacaagagcgtaatcaacgccttggacttatgttgcaacaatatgagttagatcgccgtatctacaatgcaccacaagatgaagtgcctgtagcatcgcaaaacacaactcagcaacaggctcagtaa

SEQ ID NO: 294846 - DNA, 972 bp, Proteus mirabilis
atgaaaaaatcatggttatccgctttacttttagcgggttacctatcaataccaacacaagccttggcacaacctcaaataggaaatgccgaggctttgttgcaaaagatgggtaatacaacgcaaaccgctacttacgaattatcttttattaatatcaattctcaaggtattgttcctattcgttatcgtcatgcacttgtcgatggtaaacctgtggcacaattgatgcagatggatagcactcgtcgagaaatcgtgcaacgagggaatgaaatcagttattttgaaccaggtttagatgcgtttagtttgcgtaatgaacatatcgttgattatctccctgctatcatttatcaaaattttgctgaactcgctgagtattacaattttattgatgcgggaagaacgcatatcggcgacattccaagtcgtgttgttcgtgtgctatcaaaaaataatgaccgttatgaatatgtcttatttattgatgaagagagatatttgccattaagggttgatctgcttgataaaaataatgacgttattgaacaatttcgggtgatcaccgctaatcaaaataaagaaatcatcagtgagttagattcactcaataaagtgaatatgcccccgctattgttgatccccaaagccactcaagcactgaattacaattggcgtgtgacaacgttacctgaaggatttaaagaggtaaaacgtagcaatcatcaaattgctgaaaatgaatttagccaatctattttatatagtgacggcttattcgatttctctatttatgttaacaaaagtggtcagcaattaaattcccccgaacgtgataaagcattgagatatggccgtaatacaatttatacctatgataaagatggcaatgaaattacctttattggacaattgccatttataacagcacagaaaatcgtcaacagtgtggtgtttaccaaaaagtaa

SEQ ID NO: 294847 - DNA, 1470 bp, Proteus mirabilis
ttgacagggctaattaactttgcaaataacattttatggggatatgtacttatttacttactccttggtgtgggtatttatttcactattcgaacaggatttattcaaatccgccattttggtcatatgttttctattttaaaaaatagtcataagtcagataaatcaggtatctcttcattccaagctttatgcaccagtttagctgcacgtgttggaacaggtaacttaaccggtgtagcaattgcgctgaccgcaggtggccctggggccattttttggatgtgggtagttgcaattataggtatggcgacttccttaatagaaagtacattagcacagttgtataaaactaaagatgatgaaggtaactatcgcggtggccctgcttattatatgacaaaaggtctcaatatgcgttggatgggcgtattattcgccattttcctcatcattgccttcggacttgtttttaatgcggtacaagctaactcaatagcgcaagcagctgcatcagcatttaatttcgatccattatatgttggtattggactggtggtgatgagcggctttattatttttggcggtctacgttggattgcgcgtgttgctgagctggttgtacccattatggctatcgcctatttattattagcattttgggttgtcgcagatcattttgaacgtttacctgaagtgtttatgctaatttttaaaagcgcatttggtttacaggaagccgcagcaggggcaattggctatggtattagtcaagcgatgacccaaggtattcaacgcggcctattttctaatgaagcaggtatgggatctgcacctaatgccgccgcttctgcaacaccttacccacctcatccagcatcgcaaggttatattcagatgttaggggtatttatggataccttggtgatttgtagtgcgactgcagtgattattttatcttcaggtgtgttagataattatcaagatggtattaatggtattcagttaacccagctagcattatcgtcaactgtcggtggttgggggagtacttttattgctgttgcgatttttttctttgcctttacatcgattattgcaaattatgcctatgctgaaagtaatatgatttttttaggccgcaatcatatgacagggctattcttactcagatcagccgtactggcgatggtgatgtttggtgctttggctgaaatgccgttagtgtggaaaatggctgatctctcgatgggattgatggctgtcactaacttaattgccattattttactttcaggcgtcgctttgaagttaattaaagattataaccaacagcgacaagctggtgtattacccactttcaatattcgccaataccctgaattacaaaatgatatagagcaaggtatttgggataaagagcctttacctaatgaaccgttagtccgctgtgaaaaggtgaggcaataa

SEQ ID NO: 294848 - DNA, 885 bp, Proteus mirabilis
atgatctttagtcgctacagtctctttttacttgttactttggggttgctttcaggttgtgttcagcaacctcagcttattgataggggggattattttgcacaagttgttcccaataaccctgggcaagataatcgcgtaaaatttttagttatgcactacaccgccgttgacgataaagaatcgttaaaaacgttaacttcgggaaatgtaagcagtcattatttaattcctaccaaaccaaattatgttgatggtaagccggttgtgtttgctttagtgagtgaagataaaagagcatggcatgcaggactaagtcagtggggaaatagtgcaggtttgaatgatggttcaattggtattgagatagtgaattatggttataacgatcagggtacattaagagagtggttaccttataccgcagaacaactctcaaccattactatgatgatgaaagatattattcaacgctatggtattgaaccacaaaatgtagtcgggcatagtgatattgcaccacaacgcaaagttgatccagggccacttttcccatgggctgaattagcgaaacaaggaataggcgcttggccagatgatgaaacagttactttctatttagcgggaagagctgcatcggagcctgttgatattgctaattttcaaaccttgttagcgaagtatggttatcaaacaccaacaacagggatattagatcctgaaacgcaaaaagtggttagcgcatttcaaatgcattttagaccaagtgatattaaaggtattcctgatgcgcagtcagaagctattttaatggcgttaattgataaatatcgaactaagtggatacagccatcaactgagtcaataaaacattcagataattga

SEQ ID NO: 294849 - DNA, 1353 bp, Proteus mirabilis
atgctttcaacaaaagacatgctagtccttggaatgatggtttttgctcttttccttggcgctggtaatattattttccctccaatggcaggtttccaatctggaaaccaatggtttagtacgtcattaggatttttggttacaggtgtcttactcccttttttaaccttagtcaccgtagctattcgtggacgtggtgaacgcctttctatcgacttgccatcatggtttgcggtgttattttggattgcactttacctgattgtcggttctacctttgcaatgcctcgggtcacgaacaccgcctatgagatgggatttttacctcttggtcttattgaaaaaaatactacgacccatctgactttcgcattaatatttaacctattaagtatgttctttatgcttaaacaaggtacgatgatcagtgccatcggtaaattcatgaccccagcgctcttaatactcctggttgtcgttggtattgctgtggtggctaaaccgctttcccctattgaagagcctaccggcctttatgcggtaaatggcttcttctccggtattattgacggttatcaaaccatggatgtgctatctgctatggcttttggcgggatcgtcgcccgtgcgttatataccaaagggatcaccaatcctaaacaaattggttttatcaccataaaagcggggatgatttcggttttactcttagccgccctttatttatgtttgttctatttaggtgccacaagtcacgcagtatctgtttttgctgatccggcactaaatgccactaacggtggtcaaatcttctcacgctacgtagacgctttatttggctctgtcggtacttggttgatgggcgggattgttttattagccagtatgacaaccttagtcggggttactagtgctgcggcagactactttgcgacattccatcatcgtttaggctatcgcttctgggttgtagtatttacactgttaacgacgttagtctctacttttggtcttgataccttattacgtgtcactattcctgcattattaatgatttatccaacatcggtgacactagtcttactacaatttgttcgccataaactaaaatcaccgcgttttacttaccgctttacaatctgtgtcattgttttaatgagcctacttgacacattaaaacagttaaaatggctaaatggagatttattacaactatttagttacattccactgtctgagtatgggctaggttggttattaccgggtattattgcattcgcaatttcattactaattagtctcagttttaaagaaaccgacacagaaattgctacacctaatacagtaaaataa

SEQ ID NO: 294850 - DNA, 807 bp, Proteus mirabilis
atgagtattaagcttatcgttattgatttagatggaacgttactaaacgaacaacatgagatcacacctgaagtacatcaagcgatccaacatgctaaaaattctggagtgcatattgttcttgcatctgggcgatcttttaacggcatctctccctatttaaaagcactgaatcttgatacatctgataacttttgcattagcaataatggtagccaaattcaccaagcagaaaatggtgaaattatcaccgaagacttgctcaattttgaagattacctctattttgaagatctctcccgtgagataggtgttcactttcatgttttaagtgataataaaatttataccaccaatcgccatattagccattttacttgtcgtgaagcattcttaacgtggacacctctctattatcgccccttaagcgaaatgcaaagagatatgcgctttagtaaatttatgatcgttggtacacctacggtattagataacgcaatgcaatatttacctgctaatatctatcaacaatacagcatattacgtagcgctccttattttattgagatattaaataccgatgtcaataaaggaaacgcggtacaaaaaatagcagaacatttaaaaatcactccagagaaaataatgtgtattggcgatcaagataatgatttagcgatgttacagtatgcgggattgggtgttgcgatgggaaacgcccctgaagagatcaaaaaagtggcgaaatttattacattatctaataaagaacacggtgttgctgtcgctatcaataaatttatttaa

SEQ ID NO: 294851 - DNA, 387 bp, Proteus mirabilis
atgccacaagataatcatctcgcattagtttgcgcgctaagtaaatggattgaggagcatttaggtcgcgtaatacaccttgaagagctagcggcttactccggctattccctttggcatatgcagaaaatttttaaagaagtcacgggcacctctttaggaaagtatattcgccaacgccgtttagcgggggctatccatcttttacgcaccagtgaccgctcaatatttgatattgcattagatttcggctttggctcgcaatcacactttacttatatgtttcgtaaagagtatggcatcactccatttgactttaggcaaaatcaaaatatcgagttagagacaaaacagcccttacatttgcaatcactttgttgtgattag

SEQ ID NO: 294852 - DNA, 1383 bp, Proteus mirabilis
atggcgaaagagtcgcaacaagcagaattaaagcgcggtcttaaaaatcgacatatccagctgattgcgctgggtggggctgtcggcgctggtctgtttcttggtatcgcgcaaaccattaatatgactgggccatcagttatattaggctatgcgattggtggttttattgcgtttatgatcatgcgccaacttggtgaaatggttgccgaagagccggttgcgggttcatttagtcactttgccaataagtattgggggccatttgctggctttttatcaggttggaactactgggttatgtttattcttgtcggtatggctgaattaaccgccgcaggaaaatatattaattattggttacctgatattccggtgtgggtttcggtagcggtgttttttgttgctattaatttaattaacctaattaatgtcagaatgtatggtgaaaccgagttttggtttgccattataaaagttttggcgatcgttggtatgattttatttggtagctatttattggtcagtggtaatggtggtccgcaagcttctgtgagcaatttatgggagctaggtttcttccctcatggctttactgggtttatgtctgcattagctattgtgatgttctcatttgggggacttgagctggtggggatcaccgccgcagaagcagaaaatcctaaagtaagtattcccaaagcaactaaccaagttgtttatcgtattttgattttctatattggttcattaattgtactgctttctctttatccttggacccaagtggtgaaaggagaaagtcctttcgtacttattttccataatttagataattttgttgttgcccatattttaaatgcggtggttttaaccgcggcattatctgtctataacagtggcgtttattctaatagccggatgctgtacggtttagccaaacaaggcaatgcaccgcattcattatctaaggttaataaacgtggtgtacctgttatttctttggggttatctgcgatagccacatcactcgggatcttggttaactatttactccctgatcaagctttagagctattaatggcattagtggtaacaacattagtgcttaactggatcatgatctgtttagcaaacttaaaattccgtgcagctaaaattaaagagggtgtagagccttcatttaaagcactttggtatccttatggtaactatctgtgtttagcctttttatgtatgattttggtcattattctaatgatgccaaaaattaatatttccgttattttgatgccattttgggtaggcttgctctggataggttttaagatctcaagaactaaaaaatcgctgacaaccacacaagcaaggcaagatagttaa

SEQ ID NO: 294853 - DNA, 324 bp, Proteus mirabilis
atgggtaaatatcgttatgataatgagggtgattggcatggcttatatgctatggcctttatggattccaataatcgtgtacaacctattatgggctatggttttgaaaaaatgtggtatcccggtggagatagagagggttttcgcatgggggcgggctttaccttaagtgtgactgctcgtcatgagtataactatattcctatgccattacctctaccgctagtgtcagtcggttatggacacttatcattacaggcgacttatgtaccaggaacctataataacggtaatgttttatttgcttggttacgttggcagtga

SEQ ID NO: 294854 - DNA, 279 bp, Proteus mirabilis
  misc_feature (252)..(261): n is a, c, g, or t
atgtcatctacctattttcactctagcctattagcagctacactgttttcagttacgttaacagcacctgcttttgcttctgaaaatacgcaaaacacacctcagactattacgacaaaaaaacctcagccagcagagaacactttctcagaaaaaaatgaggaaagctattggggaaaatttaaacgtaatcttacccaaacttgggataatgaccaatataactactatttaccggtatggacttggcannnnnnnnnnggtatggacttggcataa

SEQ ID NO: 294855 - DNA, 645 bp, Proteus mirabilis
atgaaaaatgaaccatcgcaacaacaaaatggacaatcaatgccttatcttattcctgatgcagattttaatgcgaaattaaaaattcactctaaaaatatcgagcacacaaaagaatttcttgaacagggggttcaagattttgaattacctcaatataacattcccgtaggatatcgttttgtaaaatcattaaaacgaaatcaatatcgtttgatcacgacaacagttccttttgaaaccgtttatctggtagaagttatttttcgtaaagacattgtgtataccaaaactatatgtacacaagtcaaagtttggcgcacggttgctgcagaacatagtactgtgacccgagctattcctagggcattttttaattatttactcgaaaattataatatcgttgtctctgatgaagaacaaacgggcgctggtaaacgattctgggagacaatgattgactgggcttttaaagccaatttatacatttatatttctgatggaacagaagaagagcggcctcttattaaactaaataacactgatgaactttatgaaaaatgggaagatttttgctgggaaaaagatcgcgatattcatactcatcgactattagttattagtaaagaaccgttatctcaataa

SEQ ID NO: 294856 - DNA, 798 bp, Proteus mirabilis
gtgagatataacgcattgtctatcgccggcaccgatccgagtggtggggcggggatacaggctgatctgaaaacattttccgcactgggtgtatatggcacaacagtcatgactgcactggtagcgcaaaatacctgtggtgtacactctgtctatgatttatcccctgattttgtcgcagcacaattagatgcggtactttctgatgtcagaatagatagcgctaaaattggtatgctttctaatgccagtattattgatgtcgtttgcgataaactgcaacaatatcccattccttttgtcgtacttgatactgttatgcttgccaaaagtggcgatccactgttacaacctgatgctattgataaaatgttcactcagttattaccccgcgttgatttgatcacgccaaatctgcctgaggcggcagcactattaggttgtgatatcgcgacagatgaaacaactatgaaacaacaaggtgaagcattactttatcaaggttgtcaggcggtattgatgaaagggggccatttaagcgagaaagaaagtcctgattggttattgacccaagatgggcaatggcgatttacttcaccgcgcatcaatacaaaaaatactcacggtacgggatgcacactttcagccgctttagctgctattcgtcctcaagtttctgattggcaaagttgtgttgaacaagcaaaagcctatttacagcaagcgttagaacaggcagacagtttagaggtgggacaaggtttcggccctgtacatcattttcatcgctggtggtga

SEQ ID NO: 294857 - DNA, 1050 bp, Proteus mirabilis
atgactgatatagtaagtttgttaggtgctgatgctaactcattattggaacatcgctgccaaaccatcccaagcgaaaatctctacctgccaggttctgactttgttgatcgtgtgatgattgataacaatcgccctaataccgtattgcgttctatgcaaaccctgtttaaccatggtcgtttagcaggaacgggttatctttctattttacctgtcgatcagggtgttgaacactctgccgctgcctcatttgccgcgaacccactctattttgatcccaaaaatattgttgagcttgcgattgaagccggatgtaactgtgttgcttccacctatggtgttctggcttctgtttctcgtcgttatgcacacaaaatcccatttttggtaaaacttaatcataacgaaacattaagctatccaactcaatacgaccaaacgctgtatgccagtgttgaacaagcctttgaaatgggcgctgttgctgtaggtgcgactatctattttggttctccagaaagccgccgccaaatcgaagagatctcgatggcatttgaacgtgcccatgaattaggcatggttaccgtattatgggcatatttacgtaatccagcctttaagaaagatggggttgattaccatgcaagtgctgatttaacaggtcaagccaaccatttagcatcaaccattggtgccgatattgttaaacagaaaatggctgaaaataacggtggctttaaagcgattggttttggtcatactgatgagcgtgtttacactaaactgacgagcgaaaaccccattgatttagtgcgttaccaattagctaactgctatatgggacgtgcaggattaattaactcaggtggagcatcgggtaataacgatcttgctgatgcagtacgtactgcagtcattaataaacgtgctgggggcatggggcttatcttaggtcgtaaagcctttaagaaatccatgaaagacggtgttgctctaattaatgccgtacaagatgtctatttagataaatctgtgactattgcttaa

SEQ ID NO: 294858 - DNA, 894 bp, Proteus mirabilis
atgggccaaatcagtttgctgattatcaatggaaaaaactcaggcaatgaggctctgcgacaagcggtttatcaacaacgcaaggaaggtaatgatatccaagtcagagtgacatgggaatcaagtgatattcaacgctttgtgcaagaagcactacatattcaagcgcaaaccattatcgccgcagggggtgatggtacgatcaacaatgtcgcctctgagctggttcgtttagccccctcttcgccccccgcgttaggcattatccctttagggactgcaaatgattttgccaccagtgcacaaatcccattagagatggacaaagcgctcagtttagcgattaaaggtcgcgccgttcctgtcgatattattaatgtgaacaaaacacattactttatcaatatggcctcaggtggctttggcaccaagatcaccactgaaacccctgaagcactaaaatccgccttaggtggtgctgcatattttattaatggtttattgcgtattgataccttaaaagcggatcaatgcaccgttgaagctgaaaattttcattggaaaggtgaagctttaattatcggtattggtaatggacgccaagcgggaggtggacaacaactttgccccgaagcactgattaatgacaataaactcaatattacccttgttgaagcccgtgaattgcttccttctctattaaccagtctgttcgatcgtaagaaaaatgacaaaattattgagcgagaaagtgattgggtcactattagtgcggctcatgaaatggtatttaatttagatggtgaaccccttttaggggataaatttgaatttattgtactacctgaagcgatccactgccggttaccgccccaatgtgacttgttatcttaa

SEQ ID NO: 294859 - DNA, 1380 bp, Proteus mirabilis
atgtttacacccgaattgctctctcctgcaggctcattaaaaaatatgcgctatgcattcgcttatggcgcagacgcggtctatgcaggtcagcctcgctatagtttacgcgtacgtaataatgagtttaatcacgaaaaccttgctaaaggaatacaagaagcgcatgaattaggtaaacgcttctatgttgtggttaacatcgccccccataatgcaaaattaaaaacctttatccgtgacttaaaaccagttattgatatggggcctgatgcgctgattatgtctgatccgggtttgatcatgatggtgcgtgaagctttccctgatatggatatccacctttcagtacaagctaacgccgttaactgggctaccgtaaaattctggcgtcaaatgggcttaactcgcgtcattctttctcgtgagctatctattgacgaaattgcagaaattcgtaaacaagtccctgatatggagcttgaagtcttcgttcacggggccttgtgtatggcttattcgggtcgttgcttattatcaggctatatcaataaacgtgatccaaaccaaggtacatgcacaaatgcctgccgttgggaatacaaagttgaagaaggcaaagaagatgaagtggggaatatcgtcgagaagtaccaacctatcccggtaaaaaatgttgagccaacgttaggtgtaggtgcccccactgataaagtgttcttaattgaagaagctaaacgtccgggtgaatatatgacggcgttcgaagatgaacacggtacttatattatgaactcaaaagatctgcgcgctatcgaacacgttgagcagttaactaagatgggtgtacattcactgaaaattgaaggtcgtactaaatctttctattattgcgcacgcacagcacagatgtatcgccgtgctattgatgatgctgttgcaggtaagcctttcgatccgacactgctgacaacgctagaaggtttggcacaccgcggttataccgaaggttttttacgtcgccatacccatgatgcctaccaaacctatgaatacggctattctgtatcagatacacaacagtttgtaggggaatttacaggtaaacgtgttaacggtttagctgaagtggatgttaaaaataaatttatcttaggtgatagcttagagctaatgacaccaacaggaaatattcaattcactttagatgcgttatttaataaaaaacaacagccgacagatgttgctccgggtaatggccatgtggtttatttacctgttcctgacgatgttgatttaaactttgcactgcttattcgtaatctgccaggaacgacaacccgtcaacctcataaaattgatgcggtagaagtgaagtaa

SEQ ID NO: 294860 - DNA, 708 bp, Proteus mirabilis
atgaccacgaccacatctacatattcaattttaatcgttgaagatgagccgaaattggcacaattacttattgattatcttcaagcatctgattatcaaacgcagtggctggcagatggtactgaggttatacaacatatcaaacaatctcattacgatttagtcctgcttgatctgatgctaccgggtaaagatggtattaccctatgcaaagagttacgtcagttctccgatattcctattattatggtcaccgcaaaaacagaagaagtagaccgactattagggttggaaattggtgctgatgactatatttgcaaaccttatagccctcgagaagtggttgcccgtgtaaaaacattattgcgtcgctattatcggccacaggatattgtgcaaaatagcgccttagttattattgatgagcaggcttaccaaattcaatatcataataaaattcttgatttaactaccgctgaatttcgtcttattaaagcattagctacacaaccgggcaaagtgttaagccgtgaccagttaatggatcatctgtatgatgattatcgcatcgtaaccgaccgtactattgatagccatataaaaaacttacggcgcaaacttgagcaacttaacgatcaaattgaatttattcgttcaatttatggacaaggctatcgttgggaaaccgcagcctatcgttttcgatga

SEQ ID NO: 294861 - DNA, 1377 bp, Proteus mirabilis
atgaaactaagaagtaagctatttttggtgatcttcgcgacttgcatgatagtggtatttgctatgcatatcggtattcgtagtagcttccagcaggggtttattggctatatcaagaagaacagtgaacagcgggcaaccttgttagccgaagcgttaagcgatcaatatcaattaaccggagattggcgttttctcaatcgagatgatcgctctatttatcagatactacgaaccattgaccaaataagtcaaagtggtgaaggccctgccccccgaggatggcgtactcagttttggatcgtcgataaacagatgaaacgcttatttggccatgataatcaatttcccgcagaaacctttaaaaaacctattacttatcatgatgaaattgtcggctgggtgattgtcagtgcagcggacaaaatcagcaacgaagcagatattagctttgataagcaacagttacgaaccagttggatcattgccggcttaacggtgctttttgcgctattaattacgttaatactgtcacgcagcatgatccgcccagtaaagcgattagtggaggcaacccataaattagccgctggcgattttgctgttcgcgtgaccccaaccaataaagatgaaatcagccagctagcaacggattttaatcaacttgccagtacactggaaaaaaatgagcaaattcgccgtgattatatggcagatatctcccatgagttacgtacgccattggctatcttaaaaggagagcttgaagcgttacaagatggtgtaagaaagccaacagcagaaacgttaaattcattactctttgaagtaacaaatttaactaaactggtaaacgatctacatcagctatcattatctgatagaggctctttgacctatcgtaaggattttattgatattaatgaaattattttgttagctgtcgcctcttatcggcatatttatcaagccaaagagattgctttacagactgatttagatgataacgtcaaactgattgtacaagctgatccggataggttgatccaactttttcataatctattagaaaacagtgttcgttataccaattctggtggtcaattgcatattagtagcaaaagagaacataataatgtgttgattgtgtgggaagatagtgccccggggctagataaagcacaatatgaagcggtattccaacgtttttatcgggccgaaagctctcgtaatcgttccagcggtggctctggtttggggcttgcgatttgcgaaaatattgtcgaagctcataatggtaaaattacggctatgccatccgctatcggtggagtaaaaatacttatcgtattacctgtctattctgaagataattaa

SEQ ID NO: 294862 - DNA, 3084 bp, Proteus mirabilis
atgaagctgtttgctctatttattcaacgacctgttgctactacactacttagcctagccatttctctttgtggtgcgttaggttttatgttgttacctgtcgcaccactgccacaagttgattatccggtcattaatatttatgcctcattaccgggggcatcacctgaaacgatggcttcttctgttgccactccccttgaacgctccttagggcgtattgcggggattgatgagatgacgtcaagtagtgctttaggtagtaccagtatcacattagtatttgacttaaataaagatattaataccgcagctagagatgtacaggctgcgttaaatacctcacaaagcctattaccttcaggtatgccaagtcgcccgcgttattacaaatcaaatccttctgatgcaccgattatgatcttaacgctgacctcagagacacaaaataccggtgagctttatgatctcgcatcaacacgcttggcacaaaaaatttcgcaaattgaaggagtaagtgaagtttccgtagggggaggttcattgccggctgtgcgtgttgcactcaatcctgatgcgctatttaatcaaaatgtcagtcttgatgatgtacgcaaagccattagtcaatccaatgtcagaagaccacaaggctttattcataatgatgaaaatcgttggcagatacaaactaacgatgagttaagcaaagctcaagattatcgcccaattattgtgcattataatcaagatgctatcgtgcgtttaagtgatgttgcccaagtgacagactctgtacaaaacgcacgggcggcaggaatgagtggtggtgaaccggctattttactggttattcgccgtgaagcaggcgccaatatcatcgaaactgtcaaccgcattcgtgatgaactccccgaattacgtgagctactccctgccagtgtcaatttaaaggtagctcaagatagaacccccactattcgtgcctcattagcagaagttgaacgcgcattagcgattgccgtggcactggttattttagtggtattcttatttctacgttcagggcgtgctaccttgatccccgctgttgccgtacccgtttcattaattggtactttttcagccatgtatttatgtggctttagcttaaacaatctatcattaatggcattaacggttgcaaccggctttgtcgtggatgatgcgattgtcgtactcgaaaatatctctcgccatatcgaaaatggcttaaaacctaaacaagccgccctaaaaggggttagcgaagtgggctttacggtactttcaatgagtatttcattggtggcggtatttattcctctcttgttgatggatggccttgtcggacgactttttaaagagtttgccattaccttaaccaccgcgattgggatctctttatttgtctccttaacattaaccccaatgatgtgtgcccatttattaaaaggcataaaacccaaagcacagtcacatttacgcggatttggtaagttaatttttcgcttacaacaaggttacagtgtcacactacaagcggcattacggcataaacgctggatcatggctatttttattaccaccttaggactgaatgcttatttatatatcagtgcgccgaaaaccttttttccagatcaagataccggtcgtttaatgggatttgtacgtgcagaccaaagtatttcattccaatcgatgaaagaaaaaatgacccgttttatgcaggagattaatgcagataaagatgttgatagcgtcacgggatttacgggaggaggacgtattaatagtggatttatgtttatttcacttaatccgctctcagagcgcacagatagtgcaaatcaagtgatcaatcgccttcgtatcaaactggctaatgaacccggtgcaacactatttttaatgcctgtacaagatgtacgtgctggaggacgccaagctaatgccagttatcagtttactttactcgctgatgatttaagtgaattacgtaaatgggagccattaatacgtaaagcgttaggcgaattacctgagctggttgatgtcaactcagataaagaagataaaggtgccgaaatggcactcacttatgatcgcgatactatgtcgcaattaggcattaatgtcagtgatgccaataatttattaaataacgcctttgggcagcggcagatctctaccatttatgccccgctaaatcagtataaagtcgtgatggaagtgtctgaacaatatacgcaagatgtttctgcactggataaaatgtatgtgatgaatacacaaggtgaacgtattccattatctgcatttgccagttggtatcccgctaatgcacctttaagtgttaatcaccaagggttgtctgccgcctctaccatcgcttttaatgtgccagagggctataccttatctgatgccattaacgccattgagcgaaccatgacagagttaggtgtacctaacacggtacgaggcacctttgcgggtacagcgcaaatttttcaagaaaccattaagtcacagcttatcttgatcttagcggctattgtcaccgtctatattgtccttggtgtgctttatgagagctatattcatccattgactattttatccacattgccttctgccggtgttggcgcattattagcactgcgcttgtttgataccccctttagcttaattgctcttattggcattatgttgttaattggtattgtgaagaaaaatgccattattatggtggattttgcgattacggctcaacgagaaggaaaactatccgctcaagaagcgattattcaagccagtttattgcgtttccgccctattattatgactaccttagccgcgctctttggcgctttacctctgatgctaagtagtggtgatggtgcggaattaaggcagccattaggcattaccattgtgggtggcttgcttatgagccaattattaaccctgtataccactccgattatctatctgttttttgatggtgttcgccaacgttggcaacagcgacgccataacaaaaaagaggcaaatgcatga

SEQ ID NO: 294863 - DNA, 3132 bp, Proteus mirabilis
atgagcgaaaaaatccccgctacaggtggtgggccatctcgtttatttattttacgtccagtggcaacaacgctgtttatggtcgcgattttattagcaggaattgtcggttatcgtatgctgccagtgtcggcattacctgaagttgattatccgaccattcaagtcgtcacactctatcctggggcaaaccccgaggtgatgacctctgcggtaacagcaccgttagagcgtcaatttggacagatgtcaggcttaaaacagatgtcctcacaaagttcaggtggggcatcagtcattacattgatgttccaactcacattaccgttagatgtcgcagagcaagaagtacaagcggccattaatgcagcaactaacttattacctactgatttaccttatccgcccatttacagcaaagtaaatccggctgatccgccagtgctaaccttagccgtcaccagttctgtattgccgatgacacagctacaggatatggtagaaacgcgaatatcgcagaaaatatcgcaagttaacggcgttggtttagtctctttagccggcggacaacgccctgctgtgcgcgtaaaattgaatgcccaagcagccgcctcttatgggttagatagtgaaacaatccgcgtggctattaataatgccaatgttaactctgccaaaggtagccttgatggccccactcgctcggtaacgttatccgccaacgatcaaatgaaatcattagatgattatcgcaaactgattgttagctataaaaatggcgcccccatccgccttgccgatattgccaccattgaacaagccccagaaaataaccagcttggtgcttgggccaataatcaacaagccattattatcaatgtgcaacgccaaccgggtgttaatgttattgaaacaacagataatattcgtaatttattaccggatttagtgtctaatttgcctaagtcggtaaatgttgagatcttaaccgatagaaccacgaccattcgggcatcagtgaaagatgtccagtttgaactgggactggcgattgcacttgtggtcatggttatctatctatttttacgtaatggtgttgccactcttattcctagcattgccgtccccctctccttagtgggtacttttgcggtgatgtatttttgcggtttttctgtcaataacctcaccttaatggcacttaccattgcgacaggctttgtggttgatgacgccattgtggtgatagaaaatatctcccgttatctagagcgaggagataagccgttaaccgcagctttaaaaggggcgggagaaatcggctttactattatctcactgactttttctttaattgccgtactgatccctctgttatttatgggagatattgttggtcgtttatttagagagtttgccattaccttagccgtggcgattttaatttccgcggtagtctctttaaccttaacgccgatgatgtgcgcacgcttacttaaaccagaaagtcaaattaagcacaatcgttttgaaatggcttgtgagcgcttttttgaaaagatgatcgccgtgtatgcggtttggttaaaacgtgtattaaatcatcaatggataacattaggcgttgccctcagtacattagcactaacagttttgctctatctatttatccctaaaggctttttccctttacaagataatgggttactacaaggtacaatagaaacctcacaatccatctcttatcaagcgatggttgaaaaacaacaacaagtggttgagaaactgattgacgatccggccgttgagaatattgcgagttttgtgggtatcgatggcagtaatgccaccctcaatacaggtcgcttgcaaattaccttaaaacccctcgatcaacgtgattcacgcattgatgaaattattcctcgtttacaagcacgagtcgcatctattgcaggtattacactctatttacaacccacacaagacttaactattgatacacaagtttcccgtactcaatatcaatttaccttgcaagcaacctcgctcgatgagcttgcctattgggtgcctaaattatcacaggcactacaagagagtccggaacttaccgacatcagcagtgattggcaagctgatgggatgatggcctatatcaatgtagatagagattcagccagtcgcttagggatctcaatgagtgccattgataatgcgctgtataatgcctttggacagcgacttatttcaacgatttacacccaagcaaatcagtatcgtgttgtcttagaacagaatatgcacaatagtgaaggactacaggcactttctgcagttcatttaaccggcaaagagggtgctatggtgccactcttatctattgcctctgtggagcaacgtctcgcgcctttatctatcaatcaccaagagcaatttcctgctaccacattctcatttaatgtcgctaaagacgcatctcttgaagccgctgttaatgccgttaagcaagcagaagagcaaattgcgatgccaaaagatattacgacacagtttcaaggggctacattagcctttgaaagcgccctttccagcacgctgtggcttatcattgcggccatcgttgctatgtatattgtattaggcgtgttatacgaaagttttattcacccaattactattttatctaccctacctactgcgggtgtcggtgctttattggcactgatggcagccggtaatgagctagatattattgcgattattggcatcattttgttgattggtattgttaagaaaaatgccatcatgatgatcgatttcgcactggccgctgaaagagaacaaggactatctccttacgaagcaatttatcaagcttgtctgctacgttttcgccctattttaatgaccactatggctgcgttattaggtgcattacctttaatgctaagcactggcgtaggggctgaattacgccaaccattaggtgtatgtatggtggggggcttaattatgagtcaaatactcaccttatttaccacccctgttatctatttgctgtttgataagttatcactttaccttaatcgccataaacgcgttgaacatgataatggagcggtgtcatga

SEQ ID NO: 294864 - DNA, 1236 bp, Proteus mirabilis
atgaataacaacaaaaagaccaaaaaaagattttctcttattatcaccctgcttattgttatcgctggcgctatcgcctattggcaatactcttcaaacaacagcgcacctcctgtgagtaaagatacccctactgcgaatacaccaaatagaagtacagctggctcaagacgaccaccgatgcctcctgtacaagtggcgacatctgcacaagaagatgtgccgcaatttttaactgctttaggtacagtgaaagccgtcaatagtgtgaccgtgacaagccgtgtggaagggcaattaatggcgttgcatttcaccgaaggccaacaagtgaatcaaggcgatttgttagcagaaatcgacccacgtccttttgaagtgcaattagcgcaagctaaagggcaattggcaaaagatcaggccacactggcaaatgcgcgccttgatttagctcgctaccaaaaactggcaaagacccatttggtttcacaacaagaattagacaaccaagcggctttagtcaaacagtctgaagccagtattagtatcgataaagcagcaattaataatgcacaattacaattaacctatagcaaaataacggcccctatttcaggacgggtgggattaaagcaggttgatgtcggtaactatatttctggtggctcatctacgccaattgtcgttattaaccagatggatcctgttgatgtactctttacattaccagagcaagatctatcacaggttatcttagcccgtaaaaatagccctacattacctgttattgcattagacagaaataataaaattgaattagcacaaggggcactatttagtgttgataatcaaattgatgccactacagggactatcaaattaaaagcccgttttcctcaacaagaaagtacgctatttcccaatcaatttgtcaatattcgtttatatgtcactacattagaaaaagcggtagtgatccccaatgcagcattacaaatgggaaatgaaggacactttgtttgggtcgttgatgaggaaaataaagtcagcaaactcgctgttgaggttgcatcacaaaatgcagataaagttgtcattgcctcagggttatccgctaatcaacgtgttgtcaccgatggtgtggatagattaacgcaaggtgccaaagtcgagattgtaacaccgctggcacctaaagctaaaaccacagatcccgttgttgcggagaaagcataa

SEQ ID NO: 294865 - DNA, 1467 bp, Proteus mirabilis
gtgtcaactgcaaacacacctgaagatgaacagaaaccgagtctgaatgcgtttaaacagcctcgtgcattttatctcatcttctcaatcgaattatgggaacgttttggatattacggcttacaagggatcatggccgtttatctggttaaaatgctgggtatgagtgaggcggaagctatcactgtttttgccgcatttaccgcattagtttatggctttgtggcaattggtggctggcttggcgataaaattctcgggacaaaaagggttattgtcctaggggctattgtgctggcaattggttatgccatggttgctttctccgatcatgataaagatatgatttactggggattagccactattgcggtgggtaatggtttatttaaagccaatccttcctctttattagccacctgttatgagaaagatgatccacaattagatggtgcatttaccatgtactatatgtcgattaatgtgggatcatttttatccatgttagcgacaccatggttagcggcgaattatggttgggatgtcgctttcgcattaagtgtggtggggatgttgatcacactggcaaactttatgctatgtcgcggttggatcaaagataaaggctctaggcctgactttgagccactaaactacctgaaactgttattaacgctggtggggattgttgctttaacggcagtatcaacgtggttattacataataatgaagtggcaacatggtctttagcgattatttcattaggtattatcctgatttttgcccgtgaaacttttatgatgaaaggggttgcacggcgtaaaatgatcgtcgctttcttactgatggtggaagccgtggtattttttgttctttatgatcaaatgccaacatcattaaacttttttgctatccataatgttgaacacgctattttaggctttagtgttgagccagagcaatttcaatcacttaacccattttggatcatgctagctagtccattattggctgctatatataactttatgggtgataaattacccatgccttataaattcacagtgggaatgtttttgagtgcaactgcattcttagtattaccattgggggcaagtatggcaaatgaagccggtatcgtttcatcatggtggcttgttgccagttatggctttcaaagtattggtgagctgatgatctcaggattaggtcttgcgatggtggcccaactagtgccacagcgtttaatgggctttattatgggcgcatggttcttaacatctgcggcagctgcaattattgctggtaaagtggcaagcttaatggccgttcctgaagacgtacaaaatgcacacgcatcattagaaatttatagcagtgtatttttacaaataggtatcgtaacaggtgttattgcactgttaatgctatttactgcccctatgctgagtaaaatgacacagtaa

SEQ ID NO: 294866 - DNA, 630 bp, Proteus mirabilis
atgaacagcgtaatacaaaaacgaacatcacaacaattatcggtagagagagtggctgttctagaaagaatgactgttcttacaaaagaattggttaatgaattagcagagaagaaaagtttagcaagtgctttaaaaatgagtgataacgaattggctcagttaatttttgaaactcaactgatacgttcgtctgcaatttcaccaagagaacaacgtaaaatagcccgtttaaacgaaggcgctattaagttttctgaacggctaaaagagcttggaggcacatgtagagctagccaagctgcagctattttgggagtaaaacgtcaaacgattaataatcggttaaaggctaataaactattagcggttaaagtgggaggagaatatcgattacctatttttcaatttgatggtaatcgattagtggatggattagatgagatcttaattttattggatagtttaagctcaacaacaaaagtatcatttttaacgagtatgtatttttttgaggatgaacaagatattaatgttattgatgcgcttaaaaaatatggacgcatgagtgaacaaatgcaagaaattattcatcaagctaaactttttggaaaacatatttcaaactaa

SEQ ID NO: 294867 - DNA, 681 bp, Proteus mirabilis
atggttaacaaaaaaaatttgcataaagaattggcacaattagaagccgaaggtcatatcccctataaaatccaagaggaaaaccagcaaaaaagatggcaatggaaacattacacgtcaggagtgcactattttgcacctacagatccattagaaatgggtcgctacaatgatccaacaggcataacgggaatatgctataccgctgattatgcagttgtagctattgctgaatcattaggacgtcactatcaacataataaggcttttattttaggtcttagtgatctaaaaaaagctcagatatacacacttgcaactacacgtaaaacaaaacttattgatataccaaagttacagggcatattgcatatcactgcagaccaagtcatggggaaaagttatgacattactcagaatattgttgattgggcagccaataccccagggcttgattatgatggtataacctactcttcaaggcattactatggaatgtgtacagccttttggtgtagaaaacatattatccctcctcttgttgatatttctcactgctcccttgatttatacacagattgtaaaaaagaaaattttccgcaaaattggccctatctagacattacaggacttgagatcattactgaaacattacattttaagatcaacgataatgagtag

SEQ ID NO: 294868 - DNA, 1374 bp, Proteus mirabilis
atgacatcacaatcacactccactcagccgttgagtcaacctacggcaagacctttaaaccgcaacgactataaaacgttgggtttatcctcactaggaggaacattggagttctatgatttcgtgatcttcgtgttctttacgaaaacattgagccatttattctttcctggtgataacgcttttatcgctcagatgcagacattaggtatttttgctgccggttatcttgctcgtcctttaggtggcatcattatggctcactatggcgatattatcggccgtaaacgtatgtttaccttaagtatctttttaatggctgtacctactttggtgattggcttattacctacctatgccagcatcggtgtggctgcaccgttattactgttattgatgcgtattatgcaaggggcggctatcggtggtgaaatgcccggggcttgggtatttattgccgaacacaccccgaaacagcgttatggcttaggggtgggtaccttaacatccggtattactggtggcatcttattaggctctatcgtcgctattattgtacaacgcagctatagcgctcaagaagtgaatgattttgcatggcgaattccctttattttaggtggtatatttggcttgatctcggtttatttacgtcgttttttacaagaaacacctatctttaaagagatggcggctaaaaaagccttagcacaagaaatgccggtggtttcggttatcaaaaaccataaacaagcctgcttaattactgcagcattaacatggtctttatctacagctattgttgttactattttgatgacacccagtgtcattgttgaagggatctacaaaatagacagaacaacatcgttagaagcgaactgtgttgccaccttaacgctgaccttaggatgtatcttctggggctggttgggtgataaattaggaacccgtgcatccatgaccttatcatggggtggattaattgttaccgcattccatttttatggaagcttagatgccaatatgtctggtatccaattagcatttaactatggtttgatgggcttttttgtcggtgcaattgccacaacgccaattgtgagtactagagcatttcctccttcaattcgtttttctggcctctcttttgcttataatatggcctatgccgtatttggtggcttaacgccaatgttaacgggcgcttggttggaaaaaacggcaatggcaggagcttattatgttgcagctgtttctgcattagccattgttatcgcattcttacctttagcttataaaggctggatcgcgataaacaccagctcacgggaaaaagagatagcgttgcaagttgataaagtcgctagttaa

SEQ ID NO: 294869 - DNA, 303 bp, Proteus mirabilis
atgaaatataatacagtaaacataaatgttcgtgttggttcatttattcgaagacataggacactactaggtatctcagggaaaagcctaggaaaaaaattaaatctttcccaacaacatatttctcgattagaacgaggacaaacaaattttacaatcgaaattattttatatttattaaatgaattggataagacaatatttgatttagttgctgaggtattttatgaagatcccggtgaaattttaactgaataccagcgtcaacaacaattcaatactgaattaacactaataaactag

SEQ ID NO: 294870 - DNA, 1083 bp, Proteus mirabilis
atgagcgaaaatagagcgtctaaacaacactcaagtaaaacaacaaaagcaagggtagtgaaggaatatcagcgacagatacttcgtcgtttcttttacttaatgatattagggggcgtgttatgtagcgttttgatccttgattttactttagggccttcaggattatcgctgactgaactgtggaatacactaatatcgccagaaattgccgatgctggtactcgggttattgtgtgggatatcaggctaccttactcccttatggcggttgtcgttggaatgtcactcgggttagcgggtgctgaaatgcaaactatactcaataacccgctggcaagtccctttacgcttggcgtctcttctgccgctgcttttggtgctgctttagcgattgttttagggattggtattccgggggttcctgctcagtggtttatttcagttaatgcgtttgtttttgcattattggcaacgttgttactggactttatctcacgttggatgcgagtttctacctctggaattattctctttggcatagcgttagtgtttacttttaatgctgccgtttccattatgcaatttatcgctaacgaagatacgcttcagggattagtgttctggacaatgggtagccttaatcgggcatcgtgggataagttatacattttattggttgtattagtgattatcttccccttgtcattgatgaatgcttggaaactgacggcacttcgtctaggggaagatcgtgcgatgagctttgggatcaacgtcagacgcttacgcctaacaacattacttcgtattagcatcatttctgccttggcggtggcatttgttggcccaataggttttattggattagtcgcacctcatattgctcggatgacttttggcgaagatcatcgtttttatttgcccgcaagtgcccttattggcgcattggtattatcaatagcttctttagtctccaaaaactttttatctggtgtgattattccggtgggaattgtgacttctcttgtgggtatccctttctttgttagtatcattttgcgtcatcgcgggagaatataa

SEQ ID NO: 294871 - DNA, 795 bp, Proteus mirabilis
atgaacacgggattgaatgctgggttgcgtattgaaaagctttctacgggatattcgaagcgagaaatcattaaagaattaacggtctcactgcttccacgagggaaaattactgttcttttggggcctaatggcagtggtaaatcgacgttgttaagggcacttgctgggcttaatagcgcacaaggaaagctttttcttggtgatgatgaattactctccctctctttttctaaacgagcagagcaggtggtttatttgccacaaactctacctgcgggcgttcatttgagtgtcttggagtcaattctggttgcaagacgagctttaggtgaacatcgttctcatttagcgaatgatgaagttatagatctattagaacaactgggaatttcacatttagctatgcgatatcttgatgagttatccggtggacagaaacaattggtggggcttgctcaatcactaattcgacgaccaagtttattattgctagatgaaccactcagcgcactcgatcttaattatcagtttcatgtgatggaattaatcgcaagagaaaccaagaaacgtaatatgattactgtggttattgttcacgatattaatattgcattacgccatggaaagtatgtattaatgcttaaaaatggggagttagttgccaatggtttaccaactgaggtgatcacaccagaaatactcgccgatgtttatcgcgttagcacccgtattgaacgatgctctagaggccatccccaggtattaattgatggaatgataaatgatatatag

SEQ ID NO: 294872 - DNA, 837 bp, Proteus mirabilis
atgaacgaagagattagctatctgtttgtccctgctaataaaaaagttatgatttccaaagcgttaacttatggtgcaaatgcgatcattcttgatcttgaagatgcggttcatcctgatgaaaaaccgctcggacgtgacaacattcaaaattggctaacgacaataaataacaccatcattaacaccagtatatatatcagaataaatcatcctaaagagaaagaatttaaaaacgatgttgatctattaaattcattaaatgaaacgctaatgacaggagtaatgatcccaaaactggaagatgcggaaatactttcctatataaaatcaaaacttcatctggctatatcaaagcgaccatttataggcattatagaaacagcgcgtggagtgcaccattgtgaagagattgccaatagtggtgtaacgagattagcattcggctcattagattactcactagatattgattgccaacaaacagcagaagcgttgctatacgcaagaagccgaatcgttatcgcttcacgcattgccaaccttatctcccctattgactgtgtcacccctgaattttgcacacctaatacattattaatggatgccaaccatgctcgcgctcttgggtttggcgctaaactctgtattcatccagatcaaatagatactgttaataaggcatttaaacctactgaggaaaaaattaaatgggcgcaagaagtggttaagcaatcaacagccagttatgcttttcagattaatggggagatgattgatttacctttaataaaacaagccacccgtattatcaatggtaaatataaaccaaattga

SEQ ID NO: 294873 - DNA, 1881 bp, Proteus mirabilis
atggagacggtagagaaaaagagtattgcagggcaacaaactgctatacaaacagatttttcaacacgtaatgcccttgctcgtatcattcgctgtctttttgcagaaaaattattggatgataataaactgcaagtttttaatgatgaaaataacgttaagtacccgctttctgatgggatacatatccttcaatttaatcaaacgaccgtttttcctgcaaataccgttattaatcgcggtgatattatccttaaatcaatggatgggcgccaccgaatggtgcaatcccatgaagaactcatggagatactgaaaaacgagcttagtttcacccctacaacggagggaataacaaaattcaataaagatgtagcaaacagtatccataatgatcgattagctagagcacatcggtcaaagtggcgggatacgatttctaatgagatggcacaagagggaacatcttgttttattgaatggataacacgtcattacagtcggcgtgatggtgcaacttttctcgatcagtggggcgctcttgaaggtcattcttattacccaacttggaagtctagacccggtttaagcgatgatgatattgtcgcactatcagctgaatttggtgcacgagttaatctgcgtatcgcagccatacaaaccgatatggtttattgtgagaagatgccccatattcaggatatccatcaatggttttcatcggcttttccaaccgtttggaataaatggtgtgagtggcttacaagtcaacaccaaaacccacaaaaatggttacctattcctctgcatccttggcatcttgaacactggatcattgcgcatttctcaaaagaaatagatgaaggcattcttctaccattaggccctcaacttgagaccgcggcatccatgtcgtttagaaccatgcttcctaccgcatctagatcaccctttatcaaattacctgttgctatctggatgactagcgaaatgcgcagccttcaagccaaatctattcatatggggccacgtattagtacgattattgaggatattttgcgggtggataaggattttgatggcaagctggactttttccgagaagaagtggcgtggcattttcgtcataacgtgcgtatggatgacgccgaaggtaagtttctctcggtcgtatttcgtgatacgcaagcatgggaaagaaacaataatttaatcgctatcacagttgcatcattatttactgaactcccacataaaccccaaccccttattagcgagctgatcgcattatcaggcgacttacctgaaacatggtttcgcaattataccaaagtcatactaaaacccgttttagcgatgtatttaatttatggcattgcccttgaggcacaccaacaaaatacgcaagttttgtttgatgattccggtcgtgcggtcaccatgcttattcgtgattttggtgatggacgcagttgggctccagcactgcgtcagcaaggatatgagcttcaaccttatatctggcccggcattttacccacggtgtttgaagatgatattgaacctgtcagaaccttcgttgtagatgcttgtcttgtcagccatttacatgaaattgcgctttgtttaactcaactttatgacatccctgatacccgcatatggactgtgatcggcgaagagcttgaacttgtgtttaaagcacttcaacccagagtagaggcggatttttggcacaaagagcgtgaacattttctccaccacccttggtatacccgctcattaatgagcatgcatttacagcaatatactgattaccgtcttcagcatggacttaacaatccgttagctggtgaacaagtagataactctaagatctga

SEQ ID NO: 294874 - DNA, 2112 bp, Proteus mirabilis
atgatcacaaacaaacattttttagcattgactattgcagcaagtttaattcctgatttcgtcagcgcggaagagagaattattgttaacgcagagcgcgttaacccccaaactaaaggtaggttatcacaacaagccaacataggtttattgggaaataaagatatccaagatattccatttagtattaagggatatacctcgaaatatattgagcaacgacaggctaaaacacttggcgatgtaataaaagatgatccatccgttcaagtgacatctccgtcaggtggtattcttgattcctttatgatccgaggattccctatcggggaaggcaatattggtgaagttgccctcaatggtgtttatggtgtagcgccaaattatcagttattacctcaatatttagagcgaatagaattactaaaagggcctggggcggggctttatggtatctcccccaatggcggggttggcggtgttgttaacgcggtgacgaaaagacctactcgtcagggaactaaacagattactaccacttggggatctgataatcaacttggtgcctatatagatgtaggtaaattgtgggtaaccccagacggtgaaatgtggggcgtccgatttaatggtggtggtagtggtggagatctggcgcttgataatactcataaaaaaacggcattaggtgcactcgctcttgactatggaaaagatggattcaccgtttcagttgatttattcgatcaatatcaatatgtcaaatcacctaatcgtccttttattgtcttagcgggtatcgatgttcctaaggcccctaatggtcgacgcaatattgcccaaaaagggatgtggtggaacacccgcgatcagggcgtattactgcacagttcatacgagcttaacgataatctaacactcttcatgaatgccggtggtggtcgttcaatcgtttcacgtatctctgagcaaaccccaaagattattaacgacaatggagatgttgaatcggcaatcactaattatcgctttaatgtacatcgttatatttttgaaaccggtgtcagaagttatttttcaacgggcgctattgatcatcagatgacattacaggccagctattatcatgaccgtcttgctgttgcgggtaatgtaggaaaacaaaaggtgatttctaatatttattcaccatcagaagtcgatgttaccctaccatcgtctccagcaagcgttcccaaagtatcttctagtcaattaactagctttgccgtttcggacatcatgaccatattgaatggcagtgtggatattatccccgggatacgtttgcaaagagtgcaagccgataactttatggctaatggacagcgttcggccagttatgatgaatcagcggtgacgccaatgttggggctggtttaccatcctttagagtctgtttcgctctatgccaactatattgaagggttaagcaaaggcgatatagccccgagttttgcaaaaaatgccggccaagtgatgcgtccttatcgctcgcgacagtacgaagttggggttaagtatgataacgcgggaatacaaagcagtttggctgttttccagataaccaagcctagtggtgctatcgacagcactgataatatatttaatgctaatagtgagcagcgaaatcgtggcgttgaagttaacctttcagcgcaggtgctggataatttacaaatctcaggcaatctttctcttattgatgccgaacttatcaaatcgcctaaatctgatatccgtggtaacaaacccgttggcgtttctcctctacaagcaaatgtgggagtggaatatgaccttcctattttgcatggattgtcattaaacagttatatcaattatagcgcaaagcaatatgtcaatcaggcaaatacacagtctatcaatccttggacaacggtagatatgggagcctcctataaaacacgtgtgtatggtgcgcctaccactttccgttttgatgtacagaatctatttaatcaccattactggtctggtgtcgcgtcatataccactattgcacagggagcaccacgtactttccttgcctcggtaagtgttgacttctaa

SEQ ID NO: 294875 - DNA, 1404 bp, Proteus mirabilis
atgtcttcgttgttaaatacttattaccgagcaaatgaatcttggcagatcgctataacccaagtattacccccttatatcgatccggttattatccgttggttggaaacatctcctgatacccttgttcatttaacacagatatatggttcaccccttaatattgtctggcctcatactgtggagcagaacgttaatgccatggtcgaagtcgccaaaacatttggtatacaaaccaatttgtattatggggttaaagtcaataaatcacagtcattattacaagccgctgttgctgcgggaactggggcggatgtatctagcctatatgaactcaatgatgctatttgtgcgggatgtaaaggtacagagttgtgtgctacaggccctgccaaaacaacggcatttttacaggcgttaatagtgcaaggggcacggattgttattgattcacttgaggagatggacgagcttattcaccttgctacaaggtggataagtccatcaggacgtataagtatactgttgcgttttcgtcctgagtctaatcatatcagtcgttttggtatgtcatccgctgagatcatgacagcgcttgagaaacttaattatagtgaccaagtaaaggttgatggattccatttccatcttagtggttactcttcggtatctaggatcaaggctttttttgataccttacccttgattagctacgctcgtgctttgggttactccccttatattatcgatattgggggagggttacctgttcagtatgtagacagtcattgttataagaaatggctctctacgcaaacacataaagactatcgtactcgacgaattcctgattctttctatccatatggtggagagataaatgcccaaggctggctcactgagtttctaaccggagccgatcccacaggtaaaagagtttgtgatgcattaattgaggaaggattaacactttgccttgaacccggaaggagcttggttaatcaaagtgcgatcagtgtatttcgtgtctgtcgagttcgtccatatgatcatgtcggacatgttatttttgtcgaagggactagttttagcgcatgtgaaacgtggtttaattctgaattcttaagtgatcctctccatatttatcgaaataaccatcagccactttcttctgctggaaatgcttggattgcaggccatagctgtttggacgacgatgttatcaccaatcgtttgatcgcttttgcacacctaccaaagccaggtgatttactgatatttgctaataccgcaggttaccaaatggatttactggaaaatcaatttcatcggcatccgttgcccacaagattaactgcggtcataaactcacatcaaaaacctatatttaccattgataattaa

SEQ ID NO: 294876 - DNA, 1017 bp, Proteus mirabilis
atggtttttagcaaagtaactgatttaattggtaatactcctatcattcaattaccgctgctgcaatcggatacgcgtctttatatcaaagtggagaaaaataatcccggaggcagtatgaaagatcgcatggcgaggaatatggttgttgcggcactgaaatctggaaagatcaagcctggtagcacaattgtggagtcgtcatcaggaaatactggcattgggttggcaatcgctgctatcgaatttgggcttcgatttatcgcggtggtcgatcaccatgctgcccaagataaaattgcgatcatgcgcgctttgggtgccgagatccgctacgttaaaggcgactatggtgaaaatgaagttgctgttgtggaacgccaacgtatggcggctgaaatcgccaatgaaattcccggcgctatctttatgaatcaatcagataatgcagccaatgcgggaggatatgcagatctggtacgtgaacttattagtcagataggcaaaattgatgcgtgggttggatgtgtaggtacgggtggctctatgacagggatagcccatggattaagggttcataatccagaacttgtaaccattgccgtagagccggaaggctccatcgtattcggaaaacccggtaaaccatactatcaatcaggtacaggcaccccacaaggcgatacagtggggttagtgttggattacagttgtattgattatggcgaacaagtctctgatgtatgtgcttttgaaacggctcgttaccttgctcgtcgttttggtttactggtcggtggctctacagggggagtggtatataaagcgctggagttgattaataacagtacaatttgcggaaatgttgcacttgctatggctgatggtggtgaaaaatatctgcagacgatttttaatgacacatggcttaaagagcgaaatctaatatcggagtcagtctgggaacaacttgataattggttttctttgccaacttgtttgggggatagcagatga

SEQ ID NO: 294877 - DNA, 1158 bp, Proteus mirabilis
atgatcccaaatgagaaattgagagtaacactatgtggagccggtcgtacagggcatcttgcggcaattttatttagcttaaatcctgcgattgacgtcactctttacagcagtcgctcagaaactgtgacagcatataaagaaaatgatcatcaacttcaggcgatgatgcctgatggtcaagttattaaaacccgttcggttaggatgacagaagccattgatgaggcgtgctctaaggcagatatcatcattattacgacaccaagtcatgtacgtgaaagtttacttcaacgtatggcgccaatactgccgaaacataaaaacatctttgtgggcgccattcccggttttgctggctttgactggctggctgaaaaaacgttaggcgatgcacccaatattgttatatggggaatgaaagatgttccccatattgcatttgatctgcaaccgggaaaaagtgtcagaatggggggcggaaaatcacaactctatgtagctgtgcatggaagagaaaaaccgcaatatgccaatcttcttctcaattacctcaaacaactttatgactcacctattacgctactgaccgattatctagaaattaccctaacgccaggaaatcctattatgcacagctctgttatctatggccttatcggtccatggggacagtggcacaataggccttttgagagcattccatgttggtgggacgattgccctgagttgggggcctattttcttgcccgctgtgatagggagaatcaagcgttatgtaataaagcagaaattgtattggggattaatctcagttccgtgcaaccattacagcaggaaatagtagccgcatatgcggactcaattgctgatccgcgaacattactcagtgtgttacgaacgaataaggcctatcagggtattcctttacctcttatttctacaacccaatcccatggttatatttttgacaaacaacatcgagtttttcaggaagacattgcctatggactagcgcttcttgttgctcttggggaacgtcttcgagtaccaacaccctatataagagaaatatatgattggtgttgtggttatatgggaggaaatctgcctcaccctcagatcccaatggattggccaataataagggtgaaatag

SEQ ID NO: 294878 - DNA, 1203 bp, Proteus mirabilis
atgcgtgttaccggcagtgtcatttttattgtccagtttttatttatcgtacagctactctcaatgggagccatggaaatgagtggccctttttggccgcttcatctcgaaagcatggcgtcgacagagctactgagtatcgtgggaaccggcgtgtatatcgcacctatgttgggcgttatgctaaccagtaccttttggggacgaataggcgataaaactggcaataaagtgatgatgatccgtgcactgatggggctggcattaacgcaattggggctcgcttttgccaatgatgtctgggtaatactgctactacgttttttacagggaacttgtgcggggtatattgcacctgctcaagcttatggtattgccatgatccccgtagcacaacgtactcggcttttggcatggttacaagtatctaccaatgcaggatcgttagctggagccattgctggtggggccatcctcgatttactgagtttcttttggataaatttcggggcatttatcatttgtacgttatgtgcactactggtttttttcatattaccgaatgatttaccgcgccacgcttcatccaattgcgtcacttcctcaacaaataaagcaaaagcgatatcatcaattaaccacagcgtcattgttggcttacttaccatactgggtttgttattagtgagccgcatgatcacacaaacccctttttctctttatgtcagtagcgtatttaatgcccctaactggttaacaggggtcgcttacggattgcaggctacaggtgtgattgtctcagccgccctctgggcaagatggtttgaagcacacaacatatttcacgcactctatcgaatggtggggatcattgcgggatgttttattgtgaccttactgctagcagctgtaagagaaataagctggtttatcggactttattttttgtggggcattcttcttggggcaacaacgccagtattaaccgcattaatatctcgctcaaccgctgaaagtaaacagggttatattttggggctggtgcaaagtattagccagtttgcctctatggttggtattgcgctggggggcggaatacttgtttggcctgggttgtccacgttgtttttgtgtgtggcggtgatgtattgcattactttaattattacgctgaaaatgagttactcttcaaaaaaacactaa

SEQ ID NO: 294879 - DNA, 1128 bp, Proteus mirabilis
atgatattacgatttatattttctattgtattgttgtattcatcaatggcttactcacagcaagttgtaacacctgttactgatctacttggcagaaccgtgaatatcaaattaccggtacagcgcgtcattttgggggaaggacgacagctttatttagtggctatgtttgataaagaaaatccagcacaaaggatagtcgcttggcgaaaagatttaatacagtccgatccggccacatggcaacagtaccgacaacaatttccacagttggcaaaaatccctacctttggtggcagcgaacaaggaacgtttgatatagagcaggcgattaatctgcaacctgatgtcatcatcatgaatatggacgcacgcaatactattgttgatgctggacacgaagcagcattagcccgagcgggtattcccattgtttatgtcgactttcgctatgatcctattgcacacattcctccaacagtgacgttatttggtaaattatttggccaaccagatcgcgcagaagcttatttaacattccgtgataaagagttacaacgagtgacatctcgagttgaacaattacaggggacattgccaaaagtatttttagagcgtcttgggggctattcagaagagtgctgtatgacctttggtaaagggagttttggccgttttgttaaaatagcggggggggataatattgctgaccatcttgctccgggaaccttttttacgctaaatccagaaaaagtggttgttgcaaatcccgatattgtgattattaccagtggcaattttcaggcatttgtgccaggtggaaagtggatcccacttgggccggggattaatattcaacaatctaaacatcgactcgcatggtttacgactcgccctgcttatgttgatagtaacgctcgccgtcgtggcgcattttttgctatttggcatcagttttataatagtccctatgatgttattgctatccagcaactagctaagtggatacatccccaattatttgctgatcttgatcctgatgacacattccgtcgtttacatcaagaatttctacccatctcatatcagccgggatatatgattgatttggaaaaagaggggaggtaa

SEQ ID NO: 294880 - DNA, 447 bp, Proteus mirabilis
atggagtatgatgtcgtgttatatcccattgccttgctccgtccttcagaagaagtcaacatggctcatgttgaagctttaactaaggaaatagtccgttgccaaagatggacaacacctatacccattgaaaaagagaccggaattattatggacggtaatcataggtatcaagtcgctcatcatcttgctctcacttatattccttgtgtgttgcttgattacactgatacacgcataactgtgtatgattggcagaatggacgagcgtttagcccattaagaataagggagcagatattaaagcaaggtaatattttcccttataaaactactcgacatctattttctccaagccttccggccgttaattttccgcttgaacagttagttgaaaaaatagccagtaatcatttgaatgttttcaagttaggtgttggtaggtga

SEQ ID NO: 294881 - DNA, 1995 bp, Proteus mirabilis
atgaccactcgtaaaacccttgcaaatgcgatccgttttttaagcatggatgcagtgcaaaaagccaaatcagggcaccctggtgcacctatgggcatggctgatattgcagaagtattatggcgtgattttttaaatcataatccaactaatcctcactgggcagatcgtgaccgttttgttttatctaacggccatgcttcaatgctgatttatagcttattacatctgtctggttatcaagtttctttagatgatctaaaaaatttccgtcagctgcattctaaaacaccgggtcacccagaatatggttataccccaggtgttgaaactaccacgggtcctttaggtcaagggattgctaacgcagtaggttttgcgatcgcagaacgtacattagcggctcaatttaaccgtcctggtcacgatatcgtagatcactacacctacgcctttatgggggatggttgtatgatggaaggtatctctcacgaagtatgctctttagcaggtactttacagttaggtaaactgattgcattttacgatgacaatggcatttctattgatggtaaagtacatggttggtttactgataatactgctgaacgtttcgaagcgtatggctggcatgttattagtggtattgatggtcatgatgcagcgagtattaaagctgcgattgaaaccgcacaacaaattactgataagccttcactgttaatttgcaaaaccaccattggttttggttctcctcataaagcaggcactgccgattctcacggttcaccattaggtgatgcagaaattgcagaaactcgtaaagctctgggctgggagtatggtccttttgaaattccacaagagatctacaaagagtgggatgctaaagaagctggtaaagcaaaagaagctgcgtgggacgctaaatttgctgagtatgcagcacaattccctgaattagcagctgaatttaaacgtcgtatgtctggcgaattacctgcaaattgggaaaaagagtcaacagcctttattgaacagttgcaacataacccagcgagtattgctagccgtaaagcatcacaaaatacattagaagcgtttggtaaagttttacctgagtttatgggtggctctgctgaccttgcaccaagtaacttaactatgtggtctggctctaaagcattaaatgaagataaagccggtaactacatccattatggtgttcgcgaattcggtatgtctgccattatgaatggtattgcattacacggtggttttgttccttacggcgctaccttcctgatgtttatggaatatgcacgtaatgcggtacgtatggctgcactgatgaaaatccgcagtatctttgtttatacccatgactctatcggtttaggtgaagatggtccaactcaccaacctgttgagcaaatggcaagtctgcgtgtaacaccaaatatgagtacatggcgcccatgtgaccaagttgagtcagcagtagcatggaaatacgctgttgagcgtaaagatggtccaactgcgctcatcttctctcgtcaaaaccttgctcaacagccacgtactccagagcaactggctaatatcgagaaggggggttatatcctgaaagattgtgacggtacacctgaacttatctttattgctacgggttctgaagttgaattagctgttaatgcttacgatcaattaacagcagaaggccgtaaagtccgtgtggtttcaatgccagcaacagatgcatttgataaacaagatgctgattatcgtgaagcagtattacctgcagcggttaaagctcgtgttgctattgaagcgggtatcgcggattactggtttaaatatgttggtcttgatggtgtgattgtcggtatgcatagcttcggtgaatctgctcctgcaaacgaactgtttgctgagtttggttttactgttgaaaatgtggttacacaggcaaaaactctacttaaataa

SEQ ID NO: 294882 - DNA, 1020 bp, Proteus mirabilis
atgacaattagagttgctattaacggttttggtcgaatagggcgtaatgtgttaagagcgctttatgaatctggaaagcgggctgaaataagcgttgttgcaataaatgaattggctgatgcgacaggtattgctcatttgcttaaatatgactcaagccatggtcgttttgcttgggatattcgtgttaataatgacttattgcaagtaggtgatgatgcaatccgtcttttccatcatgccgatattgcagacttaccttggggtgagttaggtattgatgtggtacttgattgtagtggcgtttatggatctcgtgccgatggtgaggcgcatattgctcaaggggcaaagaaagtgctcttttctcatccgggaacgatagatcttgatgctacggtggtattcggtgttaatcaacatgaactgaaaaaacagcaccgcatcgtctctaatgcctcttgtaccacaaattgtattatcccgattattaaaatgatggatgatgcttttggtatagagtcaggtacagtgacgacaatccatgctgcgatgaatgatcaacctgttattgatgcatatcataaagatttacgtcgtacacgagccgcaggacaatcgattattccggttgataccaaattagctgccggtattacacggattttcccgaaatttaaagatcatttcgaggcaatttctgtacgagttcctacaattaatgtgacagcaattgatttaagtgtcacggtaaaaaatgctgtaaatgtgttagatgtcaataagttaattcaaaaatcagcaactggcgcatttcgtggtatagtggattacacagaattgccattagtctcaacagattttaaccacgaccctcatagtgccattgttgatggtacacaaactagagtcagtgggcagcatctgattaaaacgttagtctggtgtgataatgaatggggctttgctaaccgaatgcttgatacgacgttagctatggctgcaactggttttaaataa

SEQ ID NO: 294883 - DNA, 1164 bp, Proteus mirabilis
atgtctgtaattaagatgaccgatttagacctggccggtaaacgagtactaattcgtgctgacctgaacgttccagtgaaagatggaaaagtaacttcagatgcacgtattcgtgcttcattaccgactattgaagcggctttaaaacaaggcgctaaagttatggtaacttcacacttaggccgtcctactgaaggtgagtacaacgaagagttctctttaaaaccagttgttgactatctgaaagagaaattatctgcacccgttagcctagcaaaagactatttaaacggtgttgatgttaatgcaggtgaattagttgtacttgaaaacgtccgttttaataaaggcgaaaagaaagacgacgaaacgctgtctaaacaatatgctgcattatgtgatgtctttgtcatggatgcattcggtacggctcaccgtgctcaagcgtcaacacacggtgttgctaagtttgcggatatcgcttgcgcgggtcctctgttatcagcagagcttgaagcattaggcaaagcattagataaaccagagcgtccaatggtggctatcgttggtggctctaaagtatctactaaattaacagttttagattcattatcaaaaattgctgaccaattaatcgttggtggtggtattgctaacacctttatcgcagcagaaggtcattctgtaggtcgttcattatatgaagcagaccttgttgacgatgcgaaaaaattaatggaaaaatgcgatattccagtaccaacagatgtccgtgtcgcgacagaattctcagaaacagcgccagctgtactgaaatcagcaaatgacatcaaagatgatgaacaagtattagatatcggtgatgtgacggctgaacgtttagctgaaatcctgaaaaacgccaaaaccattctgtggaatggccctgtgggtgtctttgaattccctaacttccgtaaaggtactgaagtgattgctaaagcgattgctgatagtgatgctttctctatcgctggcggtggtgatacattagcggctatcgatttatttgatatcgcagataaaatctcttacatttcaaccggtggtggtgctttcttagaattcgtagaaggtaaaaaacttcctgcggttgctatgctggaagaacgcgctaaacagtaa

SEQ ID NO: 294884 - DNA, 1080 bp, Proteus mirabilis
atgtctaaagtttttgatttcgtaaaaccgggtgtcatcactggtgatgatgtacaaaaagtatttgcagtagcaaaagaaaataattttgctctgcctgcagttaactgcgtaggtacagactcaattaatgctgtattagaagcagctgcgaaagtgcgttctcctgttattgttcaattctctaatggtggtgctgcatttatcgcaggtaaaggtcttaaagctgaagcgccacaacaagcggctatcctaggggctatttctggtgctcaccatgtacaccaaatggcagaatactatggtgttcctgttattttacacactgaccactgtgcgaaaaaactgttaccttggattgatggtctgttagatgcaggtgaaaaacactatgcgaaaacaggtaaaccactattctcttctcatatgattgacttatcagaagagtcattagaagaaaatattgaaatctgttctaaatatttagcgcgtatggctaaaatcgatatgactttagaaatcgaattaggctgtactggtggtgaagaagatggcgttgataacacaggtatggatagctctgcgctatatacccaacctgaagacgttgcttacgcttatgaaaaactaaatgctatcagcccacgtttcactatcgctgcatcatttggtaatgttcacggcgtttataaaccaggtaacgttcaattaacaccaaaaattcttcgtaactcacaagactatgtgtcagagaaatacaatctgccacacaatagcttaaactttgttttccacggtggttctggttcatctgcagaagaaatcaaagaagctgtaagctacggtgttgttaaaatgaatatcgataccgatactcaatgggcaacttgggacggtatcttacagttctacaaaaagaacgaaggctatttacaaagccaattaggtaatccagaaggcgctgataaacctaacaagaaatactatgatccacgtaactggttacgtcatggtcaaacatcaatggttgttcgtttagagcaagcatttaaagagctaaatgcgattgatgttctgtaa

SEQ ID NO: 294885 - DNA, 213 bp, Proteus mirabilis
atgaatgataaaaataagctagcagccgcattattagctatttttcttggtgggctaggaatacataaattctatcttcgtaaagtaggaatggggattttatatctcattttttgctggacggggatacccgctattatcggttttattgaaggaatttattatctgtgtatttcagaccaaacctttaatgacaaatataaccgaaactaa

SEQ ID NO: 294886 - DNA, 1479 bp, Proteus mirabilis
atggataaacccgctaaagtcggtttattacaacagcctaaaccattctttatgattttctttgtggaattatgggaacgttttggttactacggcgtacaaggtattcttgccgtttattttgttagtaaactcggattctctcaagaacaagcttttattacttttggtgcattctccgcattagtttatgggcttatttctattggtggttatgttggtgaccatctattaggtactaaacgaaccattgttttaggggctatcgtattggctatcggttattttatgaccggcatgtcaattatgtatcctaatttaatcttttatgctttagccactatcgcagtaggtaacggtttatttaaagcaaacccagcaagcctattagctaaatgctataaacctaaagatccccgtcttgatggtgcatttacactattttatatgtcgattaatgttggttcattaatctccttatctattgcccccgttcttgccgatcgctacggctatgcactgacttataatatttgtggtatcggcttaataatggccatattggtctattttttctgccgtaaaatggtcgtgaatattggttctgagccagatcacctgccaatgaatttcaacaaactgctattagttattgcaggctctgtcgctatggtctttatttgtgcatggttgttgcacaatgtgatgattgctaacatcgttttaatcagcttgtctattgttgtggttatcatttattttcgtgaagcctttaaacaaaaagacagagtggcacgtaataaaatgtatgttgcatttgttctgatgttagaagctgttattttctatattctctacgctcagatgccaacctcacttaacttctttgctatccataatgttcaccataccctgttaggctttgatattaacccggtgagtttccaagcattaaatccattttggatcattattgccagccctatcttagcaatggcttatagccattttggcgcgaaaggcaaagatttatccatgccggcaaaatttaccacaggtatgcttttatgctcattaggcttcctaaccgctgccgcttcaggtatgtggtttgctgatgctcaaggcttaacatcaccttggtttgttgtactgatttatctcttccaaagtctaggggaattgatgatcagtgcattaggcttagcgatgattgccgcttttgtaccgcaatatatgatgggctttattttaggtatgtggttcttaacacaagcgacggcttacctgttaggaggccatgtagcaacctttaccgccccacctgaaggtattaccgatccactacaaacactgcctatttatactgatgtgtttggcaaaatcggtatcgttaccttagtggttggcttgattatgtgggcaacagtacctttactaaaccgcatgatgaaagaagagagtaaaatgattaagtaa

SEQ ID NO: 294887 - DNA, 519 bp, Proteus mirabilis
atgtctgatgaaaaacaggctaacccactttttcgggatgcaatggcaagcttaggtgctgccgttaatattgtcgcaactaatggtgatgcaggatgctgtggtttaacagcaacagctgtatgttcagttaccgatactccaccgacagtgatgatttgcatcaatagtaaaagccaaatgaatagtacgtttcaagaaaatggcaaattaagtatcaatattttaaatcatgaacaagaagagatggcttgccattttgccggtatgacaggtctggcaatggctgatcgctttacccaaccaggatggcaatatggcgcattgcagcaaccgatattaaccaatgcactcgctagcctagaaggtgatatttacgatgtacgccaagtaggtactcactttgtttatatggctgagataaaaaatattgcggttcgagaagatggcgatggcttaatttattttaagcgtcgcttccatcccgttaaacataaattagtcacaaccaccgcttaa

SEQ ID NO: 294888 - DNA, 192 bp, Proteus mirabilis
atgatcttgctgatttctttgctgtgtgaatttaaagccgtaacgctacctcgcattagccaagagatcaatctttctttgttacaacctgttaactttatctcaaaaagtcgtgagacaaccttatcgctggttgttattattcctaataagtcaagaaaagcgataggtaaatcagggggtttagcctag

SEQ ID NO: 294889 - DNA, 390 bp, Proteus mirabilis
atgggattttttcgccccgttcttaaagagcataatctgacagagcagcagtggcggatcatccgtgttcttgctgataagcgctctatcgattttcacgaattagcacaaaaaacctgtattctgcgtccaagtttgacaggtattttgattagaatggaaagagatgagctaatttgtcgattaaaaccagtgagtgatcaacgtaaattattcgtttctctatcaaccaatgggcaaaatttatatgataaaatccagcctaagatagaagaagggtaccaattactcgaacaaaagttttctacagaaaaactgcaacatttatctatcttactgaaagaactgatagcgttaaatccagaaaatagtcattcaactgaaaaataa

SEQ ID NO: 294890 - DNA, 2004 bp, Proteus mirabilis
atgagccaacaaaatgaaatcacaccaaaaaaaattaggatgaaaattaatcctcccgtattttacacctccgcaatacttattatgctcgtcgtagggttttcagcgctatttcctgaactcgctaatgacaagctagggcaccttcaggaaaaccttttcaccaacgcgagctggttttatattttagccgtagcattggttttgctgagtgtgacttatttagggctatcgcgctttggcgaaataaaattaggccctgatcatgctcgtccacattttagctattttgcttggttcgcgatgctgttttcagcaggtatgggaattgggctgatgttctttggtgtcgcagaacccgttatgcactatttaatgccgcccacaggggatgcgcagacgattgaagccgccaaagaagctatgcgtttgactttcttccactggggcttacatgcttgggctatttacgccatcgtagcattaattctggcgttttttagctatcgtcatggtttgccattaacgttacgttccgccctttatcctatcattggcgaccgtatttatggccctattgggcatgcggtagatatttttgctgtgatgggcaccgtatttggtgtcgcaacttcactgggttttggtgttctacaagttaatgccggtttaaaccatctattcgatattccaattaatccaaccgtgcaagtggttttaattgttgttatcaccgggcttgctactatttcggttgtctctggattagaaaaaggtatccgttttttatccgagcttaaccttggtttagccgttattcttcttttattagtcattattcttggccctactgtattgattttaaaatcgtttgttgaaaatacagggggctatttatcagaaatagtgagtaaaacgtttaatctttatgcctacgaaccaaaatcaagtgattggttaggtggatggacactgctttattggggctggtggttatcgtggtcgccttttgtcggtatgtttattgcacggatctcccgtggtcgtactattcgtgagtttgttgtcggcgtactctttgttccagctggctttaccttactttggatgactgtctttggtaataccgctatctatttaattaaagataaaggtgcagaagttcttgcgaatatagtacaacaagatgtgtcattagcactgtttgaattcttaaactattttccattctcatcagtgctttcctttgtcgcaatgctgatggtcattgtcttttttgtcacctcagcagactccggtgcaatggtggttgataccctagcgtcaggaggagattcagaaacccctgtatggcaacgtatcttctgggctgcattaatgggtatttcagccattaccttgttattggcaggaggtttatcagcattacaaactgtcaccattgccagtgcgttaccatttgccatcgtgctattggcatcaatttatggattaattaaggcattgcgagtggatgtttataagcgagatagccaacagatgacgactatcgccccaccggctagccgtaatcctattccttggcaacgtcgattaagaaatattgcttattttcctaaacgttcacatgtaaaacgttttatggaagaagtcgttaatccttccatggaaatggtgtcggcagaattaagcaaacaaggtattcaatgctatatccatgacgaagaagaagatcgcatcggctttgaagtggacttaggtgaggatatgaacttcttttatgaagtacgattacgattctatactcaacccgctttcgcgctagcaggcttaacagatgaagaaaaagatgaagagcataaatactatcgtgctgaaattcatctcaaagaaggtgggcaagattacgatgtcatgggctggacaaaagaacaaattattcatgacatactcgatcagtatgaaaaacatattcacttcttacacgtattaggtaaaaggtaa

SEQ ID NO: 294891 - DNA, 636 bp, Proteus mirabilis
atgaacaaaaaattactggcatctttaattctagcaggtcttgttaccattacagcaggttgtgatgattcatcgaaaaaagtggatgaaggtattgataaagcaaaagagacagcaacccaagtaaatgaaacggctcaagacaaagcaaaagaattaacagatcaagctaaagaaaaagccgctgatttaaaagagagtgcatcagcgacagctgacgaattaaaacaagatgcggccaagctaaaagagcaagctgaagataaagctgcagagcttaaagcacaagccgatcaaaaaaccgatgcattaaaagagagcattgcacaaaaaacagatgaactaaaagattctgcaagtgcaaaagcagatgaaatcaaacaaagtttaaataatgaaagtgacaaactggctggtaaagcagaagaagtgaaacaaaacgctaataccactgcagataacttaaaacaaaatgctagcgacaaagcagcgcaactaaaagaagatgcggctaaaaccagtgatgatgtaaaacagcaagcgcaagatactaaagataaagcgcttgataaagccgatgagctcaccgatcaagcaaagcaaaaaattgattctctaaaggctgataataaataa

SEQ ID NO: 294892 - DNA, 675 bp, Proteus mirabilis
atggaatattatctgcttgtggttatcaagtttattattggttttacaataattttggctcatatgaatatttcagggaagacacaactctctcaactaactcccattgattttattggtaattttgttttaggggggattatgggaggggttatttacacagatgcaattccgctttaccaatatgttattgtctttttgataggtgtattttttatttcttttctcaattatatcagtaaaaaatttaattttttccgagcagtagcgataggtaatccgatcccgattattaaaaagggaagatttattatggaaaacattactgagaagaaaaataagattgatattcttaatatcacttctaggttacatgcccaaggaattcattcttttcaagaagttaattatgctcaaattgaacctgatggacaaataacggtggtgtgtgatggtgctaaaatgccctctatcattattatgaaagatggtgttatccgaacttctgaacttgagcagatagaacgagatgaaaattggttaaacgaagagatgaaaaaacaacatatagataacccagaagatgtttttttagccgaattttgggatggtaaagtcaatttcattttgcaagacggtaagatcaaacacgatttcattccgactgctgagtag

SEQ ID NO: 294893 - DNA, 918 bp, Proteus mirabilis
atggaacttacctttttaggcactaatgcaggcgtaccttctaaagatcgcaacgtcaccagtatggtgcttgatttacaaaataaacaaaaaagtctgtggatgttcgattgtggagaggcgacccagcatcagatcttacatagccatgtaaagctatcacgcattaataagatttttattacccatttacatggtgatcatatttttggtttacccggactactctgtagccgttcaatggggggcacagaaaacccgttaaccatttatgggcctacaggcattaaggcatttatagaaacagcccttacattaagccaatcttatctcacttaccctttagatattattgaaatagaacaagatggttttctttttgaagaagaaggtatacgtgtaagttgtggcgcattatcacatcctgtcccctgctttggttatcgtctagaagaagacaataaaccaggtaaactcaatgctgacaagctagaggcagagaatatccctagaggcccttggtataaattattaaaacaagggaaaaccgttacactacctgatggacggatcatagatggaaaagattatctaagcacagagatcaaaggccgttgtattgtgatttttggcgatacacaaccaacgcctaatgcagttaaacttgctgagaatgccgatgttattgtccatgaagcaacctttaaacatgacatggctgataaagccaatagtcgtggacattcaagtaccatacaggcagctgagttagccaaaaaggcgaatgctaagcgactaatcattacccatatcagtagtcgctattcacctaaagaaacccccgagctattagcggaatgtcatactgtatttggcaatacacaaatcgccagtgattttgagacattcaaactttaa

SEQ ID NO: 294894 - DNA, 564 bp, Proteus mirabilis
atgaacgaaagagattgggttgatttggttgttgctggatcaagtgttttatcatcattggggattttggcaactatcggtgtttatttttggcaaaaaaaagataataaaagtaaacaaagagagatagatagaaagttactttattttgttaatataaaggctaaagaattcctaaaaaaaattaataatgttttacatctcattaataatgaaggggaatttcagcaaatagaaatgcagaaaaacgacttgcgctatgtcaaggtcttacagcgcgataaccctttgttttataaaataaaccttagattaaatagcaatgaatttttagataggaataatatacatgcgagtttgggtttatttaatttcatcctagatattgattcgttaaatgaagaattttttaataaaacttcacaatatattatatatgcacatatgtatctcccagatgttcctaatgagttttatcactgcatagataaaaatgaattaattaacttcttacataacaccaaagataaaataaaagaaaatttaaatagattgagcgactaa

SEQ ID NO: 294895 - DNA, 456 bp, Proteus mirabilis
atgaaagacagaatcaagtttaacgatgtaatgctagaggctgtcatggatggcagaaaaacgcagacacgcagaccgattgagtcacaaccaaaagtaaccgaggaagagttacgcaagttaggtgcatggcaagatggttacacactatccgagcaagtatgtgcagcatggcgacatggctttattgatgttgattgcccgtatggtgagattggcgacatcatcaacatttcggataaagacggtaatataaaagggaaaattgagattactgatgtttggttgcagcaagtaaatgatatcagtgaaagcgatgctaaagctgaagggttcgatgggaaattgaattcatgcacgtctgacttcgccgctgtatggattggcgtatacggaattgatagctggatgaataacgattgggtatgggtgattgagttcaaaaaggcgagttaa

SEQ ID NO: 294896 - DNA, 165 bp, Proteus mirabilis
atgactattgaacagttacaagaagaaaataagaggttgaaaaaggctattactgatatctaccgcaactgcatggaatgtgagcttgacggaagcggtaattattatgcagtagagcaagatcacgttaatgatgcgtacgatctagtagacccaacggaataa

SEQ ID NO: 294897 - DNA, 294 bp, Proteus mirabilis
atggctaataaattcacttgccccgaatgtggatcagctgtaaatgcatgggctgatctagatgcgacagtaatatttaaaattaataatcacgggaaattaatcagacgtgtgattaaaaatacaaatcagacagatggacgatgcggtgttgaatgtactaaatgtgattgggttctatattctgatagcgattattcagaatatccgcattttgaagagctggcttgtcaggcgcttgcttatgaagaggaaataaaaaccttaagtgtgaagtcaaaatatagtgactaa

SEQ ID NO: 294898 - DNA, 570 bp, Proteus mirabilis
atgaaattgaatatcacagtagatttagattggttagaagaagatggaaacattgatgaagaagttaaacatcaaattatacagggtgtaaaaagtgcaatttccaagcagtgtttggataaagtagaaaagaaagcatcagaacaaataaatcaagccatcaatgattctatcacagctgcgaaaaaagcaattgagaaaaaagcgattacatttgccgatgagtggctagaaaaagaagtaactattaccgataaatggggtgatgtgcaagattgcctttcaatcaccgaccttattaaacgaacctttgataatcttctggagaagaaagttaatgataacggaagttttaccgatggttatggaggtgggacacgattaattacatggctaacagacaaacgagttaaagatgtcgttcaggaaaaattaaaaggtatcaataaggatattgatcgacaaatcacagaagctgtcaacgctggaattcgaaaaaatgtctcagataaattcgctgagatggttgtaatgacagccaagcatcaaaacgctctcgaacacaagtaa

SEQ ID NO: 294899 - DNA, 1041 bp, Proteus mirabilis
atgtcagaagtagcaactctcgaaagaaaccaatcagtaatgaataacacatcattactttttaatcctgaatcattagaccgcattgtcaaatttgctgagctaatggcatcaggtacagcaacggtgccaagacatctgcaaggtaaaccatctgattgtcttgctatcacaatgcagtctgcacgctggggaatggatcctttcgttgtcggtcaaaaaacacatgtcatcaatggtgtgcttggttatgaagcccaattagtaaatgcagttattaccagttcaaatgctgttgtaggtcgatttcattacaaatacggtggcgactgggaaaagattgtaggcatgaaagataaacgtgatgaatcgggtttatttattgaagtcggtgcaattttaagaggtgaagaagaaattacatggggtgagcctgtttaccttgctgatgtacaaacgagaaactcaccactttggaaaacaatgcctaagcaacaaatcgcgtatctcgctgtaaaatattgggcccgtctttattgccctgaagttattcttggtgtgtatacgccagaagaacttgaagatcgaccgattaaagacatcaccccaccgaaagaacgtgtaagcattgatgaaatcaccactcaacaacagacaaccaatgaagaaccgataaaagagactcaaggcgagtttatacctaagttcgatgctgaagcctttagattagctattgatgatgttcaaactgtcgaagaagctaaaaatattcgtgcagaaattgagaacttaaaaaatgaaatggggatcaacctatttactgaattaaaaaataaagcagtacaggcataccaccgtattgatgcacgtaatgccctagaagcttctattaactcacttcctgaatctggctcacctgaagctaccgaagcatttgaaaaagtagacaagctacttaaatcaagcaaaagaaaacttggtgatgagttatacgaatctttctctatcacacttaatgatatgcgccctgaataccagtga

SEQ ID NO: 294900 - DNA, 1725 bp, Proteus mirabilis
atgtcagacactaagcacttaaatgtgttgattgcaaaagctcttttacttaaccaagatattactgatagcgaacaagtagatgcgctaacagctcatatcaatggtgatattgaaaaagaagagtttaagcaatatgaccactttattaatatcacgttacttgcactttcattggttcctaatatcagcagcgaactcagtgaagagcaaatcgttaacgctattatgtcatttattgataaccctgatatgcgtagcgttcgtcatagagttaatcactttaactcattaacaaatccaaaaaccacctcaaatgaggtagaaaaaaaggaagtacctcaggaagaggtaatttttcacgccaataaagataaccaaaacggtcaacataaggaggcggaagatattccaaaggaagaaaatgaccaacctgcttattttgaacctggtcggtatcccgatattcctaacgaggtgtatcacagttcaaacggcatcagtagttcgatgctaaaagatgctcgtattagtttgatgtattacgagttacgccatataacaaaagtcattgagcgtgaaaataagcgttgtttcgatttaggtagtgcgtttcacacgttaacaatggaacctgaaaagtttgatgctgaattcagtgttaagccaattattccagaaggtgcctttacaacaacggaaacaatgaagtcatggattgacgaatacaacaataagttgcctaagaagctctcacaagatgagttaaaagcaattattgaagaacataatgccactctgacaccgcaactttccaccagcggaaaagccgaagagctaggtcagatatacatgcagttgcccgatgaatttaaaaccatccctgaagatggaaaatttactggtgcagcaatgaaagcctgtatcaaagcctataacgatactttgccaacaccattgaaaacctcagggaatacagaagcattacttgagcagatataccaccacatcaatcctgaattatatttagcagaagtaagtaagcctgagccacttagaaaacccgtcaaaaaagatgatctcatgcaggtcattaaagaagtgaaccctgatgctgtatttgaagatgaaatcattagccaatggcttagtgacgattcaaaaattcacgttcaaaccgttgactatgaaatggcaaataacatgcgtaacgctgttatgaaccacaaagaagcatccagtttattaaaccaccctaaccgtgtatcagaagtgagttactacggcattgatgaagataccggccttgaaattcgagttcgtcctgatatcgaaattcaaacagaaaataacagattaggttttgacctcaaatcagtagcacttggtcgatttaaacaagatgccattgaaaccatgatccgcagagaaatcattaatcgcgattatcacatcagtgcagctatgtattgtgatgtggcaatgctggatcagttcttctggatattcgttaacaaagacgagcattaccactgggtcgctatcgttgaagcctctcctgaattacttgaactgggtcgcgctgagtacaaaaagacactgcgtgatatccgtgaagctatggatacaggatattggccagcgcctatcaccactactctcactatcggtatcactgactttgagcagagaaagttagaagaactgcaaaacgaagtcgcttaa

SEQ ID NO: 294901 - DNA, 162 bp, Proteus mirabilis
atgatcttttatatcaaatacggtaagcatgtatttaccttatctggcttaaatgagtcacagtcatttgacaattttaaagccggtattgagtgggcttatgtaagaaagctcgcattacaaacagaacaattagtaggtaaacaaaatgtcagacactaa

SEQ ID NO: 294902 - DNA, 609 bp, Proteus mirabilis
atgaaaagcattgctgaaattagaaaagataacctgatttatattattgaacgctactacaacggcaaacaaaaactattggctgatgcgttaggcgtagcaccaagtatgatctctcgttacctatcaccaaaagatttaaaaagtcatcgtgaactcaccgacccaatgtcacgtaaaattgaatatgtgactagaattagtaaatattggatggatgtagaccatttaaaagaaggtcatgcagagtcagaaaaagaagaatatattccgaccgagatcggaaaaatactctcagataacatcacaacatttatgttaaacgatggaataaaatcaagagttaagctttctgtcgattcagggcttgcacaatcaacagttaaccgcattatcaattgtgaagccagcgccaccgctgaaagcattgatgctattgcaaaagcaatgggccgccaagcctatgaactactgatccctaaaaatgataaaggcactattaactatgatagaagagcctattcaaaacttcccgccagcgaacaagctgctattgaaaacttcattgaatttatcattaataaaaaccagcctatctcccacgactaa

SEQ ID NO: 294903 - DNA, 279 bp, Proteus mirabilis
ttggtaaagtacctaaacggttactattatttattggttaatcaaattggtgaaattatggaagttttcgactttaaaaaattttggaatagcttaacgattaagcaaagagaagcattttctcaaagaacggggtatagccaattgtatctatcacatcagctacgctatgcaaaacgtaagccttcattaagtaaactcaataagttatatgatatttgtattgagttcggtgcagatacaactagagagcaattaatcaatttctttattcgataa

SEQ ID NO: 294904 - DNA, 186 bp, Proteus mirabilis
atggagattattagtcgaaaagaagctgcttcaaaagggcttggaaaattttttacaggtaagaaatgcaagaacggtcatgttgctgaacgttatgtttgtaatggtgtttgcgttaaatgcaactttgaaaattcaacagtctatcgctctgtgttaaagcaattaattaacagcgctaagtga

SEQ ID NO: 294905 - DNA, 843 bp, Proteus mirabilis
atgcgtgactatggaaaagtttccccacaattttggataggaaaaacaggtaaggaaataagagaaaaagggcatgaagcacttattgtctctatgtacttattaaccaatcctcacgccaatatgatcggaatgtattacctacctattatctatatggcgcacgaaacagggctaggtttagaaggggcttctaaggggcttctaaggtgcattgaagcaggtttttgccactatgatgaggatgctgaagttgtttgggtgatcgagatggcaaaatatcaaatagcatcatctttgaagccatcagataaccggtgtatcggtatacaaagagagtatgactctcagcctaaaaatcaatttctatcaatgttttatgataagtataaagatgcttttaatttaagttctgcaagagaatcatcgataaaaaatgaaaggggcttggaaggggctttgaagaccctacgaagccaagaacaggagcaggaacaagaacaagatataaaaccccctaaatcccccttgaaaaaaaagtcggtacaaaagcgaggttttaatatcttggaagaaaaaatacctgattggctaaatcctgaagtttgggagaagtggattgagtaccgaaaggaaatcaagcacccgataaaatcgaaacaaacgttcagtggacaaataaaattactcactgagtgttatgagttaggtttttcacctgaagaaataattagcaaaaccattacaaatggatggcaaggactattcaaaccaaacgttccaccaccacaacggatcattcaacctcaaaagaacgatgagtttataccggaggacttctga

SEQ ID NO: 294906 - DNA, 726 bp, Proteus mirabilis
atggcagcatcatcaaccttagcaaggctaaagcgaataatgcctgagcatattaaacctaaatttactacttctgctgaattaatggcatggcaacgagagcagggtgaaattgattcaatgaggatcgcaaatgaaaaccgagtagctcgtttaaataaaatcatgggtagatcaggtattagcccattacaccaaaattgttcattcgataattatgacgttacatgtgaagaccaacaaagagcgttgtacaaagctaagagatacgctgagcaatttggtaaatcatttggtgggttcattttcagtggtaatcctggtactggaaaaaatcatttagcgtcagccataggaaaccacattatccaaaaagggaaaagtattctgatcgctacactgccggacataatgatgaaggttcgtgaaacctatcaaaaggatgctaaaacaacagagtcaaaactgatagatgatctgtgtgatgttgatttgctagtgcttgatgatgtgggtgtgcaacgtggaaacctcaatgaggaattaattatatttcaagtagtggatcgaagactagcaaacaaaaagcctgttggagtgcttacaaacctaaattatacccaactatccaaagtgttggatgaacgagtaatagatcgactccgaatgggaaatccaacaacgataaatttcacatggcaaagctatcggcgtttagttaagtaa

SEQ ID NO: 294907 - DNA, 414 bp, Proteus mirabilis
atgaaatttatgcaggatttagttgttgatattttacgtgacaataaaaaatcattgtcagttaacgagataacggcaattgcttctgatctcaagggaaagaagaaccgctcaacaaccaattatgcactgattaaattgattgaaagctctgttgtagaacgcaaagcagtagtcggcattgggtatgtctacaaactaacgcctgattacatggagcgcctacgtgaattagatatcaaaaaagaagcatcactgatgacaaagaagccagcaaaacctacggataagcatgttatctgtcagaaaggctcactaacctacgtcagaaagagcttaccaccgttacagcatggaaagattgctgatattcataaccgtatgaacgcaatgctggtggcggtacgtgcatga

SEQ ID NO: 294908 - DNA, 396 bp, Proteus mirabilis
atgaaacagcaaatttattatatcaatcctgtaccaaagccacgtatgacacagcgtgacgcatggaagaaaagacccggtgtcgttaagtaccacgctttttgtgatgagatgagagctaaccgttttacgttacctgaaagcggtgctcacctaacgtttgttattccaatgcctaaatcatggagtaagaagaaacgcattgagatgaatggtaaaccccaccagcaacgtcctgatgtcgataacctgattaaagctgttatggatgccatctttgatgaagattgcagggtgtggaatatcagtgcgtcaaagctttggggtgagcagggaaagataggggtaacgttacctgaaaatacagaaaatcatgaacttattaccattcgttaa

SEQ ID NO: 294909 - DNA, 360 bp, Proteus mirabilis
atgaaaattaaaacctcaaaactaaaaggattagcgcttgattttgcggtaggtaaagccgttggtgttgatgttcgtattggcaaagagtttattgttgatgctaataactgcgtatatagcccatctagtgactggttaaagtgtggtgagtttattgatacgtacgctatcgaactaattaacgagatggttagtgatgactatgatcattatcaaattgcatggtctgctatctgtaattacttacaagatgattattacgatggtgatacacctcaagaggcaatttgtcgcgctactgtcgctgtggtgttaggtggtgaagttgatgtgccaaaggagatagtaaatggctaa

SEQ ID NO: 294910 - DNA, 342 bp, Proteus mirabilis
atggctaaatcacctgctgaacgtaaggcactacaacgtaagcgccaaaaggaacttggcgtaacaaagattgaattgctggtggataatcaagagatggaaatgttacagcgtaattgtgttctacgtatgcctggtcgtgagccgtatgatgttgttgaatacatacagatgcttattcgtaaagatgatgcggagtataagcgacaagctgaggaactatctaagcgtaaatgtgagcgttgtggtgagcagttacccgttcagcaatgctgtttatcaggtgatgctaaatgttgggtaacaaagggctggcgtgaaatgatgttgaaggtagaatga

SEQ ID NO: 294911 - DNA, 675 bp, Proteus mirabilis
atggcgttcgattggattgcaggtacagcgttagttgttggtattggatcattatatttaacttggcagtcaacaaaggcagctaaaagagcaatagatacatcaattgaaatatataataaacaaaaagtagataatgataagcaaaaagaagatgaaagattaaacgctattctggggatttcggatgttgctgggaaagaagcatttttagtattgcaatacatattatttataattgaattacaagaattagcagaaaaggctgaaactattaattttgaatactcggaagctactgaatggaatagtatatgttttaacctgcctgatggtggcatcgtgaaaactggtcaagttcctaatattccaaagtattttagtcatgaagtattgattaattcagcgatttgtagtcctgatttgttctcaatgcttcttaacttaaatggacagatattagttgtcgagaaaactatatcatttttaatgaagtacattaaaaatgatagtatcaatgcacttagagattatctaaacaattatattccacgtgatggaaaaaatatgtttatacgatctatgttaaaagacacagtatgctttgagaaacaaatgaaggattacaatggatatctagaagtaaagagtaaaataaaatcagctcttttttga

SEQ ID NO: 294912 - DNA, 564 bp, Proteus mirabilis
atgactatcaaaagaccaagaaagaaacctgcacgacagccaacgcctatcaacgacaagatggaacgcttctgtcaggaatatatcaaatcccccgataatcaaactgatgctgcaatctctgctggatatgcttctggcagtgcttgcaaacgcgcatcacagctaatggctgatccccgtattcaagagcgtatcgcacaacttatgcaacagcgcaataagcgcaccaagatgagtgctgataatgtactcaaacgcttggttgatatgcttgatgcagatattgccgatattcttaatgagaaaggcgatattaaaccaatatctgaatggtcacctatttggcgtaaaagtgttgctgctttcgatatcatcgatatagacggtgatacacgcattaaaaaagtgaagttgctggataaaatcaaggtgcttgaactgattggtaagcacgttgatatcaatgcctttagagacagagtacaggtcgatgtaaacgtatcattggctgataagttggcatctgctcgtaaacgtgctcagcaagggagcgttgagtaa

SEQ ID NO: 294913 - DNA, 1485 bp, Proteus mirabilis
atgttagaagctttgcagaagtcaccagaagaacaactcattgaagatatcgcatcatttacgcatgatccattaggttatgcgtattacgcatttccgtggggtgaagctggtggagagcttgaagaatacaatggccctcgtcagtggcaagccgaagcattaaatgaaatcggtgaacatctacgcaatccaaagacacgccaccagccattattacttgctcgtgcttctggtcacggcatcggtaaatctgcatttatttcaatgatcatcaagtggggtatggatacctgcgaagattgtaaggtagtcgtcactgctaacaccgaaaatcaactacgcactaaaacgtggccagaaatagcgaagtggcaacggctatcactgactaataattggtttacttgcactaagacagctatctactcaaacgatcctaatcatgctaatgcttggcgtgctgatgcggtaccgtggtcagagaacaacacggaggcatttgcagggcttcacaacaaaggcaagcgtattatcctcgtgtttgatgaagcgtctaacattgctgatctggtatgggaagttgcagaaggggcgttaacggatgaaggtaccgaaatcatttggatagcatttggtaacccaacccgtaacacagggcgctttcgtgagtgctttcgtaagtttaaacatcgttggaacaccaagcagattgatagccgtaccgttgaaggtagcaacaaagagcagattaaaaactgggaagaggactacggcgaagatagcgacttctttaaagtccgtgttcgtggtgtgttcccgtcagcatcagaactacagtttatcccaacaggtttaactgatgaagcaatgaagcggattgtcacacaggcagaagttgctcatgcgcctgtaatcattggtgttgaccccgcctattctggtattgatgatgcggtgatttatctgcgccaaggtttatttagtaaatgtttgtggacgggctttaaaacaactgacgatgttgttatggcaaagcgcattgctgactttgaagatcaatacaaggctgatgctgttcatatcgactttggatatggtaccggcattcactccattggaacaagttggggtcgtgtgtggcgtttagttaagtttggtggtgcatcaacagatccacaaatgctaaacaaacgtggtgaaatgtataacagcgttaagacatggctaaaaattggcggagctattgatgatcaggaaaccgcagatgatttgtcatgtggtgaatacaaagttcgtgttatcgatagcaaaattgtactagaagataaaacagaaattaaaaagcgtcttggtcgttcaccgggtaaaggtgatgcgctcgcactgacgtttgcctatccagtcaccaaaatagatagaaattactcttcacctcattctggcgttaatgtcagcaattcagattacgatccttacgcataa

SEQ ID NO: 294914 - DNA, 213 bp, Proteus mirabilis
atgtgtaatccttttggcaatactccaaaaattacaactcctcctgctgttcaggcagcacctcaagaacaagatgcggcagtaacgggtagtcgtgatgatgaaatgcgtcgtcgccgtgcagccgcaggtcgtaagtctacgttactaacaggtgcgcagggtgcgacaagttcagcatccaccagcggtaaaaccttacttggtcaataa

SEQ ID NO: 294915 - DNA, 1665 bp, Proteus mirabilis
atgtcaacgccattgaaacaacagctactgcaacaacttaatcagttggaaacagagcgtagctcatttgaaccgcattggcgtgaattgtcagatttcactcgtcctcgtagtacgcgctttactgcgtctgatgttaatagaggagatcgccgtaatagtaagatcattgaccctacggcatctttggcttcgtcggtactttccagtggaatgatgtcaggcattacaagtcctgctcgtccttggtttcgtttagcaacacctgatcctgatttaatggattatggccctgtaaaactttggctagaaaccaccgaacaacgcatgaacgaagtgttcaatcgttctaatctctatcagtcattaccgttgatgtatggggatttaggtacctttggcactgcagcaatggcagttgttgaagatagccagcgtattattcgcaccgtgcattttcctctaggcagttactacattgcgaatagcccaagcctgagtgttgatgtttgctatcgcaaatttacgatgaccgttcgccagttggtaatggagttcgggattgatagcgttagcgacactgttaaatcaatgtggaattcaagacagtacagccaatgggttgaagtggttcatgccgtatatccaaaccttgaacgacaaacaggaaagttagaggcgaagcacaagccttttaaatccgtttatcttgaagtggcgggtgatcacgagaaagtgttacgtgagtctggctatgatgaatttcctatcatggcgccacgttgggaagtcaatggtgaagatgtttacggttcatcttgccctggtatgttggcgttaggtggtactaaagcacttcaattaatgcaaaagcgtaaagcgcagatgattgataagctgaccaatccacctttacaagtgccagcctcattaaaaaaccaacgggtaaataccatacccggaggcattaactatcttgatgaggcaaatcctactaataaaattcaaacgatttttgatgttcaacccgtagcattgaaagcactacttgaagatgttcaagatacccgtcaactgattgatacagcttactttgtcgatttattccgcatgatgcaaatggtgaatacgcgctctatgccgattgaagccgttgttgagatgcgagaagagaagctattgcaattagggcctgttctgcaacgccttgattctgagttactcgacaaactgattaatcgcactttctcaatcttagtaaataaaaacttacttcccattgcacctgatgaaatgcagggaatggatctaaaggttgagtacatttctgtaatggctcaggcacagaaagcgattggtgttggcagtatcgaacgctttgctggctttgttggcaatctggcaaaagttaagcctgaagcccttgataagcttaatgctgatgatgccattgataactatgcatcagcaattggtgtttctccaactatcgttgcaaccaatgagcaagtacaagccatacgtcaacaacgacaagcacagcaacaacaaatggctcagatgcaaatggcgcagtccgctattgatggtgctaaaaccctcagtgataccaatcttgataatgatagtgccttgtccgctatggctggtggaggtgctcaatga

SEQ ID NO: 294916 - DNA, 315 bp, Proteus mirabilis
atgacacatccattcgatgcgtatgaagacgagagaattgctcgcactgaatacgatattcaacaaaaaaataggcaagagaaagaagaacaacagctaaaagaggttatgtccacagaagctgggcgtgctgttatttggcgtttgatttctgactctggcgtatttcgtagctctttttctaacgatccctatgcaatggcatttagagagggcgaacgtaactatgggttaaaagttttcaatcaattacaccaagtttgccctgagctttatgcgcaaatggcaaatgaagcaactacaccaagcgtttaa

SEQ ID NO: 294917 - DNA, 678 bp, Proteus mirabilis
atgaacttatggcaaaaattaattatgcgtcgtttgtataacgagcaacacagcgagggaggtgaaggcggtggcggtacagcaacggaacctactcaagaaacatcagcaacagataaaaatgagccaccagcaaatagtgatgatcctactaaaagcactgaaaaagagaatggtggagagcagggcaagctggctgataagaaaaatgatgccaataaatcagatgtaggtgcgcctgaaaagtatgaatttaaagcaccagaagaagggcaagagcttgataaaggtgcattagaagtctttgagccgattgctcgtgagctgaatttaaacaacgaacaagcgcaaaaactggttgatgtttatggctctaaaatcatgcctgctattcagaaacaaatcaatgatggttggcaaaagcagactgagcaatgggctgaaactgttaaagcagatgaagaattaggatcaaatgagtctattggtgcagcacaaaaggcattagatacctatggttctgatgatttgaaattgtatttaacagaaacagggttaggtaatcacccagagattattcgggcttttgccaagataggcaaagcaatgtcagaggacggtcttgtcactggcaacagtaacggcagtaaaagtgctgctgatgttttatttggataa

SEQ ID NO: 294918 - DNA, 981 bp, Proteus mirabilis
atgcctgctttaactctcgttgattgggctaaacgacaaggccctgacagcaagcaagcgaagatcgtcgaattgctgaatcagtctaatgaaattcttgatgatatggttttcgttgaaggtaatttaccaacgggtcaccgtacaaccgttcgtactggtttaccatctgcgacatggcgtttgcttaattatggtgtaccgccaagcaaatcaaccacagcacaggttactgatgcgattggtatgcttgaaacctattctgaagttgataaagatcttgctaacttgaacgggcaaaagaatgaatttctattgtctgaatcaattgcattcttagagtcaatgaaccagcaaatggctgaaacagttatttatggtgatgctacggttcatcctcagcgctttacgggattagctgcacgctttaacgatatgaaagcaaagaatgcagtcaatatcattgatgctggtggtactggcagtaacttaacttctgtgtggttagtcgtatggggtgaaaacacggttcacggtattttccctaaaggttctaaagcaggtttagagcaaaaccatttaggcgaagttactttagaagatgagaacaaaggtaaataccaaggctttcgtactcacttccaatggaaaaatggtatctcagttcgtgactggcgttatgttgtccgtatcgccaatattgatttatccaaaattggtaaagatccagaaaaagcggacacactcgatttgccagacttgtttattcaagcaattgagaagatccctaacctctctatggggcgtcctgttttttattgtaaccaacaaattcgtagctggatgcgtcgtcaaattaaaaacagcaaaaacgtcaatatttccatggcagaagttgccggtaagaaagttgtttcattcgatgaaattcctgttcgccgtgttgatgccatcttaacgactgaagatcaggtgaaataa

SEQ ID NO: 294919 - DNA, 432 bp, Proteus mirabilis
atgattttagataaagaaacgcttttttcactggatcaggcggttactgcatctgctgtaagtaagcaaattatcgacttaacgccagtgcatggcacatttcgtgatatcggtattggtgagccattagagctgtttgcacaagtgactgaacaggctaaagcagcaggtgaagcgactgttcaaatcaagttagaaaccgcgacagacgataaattctctgatgctaaatctatctttgaatctgtggcaataccaattgctgatttaaatgcaggtaaacgtattgtggcgaaagtacctcaaggcgttctgaagtacctgcgcctgcaatatgttgttgcagaagggccattaacggcgggtaagttcaccgcgggcattaacctaactgttgatgctcatcctatttacgatgctgtaactcaataa

SEQ ID NO: 294920 - DNA, 342 bp, Proteus mirabilis
atgtcacgatataaggttttaaaaaaatcatttatcgctgggcgtctacttgaaatcggtgaagaggttgagtacgacggtatagctggcgataacttagcgttaattggtggcgctgatgctcgacttaatactcatagtgtggctgatggggctggtgataatactggtgaaggcataagtaatattgctgtaagcggttcaggtgtggcaattgattcaagccttgatgcgcttcgtgagcaatatacccagctatttggtaaagcacctcatcacaatatgggcgcagataaaatgcgcaccgcaatagatgaaaagcggaaagaacttggggtttaa

SEQ ID NO: 294921 - DNA, 312 bp, Proteus mirabilis
atgaaactaaccaatctaaaaaccagcacagaaacttatgaaaatgccaaaggtgaaaaagaaactcgtgaagaatatccatacgggctacgtatttcacttgaaaacgacacagtagaaaaattaggtgtttctattcctgatgttggtgaaagtattgagctgtctgctgttgccaaaatacggtctaaatctattaatgaacgtgaaggtaagaagtcagtatatgtagagttacaaataaccgatctggctctaggtgtaggcgacacaaaatcaacggcagatgttctttttgatggaggtgagtaa

SEQ ID NO: 294922 - DNA, 606 bp, Proteus mirabilis
atggcctcagaaattgaaatttgcaatattgcattaagtcgcattggcaatagccgttcaattaatagtatgaccgaagccagcaaagaagccgttcaatgcaaccttcattatgcgcaatgccgtgatagtgtgctggccgattttccttggaactttgcgactaaaaaggtggcattagccaatacaaataatcccccgcctaattgggcgtatgcctatcgctatcctaatgattgtctaaaagccattggtattgtcgaacctcatcaaaagtaccgtagaccagatacagcaatccattttcatgttggttcagatgaaaacggtactggtcgattaatttttactgatcaccctagtgcttggcttgaatatgttgcacgtattactgacgtcaatatgtttgatgcgttatttaaagatgcgcttgcatggcgtttagcggctgaattagctcgtccattggcatcaaatgcgggtattggtggtgaggcattacaaatttaccaaggtgttattaaaagtgcggccgcacattcattaagtgagtcagcagagccaactgattatatggatgaattcacacaagcgaggttgtcataa

SEQ ID NO: 294923 - DNA, 2463 bp, Proteus mirabilis
atgccatttagtcttattcaacctagtttttcaggcggtgaaattgcaccaagcctatatggtcgtgttgaccttgcgaagtattcaacagcactgcgcaagtgccataactttattgttcgtcaatatggtggcgttgagaatagaccaggcacacgctttattgctgaaacaaagtatcaaaataagaagtctcgccttattcctttccaattcagcaccgtacaaacctatgcgttagagtttggtgatcgttatattcgcgtatttaaagatggtgggcaggttctctatgctgatggtgaacataaaggcgaagtgtttgagttagagacaccttataaagaagctgatttgtttgatttgaagtatacgcaatcagccgatgttatgacgattgttcatactgattatccaccaatggagttacagcgttacgatcatgatgattggaagttagtctccgttgaaaccaagaacggcccctttgaagatatcaataccgataaggcaatgaaagtttatgccagtgcaagcacggggcaaattacgttaacgtctacgcatgatatttttggtactgagcaaataggtaagcagttctatttagagcaacgtgatattgatgcggttcctgtatgggaaacagataaaacaaccaacctcaatgatcaacgccgtgctgacagtaactactatcgcgccaatagtagcggtaaaacaggaacactaagaccgtctcatactgaaggaatgagctgggatggttggggtggtgatacaggtattcaatgggaatatctgcatagtggttttggtatcgtaaaaattgaaactgtaagtgaagatggtaaaacagccacaggaaaggtgatctcttatattccatcaaatgccgttggtgaagataatgcaagccataaatgggcgcgtgcagtgtggaatgatgttgatggttatccaagcaccgttgtttattatcaacaacgtttattctttgctggctctcgtgcctacccacaaacgatatgggccagtcgtagcggtgactataaagactttggtcgcaataatcctattcaggatgatgatcgcattatctacacgtatgcaggtcgtcaagttaatgaaattcgccatttgattgatgtcggttcgctggtggcattgacctctggtggtgaatatcaaattacaggcgatcagaacaaagtacttacaccttccagtttttcaatgtcatcacaaggggctaacggctcaagtgatttaccgccgatctctgttgcgaacattgcgctttatatacaagagaaaggtagtgctgtgcgtgatttatcgtactcctttgatgtcgatgggtatcaaggcactgacttaactatgttggcaaatcacctatttcaacgtcaccgtattgttgattggtcatttactagggttccatattctattgcatggtgcatacgtgacgatgggttaatgctggctttaacctatttaagagaacagcaagtttttgcatgggcgccacaatcgacagaagggaaatttgagtcaacgtgttcgatcagtgaaggcaatgaagattcagcctattttattgttcagcgtacagtaaacggcaaacaggttcggtatgtagagcgcttggctagccgtttatttactcgtacagaagatgctttctttgtggattctggcttaagttatgacggtagaaatactgatatatcaaaaacagcaaccatcactggtggagcgggtgagtggaactatcaagaaaactatccattagtgatttcaggtgatccggtctttagtgcttctgatatcggtagtgccgtcaatattccttattttgaagataatgagcacaaagagcttcgctgtaagattgttcaatatatatctgcaaatcaagttgttatttctgctaatcgcaatattccaccagcattacaaaatacacccactactgaatggagcattgcccgctatcgctttgctggcttaaatcatcttgaaggtaagacagttaatattctttctgacgctaatgtttccccgcaggccattgtcaccaatggtgcagtggaaattgatacaccatcagccgtagtgcatattggattacctattaccagtgaattagaaacgcttgatatccatatcaatgggcaagaaacattacttgataagaagaagcttattaaggttgccagcttaattgtaaatagtagtcggggtatttgggctggtactgaaaaagaacggctatatgagtatcctcaacgtcaattcgagttttacgacaatcctgttgatgatgccacaggcattgttgaaattaatttagatgcagattggagcaaaaacggacgtgtctttattagacaggttgatccgttaccgttagcggtgctctctgttattccgcgtattgatgctggtggtttctga

SEQ ID NO: 294924 - DNA, 489 bp, Proteus mirabilis
atgctggtggtttctgatatgaaaaaacatcatgtacaaattattcctgctacttatgaacatattgttcgtttattaccacatgtaagacaagctgatgttgatgagttctacgctatgtcaatgcaaacacctgagcaggtattacgacatggcttatctgtttctactaaagcctatgccggcattattaatgatgaagtcgtgactatttttggtgttgcttctggctcattactgactggtttaggtatcccttggctagtggggactgatttattagagcaacaccagaaaacctttctacgacgctgtaaacccatcttaaaacagatgttagggcaatacccaacactgatgaattatgtcgatgaacgtaatcatattgctaaggcgtggctccattggttggggtttcagattgaagaagcaaagccagcaggtttacttcagttacctttccatcgttttacattgagggctaaataa

SEQ ID NO: 294925 - DNA, 549 bp, Proteus mirabilis
atgtgtgaaccaacaacattagcggcagcagtaattggtacttctgcattgcaagcatacggacaatataccgatggtaaatttcaagcatcagtggctaatcaaaacgccaaaattaatgaagatgctgcacttgatgcaattaataaaggcaatgctcaggcacaagaacagcgtagacgcactcgccaattagcagctacacaggcagcaacaatgtcagccagtggcattgatttaagcactgctggggctttagatattttaggtgatactgctgcaatgggtgagcttgatgcgttaactatggttaataacgcttctcgtgaagcgtatggctatcgtatgcaagctgagaatgatcgccttaatgcaaaaatggcaagacgctcaggcaatatgggtgcaatgacaacgttattaacagcccctattcaagcttatggcgcgtatcagttggctggtggtacatggagtccgttcggtggtggtggctctggtgctgcgaaagccggcaaaacattcgctaaagcaccaaaaggattttaa

SEQ ID NO: 294926 - DNA, 3084 bp, Proteus mirabilis
atgccaaaggttcctacatacgataatagaacggttatacctgagcagttaccgaataatgggttttctgttcaatcatcacctgatgcttttggcgctggcattggtcgtgttggtgagcaatatgttggtttgtttgcagaagcaaaacaaagggccaatgttgcactggcgcaagatgccgcattacagctacgacagaaagccaacgaactgatgaccgatccacaaaatggattactttctcagcaaggtaaaaatgcgattggcaaagcatctgagtatgaacagtcatttcgtgattatgccggtgaaatatcatcaacactgcctgacgatattgtgcgacaaagctttatgcaacaagcgcaagaaatgggggttcagtttgcatcacaagcgaatcgtcatgagatggggcaaatcaaagcttatgaacaagaccagtttcaatcaacgctaacattaaatgcagagtctgcagcatcaatgtacggtgataatcaggcttatatctctgcacataaacaagtgtttcagcaaatagaagagtttggattatcgcatggttggggggaagagcagatcctcgccaagaaacaagaattcaaagtagcgactgcacgtaaagcgattgaaaaccaactcggtgctgattatatggggttcttagaacgaaatggagaaccttcaagccttggtggtgctaccagaaataatgcgttctatggtggtactgttggtaaagttaaaggaatgacccaacagggtaatattaatttactcaataggccaacagttaaaaacgaagacggctcaattagtacagtaagaacgatttctattggtaccgatgatggtgaagtgctgatacctaccgtaagtgacgatggcaagctgttatctgatgatgaagctattgcgttatacgagcaaacaggtaagcacttagggatttttgataaccctgaagatgctactgcttacgctgataatctgcataaacagcaagagaatatgtatacacctagtaacggtgatacaagaggtgttagaaacaacaaccctggtaatattcgtatatctagcaataaatgggtagggcaaaccggtgatgatggtgcatttgctaagtttgccacacctgagcacggcattagagcattaggtaaaaatctactttcttatgctcgacaaggttttgttacaccagagcagatcattaatcgctgggcaccaccagaagataataatgatactcaggcatacattgagtatgtatctgattaccttggtgttgcacccaatcaaccattagatttaacgaatcttgataccttaacgcatttatcgacagcgataatgtataaagaaaatggccgtaatcgtgttaattacactgatgagcagatagcaatgggaatacagtcagcacttggttttgttgaattacgagcgacatctgaagcacccaaactattaacgggatctgccgctttcgatgccttagatgaagctgaccaagcaaaatatttacgacaagcagaacagctacgtaagcaaaagcaaagtgagttacagcaacaattcggtactcgtgtcgctgactcttacgcagcatgggaaagaggacttgatgcacctaatgcgcctactcatgatgaattaatctctgcgtttggctatgacaaaggttcagccatgtctgccgatatgcaagaagctaaacgttatgctggttttatgtcagcagctaaagaaatgtcgccacaagcacagcaagctttgttatcacaaattagacctcaaacgggtgcagcaaactacgaaagcaaaattcaacgttgggagaaatttggtaagttcgttgaagggaacatcaaggaacaagataaacagtttgcagctaaccgattacagctttccattcaaaataactttccgcttgatcctaatgataagaataatcagcaggcagcagatgattactttgaacaacatattcagcagagctttaatttacgtgatgataatagcttaaatgccgttgccgaactcacagcaaggacagggattatcccatcacaagttaagtctgtattgaatatgggggcaacatctaaagatcctgaagttgttcttcctatcgcgaaaatgtatgggcagatatttgataacaatccggcatcagctacggatattccatcaagcacaatggcgtattactcaaaagtatatagtttaagtcgtgcgggtatgcctgatgataaagcggtagaaactgcatttaagacgacatttgaacaagatgaacgcactaagcaaatgatcgcttctcaaatcagggataaaggatatatcaaggatagagataaagcagctcaatctaatatcaatgatttttacccttggtataaaccattttcttcaccaagcattagtaagcctggtactcaaaatggcgcttacttacgtgactatcaaacgctgtatgatgctaactttgctgaaacaggtggtgatgcagaactcgccaagaaaatgaccaacgctcaaattaaaagaacgtgggcagtatcaaatatcaatggcagtgaagaagttatgcgttatgcaccagaagccgtatacggtattaatgaatcaggtgctggaaactggatcgcgggtcaatgggaagaagagaaaaagcaattaatgtctaagtcatttggtggtgcttcttctggcactgaaatcgttattgtctctgatgcagtgacaccaagagattacagctacggcataatgataaaacaaaccggtagtgatgatatccctatttatcgtccatacacgggagataacggtttacctattcgctttaaaccagaacagtcatcatcaccaatgcataaagcaataatggaaaaacgtcagcaaggtattgaagatgccgaagcgaaaagaataaaagataaacagagagagcaatcgcaggctgaatatgaagaacatcgtgaaaatatccgtgagcaatataaagaagctcacaatgagcgagtaaataaattcaataattatttttcttgggataaaaactga

SEQ ID NO: 294927 - DNA, 3384 bp, Proteus mirabilis
atgcctatttacgaacaacaacctgatgatattttatctgcggatattaatgctgttcagcaacctgaacctacttacggtgataatgtttcaccgtcttggtatgaccctattaatccgcttgatgatagacggcaaactaaagaattacgtgatgcggcgtttcgtatcgataactcagtgggtagcttgattgctactgcaccttttaatcaatttgaagatgtagaaggctataacccatttgaagatgaattaacgctttcaggctatgaagactatgccgatgcctttattcattcaaactctcctcaagaaaccgctgcaataaaacaacgtattgatcgtgagcgtaacgataagcaaatgttagcagatgctggcggtgctggtgttgtgagtagtattgctatgggggttattgatccaattaatgttgctgtaatgatgataccagggggagccattgtaaaaggtagcagtgtggccacaaccgcaggtaagtttgcattggcaaataccgctggtggtgtagcttctgaaatggcattgcatagtacccaagaaacacgaacattaactgaaagtgcaattaacattacacttgacgccatgatcggtggaaccctaggttcagccgcacagttagtaaaaaaccggggtgaattggtaacaaaagtaagaaatgatttaattggagaacaacaatcagggcaacaaaatattccaaataatattcctgataattctagtgttggtgcaatggaagtacctaacaccacattagaacaagaaaccttaaaagggccatcatttattaatcgtacgatgaatgttagccctgttggccgtgttgctcaatccccctctaaaacagcgcgtcaaattaaccaacaactcacagaaaataactttacctttgctaaaaatgaagaaggtattgcgacatttaccgctgttgaaacaaaagtgagaggttatgaaactctcgtttataaacaagtagaatcaacgaaagaccactttaaacaatatcgtcaatctggtggccgtgatatgaattattaccaatttagtgaagctgttggtgatgctatgcgcaatggtgatactcatgcaataccacaagtggcagaggcagcacgttctattagacctattgtcgaagcaaccaaagatagaatggttgaattagggatcttacgtgaaggtgtaaaggtgacaactgcacaaagttatttccctcgtatttataaattcgacaaaattttaaatgatcgtactgagtttaagaaaatcattgctgactggttagaagagattaatcaaacatcaataaataaagccaaaggtagccttgatcgtgctgaaattggtattgataaagcacgtaacgcttcaccacaagccgaacgtttagggcttgaaattaaagaggctgagagttggtcaggtaaaaaatctttgttgatggatgatattaataaatatcaaaaaatcattaatgaaaagaatgcggtagaagttgagctaaattcactttctaaccttactaagttaaataaaacacaaacaagaagacaagcaacattacaaagaaaattacagcgtattaatgatgctgagaataaattacctgcgttacagcgtagcgtagatattcttgataaccctcgcaagtttaggaatgaacatcgtcgtttaacacgaactgcaaattcattaactcgccatgacagaattaggcaatcagcattaaatcgcatgacacctttagagcgcgaagagttagatgcggcagcagatgatatcgttaataaaattatcggtgcaccatctggcattgtacctagtgaactgatccctgatgggttagttaaacgtgctggttttacaaaagatagaaccctaaacattcctgatgaacgcattaaagactatctcgaatcagatgttaactatgtgatggaaaactatattcgccaagttgcgcctgaaattgaactcacggctaaatttggtcgtgttgatatggataatcaaatcaaagcgattacagaggaatataaccaacttattgctgatgcaaccacacctaaagaacgcagtcgattagaagcacgaagagaggcggatctacgtgatattcgcgcgatgcgtgaccgtttattaggtacttatggcgcacctaaagatccagcaagtctatttgtgcgagctggccgtgtggctcgtcacgttaactttttacgtttattggggggtatgacaatatcatcgttacctgatatggctcgtccgattatgcaacacggtttacgtagtgcgttaaaaccattgggtaagatgctaactgatatcagtgctatgcgcattgctaaggcagatttgcgtgaaatgggtattggccttgaatatgcattatccagtcgttctaaagtgattgctgaccttagcgatccctatagcagacgtagctatttagagcgtggtttacagtggtcatcacagaaatttggtaacttcacattaatgaaccaatatacagacacgatgaaaatgtggtctgggcttattactcaatctaaggtactgaaagcagcaaatactttagatgctggtggttcgttaagtaaacgagaaataaagaaactggctcatataggtattgatgaatcaatgctaaagcgtatagcagatcagtttaaacgacacggggaagacttagacggcatgttaacagggcatagccatttgtgggatgatcgtgttgtgcgtgaaactttccaagcggcagtattaaaagacgtaagaaccacggttatcacgccgggcattggtgatacaccattaatgatgagcagtgaactaggtaagattgtgatgcagtttaaaaccttcttctttgctactcataacagagctttagtatcaggcatacaatcaggtgatgcatcattttattatggggcattacttcaggtagcacttggatccctagtctatgttctcaaggccaaaatggcaggacgagatattaataccgaaccggctaatttagtaaaagagggtttagactggtcaggaatgatgggctggttaggtgagcctaacaacgtattggaaaaccttagcggtggtacttatggtatgagtgccatgtttggtgggccaccagcatcacgttatcaaagtcgcaatggtataggtgcattgctagggcctacatttgaccttggcggtgatattaaaaacatcacatcaggtgtattaaatggtgagtttgatgatagagaagtgcgatctgtacgcaaactattacctttccaaaacttattttatttgtcaccattattaaaccaagttgaggagcaagttaaataa
